(19) United States
(12) Patent Application Publication
(10) Pub. No.: US 2021/0189491 A1
(43) Pub. Date: Jun. 24, 2021

(54) DIAGNOSTIC, PROGNOSTIC AND THERAPEUTIC USES OF LONG NONCODING RNAs FOR PATHOLOGIES AND TOXICITIES INDUCING HEART DISORDERS

(71) Applicants: Firalis SA, Huningue (FR); Luxembourg Institute of Health, Luxembourg (LU); University of Lausanne, Lausanne (CH); The Cardinal Stefan Wyszynski Institute of Cardiology, Warsaw (PL)

(72) Inventors: Hueseyin FIRAT, Huningue (FR); Sabrina DANILIN, Riedisheim (FR); Yvan DEVAUX, Zoufftgen (FR); Lu ZHANG, Metz (FR); Przemyslaw LESZEK, Warsaw (PL); Eric SCHORDAN, Wentzwiller (FR); Samir OUNZAIN, Lausanne (CH); Thierry PEDRAZZINI, Lausanne (CH)

(21) Appl. No.: 16/622,059

(22) PCT Filed: Jun. 12, 2018
(86) PCT No.: PCT/EP2018/065492

§ 371 Date: Dec. 12, 2019

Related U.S. Application Data
(60) Provisional application No. 62/518,418, filed on Jun. 12, 2017.

(51) Int. Cl. C12Q 1/6883

(52) U.S. Cl. CPC C12Q 1/6883; C12Q 1/686; C12Q 2600/178

(57) ABSTRACT

The present invention provides methods for the diagnosing, monitoring and prognostication of primary and secondary cardiac disorders in a subject based on lncRNA expression. The invention also provides methods for predicting heart failure after myocardial infarction, and differenciation of Ischemic versus non-ischemic Heart Failure. The assessment/quantification of these lncRNAs may also be used as a marker for monitoring drug-induced cardiac toxicities and for the assessment of cardiac involvement during systemic diseases and others disorders/toxicities impacting cardiac function. These lncRNAs are cardiac tissue enriched and may be involved in different cardiac pathophysiological events and represent a potential target for therapeutical approaches.

### CROSS REFERENCE TO RELATED APPLICATIONS

[0001] This application claims the benefit and priority of U.S. provisional application 62/518,418, filed on Jun. 12, 2017.

[0002] The present invention provides new biomarkers and methods for the diagnosing, monitoring and prognostication of primary and secondary cardiac disorders in a subject based on lncRNA expression. The invention also provides methods for predicting heart failure (HF) after myocardial infarction, or differentiation between Ischemic (ICM) versus non-ischemic (Non-ICM) HF (e.g., dilated cardiomyopathy (DCM)). The assessment/quantification of these lncRNAs in a single mode or in combination with other lncRNAs can also be used as a marker for monitoring drug-induced cardiac toxicities and for the assessment of cardiac involvement during systemic diseases and others disorders/toxicities impacting cardiac function. These lncRNAs are cardiac tissue enriched and may be involved in different pathophysiological events pertaining to cardiac function and represent a potential target for therapeutic approaches. These therapeutic approaches may be inhibitors or activators of these lncRNAs or the products activated or inhibited by these lncRNAs.

### FIELD OF THE INVENTION

[0003] The present invention provides a list of cardiac associated or cardiac-enriched lncRNAs and methods for monitoring and diagnosing cardiac disorders in a subject based on lncRNA expression. The invention also provides methods for diagnosing different types of HF such as ICM versus Non-ICM (e.g., DCM), methods for predicting HF after myocardial infarction, and for monitoring treatment efficacy and drug-induced cardiac toxicities.

### BACKGROUND OF THE INVENTION

[0004] In recent years, long non-coding RNA (lncRNAs) have emerged as a new type of non-coding RNA and many studies have shown their potential as powerful biomarkers in various pathologies such as cancer.

[0005] In contrast to other non-coding RNA such as miRNA or snoRNA, lncRNA lack strong whole sequence conservation across different species but rather appear to contain short, highly conserved elements. Despite only a few lncRNA having been shown to be biologically relevant and functionally annotated, there's growing evidence that the majority of them are likely to be functional. While the exact function of most lncRNAs remain unknown, they have been implicated in various biological processes, mainly relating to transcriptional, post-transcriptional and epigenetic regulation. The majority of lncRNAs to date, that are functionally characterized, are believed to regulate developmental processes. However, recent profiling of the mice cardiac transcriptome, after myocardial infarction in mice cardiac tissue, has shown their role in controlling mature tissue as well as the relevance of their expression level in cardiac pathologies. There are publications which have argued for apparent similar roles of certain lncRNAs in humans e.g., WO2015092020,

[0006] Cardiac disorders such as coronary artery disease (CAD), acute myocardial infarcation (AMI) and heart failure (HF) are leading causes of mortality and morbidity in the world and cardiac toxicities such as those induced by drugs and drug candidates are the most important cause of drug withdrawal. Thus, there is a very important unmet medical need for diverse types of biomarkers for assessing cardiac function, including but not limited to diagnosis, prognosis, monitoring of drug effects and diseases activity. Several cardiac pathologies remain still incurable or need less aggressive and more personalized treatment. lncRNA represent a novel family of targets useful for these diagnostic and therapeutic applications in the cardiovascular area. The present invention relates to lncRNAs that are cardiac enriched and described for the first time in human cardiac tissues. They represent good therapeutic and diagnostic candidates for cardiac related disorders.

### SUMMARY OF THE INVENTION

[0007] Given that expression levels of lncRNAs could be associated with heart disease in human cardiac biopsies, the inventors set out to characterize lncRNA specifically relevant to cardiac tissue and involved in cardiac remodeling.

[0008] The present invention relates to lncRNAs having a sequence selected from the group consisting of SEQ ID NO 1 to SEQ ID NO 3238 (Human sequences) isoforms thereof, fragments thereof and variant sharing at least 80% nucleotide sequence homology (hereinafter named “lncRNA of the invention”) suitable for the diagnosis, prognosis and monitoring of subjects suffering from cardiovascular disorders.

[0009] In particular, the invention provides a method for diagnosing and monitoring cardiac disorders, the method comprising determining the level of expression, in a biological sample derived from said subject, of one or more lncRNAs of the invention and calculating differential expression of one of more lncRNAs of the invention compared to one or more lncRNA in a biological sample from a control subject, wherein differential expression of one or more lncRNAs of the invention indicates that the subject has developed or is at risk of developing a cardiac disorder. This method of the invention is also suitable for the prognostication of cardiac disorders.

[0010] In another aspect, the invention provides a method for predicting the development of heart failure (HF) in a subject having suffered myocardial infarction, a method for monitoring treatment efficacy in a subject suffering from cardiac injury and receiving a pharmaceutical cardiac therapy, a method for evaluating drug-induced cardiac toxicity in a subject receiving an effective amount of pharmaceutical composition, a method for diagnosing ischemic cardiomyopathy (ICM) in a subject, a method for diagnosing dilated cardiomyopathy (DCM) in a subject, a method for differentiating ICM vs Non-ICM (e.g., DCM) in subjects suffering heart failure, the methods comprising determining the level of expression, in a biological sample derived from said subject, of one or more lncRNAs of the invention and calculating differential expression of one of more lncRNAs of the invention compared to one or more lncRNA in a biological sample from a control subject.

[0011] In another aspect, the invention concerns a diagnostic/prognostic kit for carrying out any of the before cited methods.

[0012] In still another aspect, the present invention provides a method for treating a cardiac pathology in a subject comprising administering to said subject an effective amount of a pharmaceutical agent modulating the expression of one or more lncRNAs of the invention.

[0013] It yet another aspect, the invention provides for a method of detecting one or more lncRNAs (e.g., lncRNAs having a sequence selected from the group consisting of SEQ ID NO 1 to SEQ ID NO 3238). In one aspect, the method comprises the step of obtaining the lncRNA from a human biological sample (e.g., a human plasma sample).

[0014] In still another aspect, the invention provides a method of obtaining one or more lncRNAs, wherein the method comprises selection and isolation of total RNA. In one aspect, the lncRNA is correlated with the risk or development of a cardiac disorder. In one aspect the lncRNA is obtained from a biological sample (e.g., a cardiac biopsy or blood sample (e.g., plasma sample)).

### BRIEF DESCRIPTION OF THE FIGURES

[0015] FIG. 1 shows the sequencing data analysis and the selection procedure of known lncRNA relevant to the cardiac pathologies.

[0016] FIG. 2 shows the sequencing data analysis and the selection procedure of novel identified lncRNA relevant to the cardiac pathologies.

[0017] FIGS. 3A and 3B show the correlation between results obtained by sequencing with both Cuffdiff (middle bar) and DeSeq (right bar) analysis and results obtained by PCR (left bar) on patients of the same conditions. FIG. 3A compares ICM and Control. FIG. 3B compares DCM and Control.

[0018] FIG. 4 shows the expression of 4 lncRNA in human plasma samples as analyzed by qRT-PCR after preamplification: AMI indicated by a square and Control indicated by a circle.

[0019] FIG. 5 shows a histogram with the number of lncRNA, which passed the different threshold of coverage depth (in horizontal axis). In total RNA-seq protocol (left bar), half of 3238 lncRNA have an average coverage depth less than 2×. In FiMICS (targeted sequencing) protocol (right bar), more than 3000 lncRNA have at least an average coverage depth of 2×.

[0020] FIG. 6 shows Venn diagram of the significantly expressed lncRNAs from analysis of RNASeq and FiMICS data generated in serum samples collected at D3 of patients with AMI for the prediction of ventricular remodeling measured by the Echocardiography at month 1 post PCI. Low LVEF corresponding to the ventricular remodeling is grouped using two thresholds: either LVEF<40% or 45%.

### DETAILED DESCRIPTION OF THE INVENTION

[0021] The Inventors intended to characterize the cardiac long non-coding transcriptome and more particularly the dynamically modulated fraction after left ventricular remodeling. The Inventors performed deep RNA-sequencing of cardiac biopsies coupled to novel transcript reconstruction and integration in genome-wide data sets as well as previously characterized predicted human cardiac-specific lncRNA to systematically identify and annotate heart-specific lncRNAs.

[0022] Surprisingly, it has been found that the lncRNAs of the invention are highly cardiac and context specific, thus providing a high potential as biomarkers of cardiac disorders as well as pathological response and physiological homeostasis. In addition, using novel transcripts reconstruction, novel lncRNA never described before that are cardiac-enriched and differentially expressed in cardiomyopathies have been found. These findings have been validated by comparing their RNA-Seq data with qPCR data from patients suffering the same conditions. A number of these human lncRNAs are detected in human plasma samples, supporting the feasibility of measuring their expression in patient biofluids for diagnosis and prognosis purposes. Furthermore, the inventors have identified lncRNAs which are differentially expressed in blood sample between the low LVEF (left ventricular ejection fraction) group and the high LVEF group after PCI (Percutaneous Coronary Intervention). Collectively, a novel panel of heart-specific lncRNAs with unique prognosis value relevant to cardiac disorders has been found.

[0023] As used herein, a control sample refers to a biological sample such as tissue or cells (e.g., blood sample) from a normal subject (e.g. an individual who does not have cardiac disease or any condition or symptom associated with).

[0024] As used herein, “identity” refers to the sequence matching between two polypeptides, molecules or between two nucleic acids. When a position in both of the two compared sequences is occupied by the same base or amino acid monomer subunit (for instance, if a position in each of the two DNA molecules is occupied by adenine, or a position in each of two polypeptides is occupied by a lysine), then the respective molecules are identical at that position. The “percentage identity” between two sequences is a function of the number of matching positions shared by the two sequences divided by the number of positions compared times 100. Such alignment can be provided using, for instance, the program Basic Local Alignment Search Tool (BLAST) from the National Center for Biotechnology Information NCBI.

[0025] The one or more lncRNAs, fragments thereof, isoforms thereof and variants sharing at least 80% nucleotide sequence identity thereto listed in Table 1 are not part of the present invention. The sequences of these one or more lncRNAs, excluded from the present invention, are described in PCT/EP2014/078868 (Université de Lausanne) and in filed in ST25 format.

TABLE 1

| XLOC_ID | Physiology Cluster | Lnc |
|---|---|---|
| XLOC_007900 | 1 | Lnc7900 |
| XLOC_008052 | 1 | Lnc8052 |
| XLOC_006224 | 1 | Lnc6224 |
| XLOC_013471 | 1 | Lnc13471 |
| XLOC_002075 | 1 | Lnc2075 |
| XLOC_023749 | 1 | Lnc23749 |
| XLOC_008063 | 1 | Lnc8063 |
| XLOC_024203 | 1 | Lnc24203 |
| XLOC_019889 | 1 | Lnc19889 |
| XLOC_008229 | 1 | Lnc8229 |
| XLOC_014116 | 1 | Lnc14116/Novlnc11 |
| XLOC_003166 | 1 | Lnc3166 |
| XLOC_010335 | 1 | Lnc10335 |
| XLOC_021863 | 1 | Lnc21863 |
| XLOC_012367 | 1 | Lnc12367 |
| XLOC_007833 | 1 | Lnc7833 |
| XLOC_023850 | 2 | Lnc23850 |
| XLOC_029624 | 2 | Lnc-TEAD1 |
| XLOC_022865 | 2 | Lnc-SE-22865 |
| XLOC_018239 | 2 | Lnc18239 |
| XLOC_022715 | 2 | Lnc-COL16A1 |
| XLOC_013413 | 2 | Lnc13413 |
| XLOC_005390 | 2 | Lnc-MEOX1 |
| XLOC_010961 | 2 | Lnc-WISP1 |
| XLOC_000709 | 2 | Lnc-TGFB2 |
| XLOC_013407 | 2 | Lnc-SLC8A1 |
| XLOC_020214 | 2 | Lnc-CYR61 |
| XLOC_012723 | 2 | Lnc-SE-12723/Novlnc174 |
| XLOC_022262 | 2 | Lnc22262 |
| XLOC_000719 | 2 | Lnc00719 |
| XLOC_004951 | 2 | Lnc4951 |
| XLOC_026589 | 2 | Lnc26589 |
| XLOC_019010 | 2 | Lnc19010 |
| XLOC_022236 | 2 | Lnc22236 |
| XLOC_011236 | 3 | Lnc-SLC38A2 |
| XLOC_012015 | 3 | Lnc-KCNJ6 |
| XLOC_012884 | 3 | Lnc-NKX2.5 |
| XLOC_004797 | 3 | Lnc4797 |
| XLOC_003851 | 3 | Lnc-SPNB2 |
| XLOC_011237 | 3 | Lnc-SLC38A2 |
| XLOC_014898 | 3 | Lnc-SE-14989 |
| XLOC_030839 | 3 | Lnc-CDH13 |
| XLOC_012194 | 3 | Lnc-ACAP2 |
| XLOC_031308 | 3 | Lnc-IRX3 |
| XLOC_026621 | 3 | Lnc-ATOH8 |
| XLOC_002721 | 3 | Lnc-TXLNB |
| XLOC_003170 | 3 | Lnc-KITLG |
| XLOC_002849 | 4 | Lnc-Novlnc6 |
| XLOC_016279 | 4 | Lnc-Novlnc25 |
| XLOC_024141 | 4 | Lnc-CARD11 |
| XLOC_021524 | 4 | Lnc-NFIB |
| XLOC_021715 | 4 | Lnc-FOXO6 |
| XLOC_020321 | 4 | Lnc-ANX5A |
| XLOC_006274 | 4 | Lnc-MAX |
| XLOC_021416 | 4 | Lnc21416 |
| XLOC_003767 | 4 | Lnc-LIF |
| XLOC_014118 | 4 | Lnc-LCLAT1 |
| XLOC_004833 | 4 | Lnc4833 |
| XLOC_009582 | 4 | Lnc-PPIF |
| XLOC_024449 | 4 | Lnc24449 |
| XLOC_006146 | 4 | Lnc6146 |
| XLOC_033521 | 4 | Lnc-Dedbt (Lnc033521) |
| XLOC_025643 | 4 | Lnc25643 |
| XLOC_004910 | 4 | Lnc-SPARC |
| XLOC_010967 | 4 | Lnc-miR30b |
| XLOC_002503 | 4 | Lnc-SOCS2 |
| XLOC_017764 | 4 | Lnc-ID1 |
| XLOC_020119 | 4 | Lnc20119 |
| XLOC_001065 | 4 | Lnc-GPC1 |
| XLOC_009131 | 4 | Lnc-OTX2 |
| XLOC_000264 | 4 | Lnc-FAM124B |
| XLOC_032325 | 4 | Lnc-TALIN1 |
| XLOC_002546 | 4 | Lnc-KRR1 |
| XLOC_006241 | 4 | Lnc-DACT1 |
| XLOC_029781 | 4 | Lnc29781 |
| XLOC_030722 | 4 | Lnc-SE-30722 |
| XLOC_032031 | 4 | Lnc-KCNJ |
| XLOC_020634 | 4 | Lnc-SE-20634 |
| XLOC_031524 | 4 | Lnc-IRF2BP2 |
| XLOC_020212 | 4 | Lnc-CYR61 |
| XLOC_000336 | 4 | Lnc-HDAC4 |
| XLOC_015960 | 4 | Lnc-ITPRIP |
| XLOC_004067 | 4 | Lnc-MYOCD |
| XLOC_015277 | 4 | Lnc-SMAD7/Novlnc23 |
| XLOC_020313 | 4 | Lnc20313 |
| XLOC_008190 | 4 | Lnc8190 |
| XLOC_033125 | 4 | Lnc33125 |
| XLOC_032788 | 4 | Lnc32788/Novlnc90 |
| XLOC_014917 | 4 | Lnc14917 |
| XLOC_014935 | 4 | Lnc14935 |
| XLOC_007419 | 4 | Lnc7419 |
| XLOC_006561 | 4 | Lnc6561 |
| XLOC_024370 | 4 | Lnc24370 |
| XLOC_006255 | 4 | Lnc6255 |
| XLOC_029637 | 4 | Lnc29637 |
| XLOC_010855 | 2 | Lnc10855 |
| XLOC_007852 | 4 | Lnc7852/Novlnc15 |
| XLOC_009335 | 4 | Lnc9335/Novlnc32 |
| XLOC_019782 | 2 | Lnc19782/Novlnc35 |
| XLOC_010735 | 4 | Lnc10735/Novlnc44 |
| XLOC_007917 | 4 | Lnc7917/Novlnc61 |
| XLOC_033357 | 4 | Lnc33357 |
| XLOC_023848 | 4 | Lnc23848/Novlnc49 |
| XLOC_016979 | 4 | Lnc16979 |

[0026] The present invention relates to lncRNAs having a sequence selected from the group consisting of SEQ ID NO 1 to SEQ ID NO 3238 (Human sequences) isoforms thereof, fragments thereof and variant sharing at least 80% (e.g., at least 90%, at least 95%, at least 98%, or at least 99%) nucleotide sequence homology suitable for the diagnosis, prognosis and monitoring of subjects suffering from cardiovascular disorders.

[0027] In some embodiments, the lncRNA which is detected is selected from any of SEQ ID NO: 1-SEQ ID NO: 3238.

[0028] In some embodiments, the lncRNA which is detected is selected from the group consisting of:
[0029] (i) 15 lncRNAs of SEQ ID 1204, SEQ ID 1736, SEQ ID 0544, SEQ ID 0915, SEQ ID2368, SEQ ID 1595, SEQ ID 2382, SEQ ID 0859, SEQ ID 3112, SEQ ID 1869, SEQ ID 1406, SEQ ID 0043, SEQ ID 0363, SEQ ID 0069 and SEQ ID 1947;
[0030] (ii) 11 lncRNAs of SEQ ID 2373, SEQ ID 1748, SEQ ID 3112, SEQ ID 1231, SEQ ID 0664, SEQ ID 1686, SEQ ID 0791, SEQ ID 2126, SEQ ID 2750, SEQ ID 3010, and SEQ ID 2241;
[0031] (iii) 14 lncRNAs of SEQ ID 2150, SEQ ID 1534, SEQ ID 0311, SEQ ID 2952, SEQ ID 2838, SEQ ID 1437, SEQ ID 1297, SEQ ID 1059, SEQ ID 1465, SEQ ID 2826, SEQ ID 0180, SEQ ID 0538, SEQ ID 0258, and SEQ ID 2273;
[0032] (iv) 20 lncRNAs of SEQ ID 0190, SEQ ID 0359, SEQ ID 0776, SEQ ID 1421, SEQ ID 1795, SEQ ID 0477, SEQ ID 1511, SEQ ID 0435, SEQ ID 1418, SEQ ID 1025, SEQ ID 0265, SEQ ID 1311, SEQ ID 2540, SEQ ID 2323, SEQ ID 3011, SEQ ID 2447, SEQ ID 2863, SEQ ID 2697, SEQ ID 3128, and SEQ ID 2265;
[0033] (v) 11 lncRNAs of SEQ ID 2540, SEQ ID 0545, SEQ ID 1766, SEQ ID 3011, SEQ ID 0968, SEQ ID 2371, SEQ ID 1533, SEQ ID 0749, SEQ ID 0609, SEQ ID 1446, and SEQ ID 2986;
[0034] (vi) 8 lncRNAs of SEQ1204, SEQ2454, SEQ0334, SEQ1403, SEQ1089, SEQ2692, SEQ2273, SEQ0502;
[0035] (vii) 4 lncRNAs of SEQ0097, SEQ1947, SEQ1051 and SEQ2996; and
[0036] (viii) lncRNAs in Table 4, Table 5, Table 8, Table 9, Table 12, Table 15, Table 18, Table 19, Table 20, Table 21, Table 22, Table 24, Table 25, Table 28, Table 29, Table 32, Table 33, Table 34, Table 35, Table 36, Table 37, Table 38, Table 39, Table 40, and/or Table 41.

[0037] As used herein, a biological sample may be any sample that may be taken from a subject, such as whole blood, serum, plasma, semen, saliva, tears, urine, fecal material, sweat, buccal smears, skin, cardiac tissue, liver, brain tissue, amniotic fluid, nerve tissue and hair. It also includes specific cellular subtypes or derivatives extracted from those such as PBMCs. The sample used in this invention is preferably blood or cardia tissue, more preferably blood, e.g., serum.

[0038] The expression level of lncRNAs may be determined by any technology known by a man skilled in the art. In particular, the expression level of lncRNAs is determined by measuring the amount of nucleic acid transcripts of each lncRNA. The amount of nucleic acid transcripts can be measured by any technology known by a man skilled in the art. The measure may be carried out directly on an extracted RNA sample or on retrotranscribed complementary DNA (cDNA) prepared from extracted RNA by technologies well-known in the art. From the RNA or cDNA sample, the amount of nucleic acid transcripts may be measured using any technology known by a man skilled in the art, including nucleic acid microarrays, quantitative PCR, sequencing (e.g., next generation sequencing), and hybridization with a labeled probe.

[0039] In some embodiments, the expression level of lncRNAs is determined using sequencing, e.g., next generation sequencing. Sequencing may be carried out after converting extracted RNA to cDNA using reverse transcriptase or RNA molecules may be directly sequenced. In a particular embodiment, which should not be considered as limiting the scope of the invention, the measurement of the expression level using next generation sequencing may be performed as follows. Briefly, RNA is extracted from a sample (e.g., blood sample). After removing rRNA, RNA samples are then reverse transcribed into cDNA. To ensure strand specificity, single stranded cDNA is first synthetized using Super-Script II reverse transcriptase and random primers in the presence of Actinomycin D, and then converted to double stranded cDNA with the second strand marking mix that incorporates dUTP in place of dTTP. Resulting blunt ended cDNA are purified using AMPure XP magnetic beads. After a 3′end adenylation step, adaptor is attached to cDNA. So obtained cDNA (sequencing library) may be amplified by PCR. The sequencing libraries can be sequenced by any next generation sequencing technology known by a man skilled in the art.

[0040] In some embodiments, the measurement of the expression level of lncRNAs, e.g., by sequencing (e.g., next generation sequencing), is facilitated by capturing and enriching nucleic acids (RNA or cDNA) corresponding to lncRNAs of interest prior to the measurement. As used herein, enrichment refers to increasing the percentage of the nucleic acids of interest in the sample relative to the initial sample by selectively purifying the nucleic acids of interest. The enrichment of nucleic acids corresponding to lncRNAs of interest can be carried out on extracted RNA sample or cDNA sample prepared from extracted RNA. In some embodiments, nucleic acids corresponding to lncRNAs of interest are captured and enriched by hybridizing RNA or cDNA sample to oligonucleotide probes specific to lncRNAs of interest (e.g. oligonucleotide probes comprising a sequence complementary to a region of lncRNAs of interest) under conditions allowing for hybridization of the probes and target nucleic acids to form probe-target nucleic acid complexes. Probes may be DNA or RNA, preferably DNA. The length of probes may be from 30 to 80 nucleotides, e.g., from 40 to 70, from 40 to 60, or about 50 nucleotides. The probe-target nucleic acid complexes can be purified by any technology known by a man skilled in the art. In a preferred embodiment, probes are biotinylated. The biotinylated probe-target nucleic acid complexes can be purified by using a streptavidin-coated substrate, e.g, a streptavidin-coated magnetic particle, e.g., T1 streptavidin coated magnetic bead.

[0041] In some embodiments, the expression level of lncRNAs may be determined using quantitative PCR. Quantitative, or real-time, PCR is a well known and easily available technology for those skilled in the art and does not need a precise description. In a particular embodiment, which should not be considered as limiting the scope of the invention, the determination of the expression profile using quantitative PCR may be performed as follows. Briefly, the real-time PCR reactions are carried out using the TaqMan Universal PCR Master Mix (Applied Biosystems). 6 μl cDNA is added to a 9 μl PCR mixture containing 7.5 μl TaqMan Universal PCR Master Mix, 0.75 μl of a 20× mixture of probe and primers and 0.75 μl water. The reaction consisted of one initiating step of 2 min at 50 deg. C, followed by 10 min at 95 deg. C, and 40 cycles of amplification including 15 sec at 95 deg. C and 1 min at 60 deg. C. The reaction and data acquisition can be performed using the ABI 7900HT Fast Real-Time PCR System (Applied Bio systems). The number of template transcript molecules in a sample is determined by recording the amplification cycle in the exponential phase (cycle threshold or C_{Q} or C_{T}), at which time the fluorescence signal can be detected above background fluorescence. Thus, the starting number of template transcript molecules is inversely related to C_{T}.

[0042] In some embodiments, the expression level of lncRNAs may be determined by the use of a nucleic acid microarray. A nucleic acid microarray consists of different nucleic acid probes that are attached to a substrate, which can be a microchip, a glass slide or a microsphere-sized bead. A microchip may be constituted of polymers, plastics, resins, polysaccharides, silica or silica-based materials, carbon, metals, inorganic glasses, or nitrocellulose. Probes can be nucleic acids such as cDNAs (“cDNA microarray”) or oligonucleotides (“oligonucleotide microarray”), and the oligonucleotides may be about 25 to about 60 base pairs or less in length. To determine the expression profile of a target nucleic acid sample, said sample is labelled, contacted with the microarray in hybridization conditions, leading to the formation of complexes between target nucleic acids that are complementary to probe sequences attached to the microarray surface. The presence of labelled hybridized complexes is then detected. Many variants of the microarray hybridization technology are available to the man skilled in the art.

[0043] The present invention provides Method 1. Method 1 is a method of diagnosing or monitoring or treating cardiac diseases or disorders in a subject, the method comprising
[0044] a.) obtaining a sample from said subject;
[0045] b.) detecting the level of expression of one or more lncRNAs (e.g., having a sequence consisting of SEQ ID NO1 to SEQ ID NO 3238, isoforms thereof, fragment thereof and variant sharing at least 80% nucleotide sequence homology); and
[0046] c.) diagnosing the subject with one or mores cardiac diseases or disorders based upon the level of expression of one or more lncRNAs compared to a control,
[0047] with the proviso that the one or more lncRNAs, fragments thereof, isoforms thereof and variants sharing at least 80% nucleotide sequence identity thereto listed in Table 1 are not part of the present invention.

[0048] In various aspects, Method 1 includes the following:
[0049] 1.1 Method 1, wherein the method wherein the level of expression or the differential expression of one or more said lncRNAs indicates that the subject has developed or is at risk of developing a cardiac disorder.
[0050] 1.2 Method 1 or 1.1, wherein cardiac disorder is selected from the group consisting of: pathologies or abnormalities with Interventricular Septal Thickness (IVS), heart failure (e.g., left and right ventricle dilatation/dysfunction), EF, LVID, MI, HFrEF, myocardial infarction, myocarditis (e.g., viral myocarditis), cardiac toxicity, brachycardia, arrhythmia, congenital heart defects, hypertension, diabetic cardiomyopathy, idiopathic and dilated cardiomyopathy, pathologies characterized by malformation, pathologies characterized by tissue remodeling, pathologies characterized by affected function, pathologies characterized by disorders of the right heart, pathologies characterized by arrhythmias, pathologies characterized by intoxication, pathologies characterized by cancer, pathologies characterized by neurologic disorders, pathologies characterized by trauma, pathologies characterized by a change in hemodynamic, pathologies characterized by vascular disorders altering cardiac functions such as Coronary artery disease (CAD), and pathologies resulted from cardiac dysfunction/disorders inducing ischemic (embolic/thrombotic) stroke.
[0051] 1.3 The method of Method 1, 1.1, or 1.2, wherein the diagnosis step includes predicting the development of heart failure in a subject having suffered AMI, the method comprising determining the level of expression, in a biological sample derived from said subject, of one or more lncRNAs of the invention or calculating differential expression of one of more lncRNAs compared to one or more lncRNAs in the same biological sample, wherein the level of expression or the differential expression of one or more said lncRNAs predicts the risk for the subject to develop HF.
[0052] 1.4 The method of any of Method 1-1.3, wherein the method optionally further comprises the step of administering at least one pharmaceutical to the subject in order to treat one or more cardiovascular diseases or disorders.
[0053] 1.5 The method of any of Method 1-1.4, wherein the level of expression refers to the differential expression of lncRNAs, the presence of lncRNAs, or the absence of lncRNAs.
[0054] 1.6 The method of any of Methods 1-1.5, wherein the level of expression of one or more said lncRNAs indicates that the subject suffers ICM.
[0055] 1.7 The method of any of Methods 1-1.5, wherein the level of expression of one or more said lncRNAs indicates that the subject suffers Non-ICM (e.g., DCM).
[0056] 1.8 The method of any of the preceding methods, wherein the subject has been previously diagnosed with Heart Failure (e.g., congestive heart failure)
[0057] 1.9 The method of 1.8, wherein the level of expression of one or more said lncRNAs indicates that the subject with Heart Failure also suffers Non-ICM (e.g., DCM).
[0058] 1.10 Any of the preceding methods, wherein the biological sample is selected from the group consisting of: whole blood, serum, plasma, semen, saliva, tears, urine, fecal material, sweat, buccal smears, skin, cardiac tissue, liver, brain tissue, amniotic fluid, nerve tissue and hair (e.g, wherein the sample is preferably plasma or cardiac tissue).
[0059] 1.11 Any of the preceding methods, wherein the lncRNA expression levels are detected in a sample (e.g., biological sample) using a technique selected from the group consisting of: S1 nuclease protection assay, microarray analysis, polymerase chain reaction (PCR), hybridization technologies, reverse transcriptase polymerase chain reaction (RT-PCR), Northern blot, serial analysis of gene expression (SAGE), immunoassay, and mass spectrometry.
[0060] 1.12 Any of the preceding methods, wherein the lncRNA expression level of lncRNA in sample (e.g., biological sample) is detected using a singleplexed or multiplexed method selected from a group consisting of: fluorescence, luminescence, radio-marking, sequencing, e.g., next generation sequencing, and coded microdisks.
[0061] 1.13 Any of the preceding methods further comprising administering a pharmaceutical composition which modulates one or more lncRNAs, wherein the pharmaceutical composition is selected from the group consisting of: a chemical agent, a RNA mimic, an antibody, an engineered protease, a CRISPR based technology and enzymatically active RNA.
[0062] 1.14 The method of 1.13, wherein the enzymatically active RNA is selected from the group consisting of: a miRNA, a siRNA, a piRNA, a hnRNA, a snRNA, esiRNA, shRNA, decoys, RNA aptamers and an antisense oligonucleotide.
[0063] 1.15 Any of the preceding methods, wherein the method is a method of diagnosis.
[0064] 1.16 Any of the preceding methods, wherein the method is a method of monitoring.
[0065] 1.17 Any of the preceding methods, wherein the method is a method of treatment.
[0066] 1.18 Any of the preceding methods, wherein the expression level of the lncRNAs of the invention are detected by measuring the levels of cDNAs, amplified RNAs or DNAs or quantities of DNA probes, or other molecules, in a sample (e.g., biological sample) that are indicative of the expression level of the lncRNA.
[0067] 1.19 Any of the preceding methods, wherein the lncRNA which is detected is selected from any of SEQ ID NO: 1-SEQ ID NO: 3238.
[0068] 1.20 Any of the preceding methods, wherein the lncRNA which is detected is selected from selected from the group consisting of:
   [0069] (i) 15 lncRNAs of SEQ ID 1204, SEQ ID 1736, SEQ ID 0544, SEQ ID 0915, SEQ ID2368, SEQ ID 1595, SEQ ID 2382, SEQ ID 0859, SEQ ID 3112, SEQ ID 1869, SEQ ID 1406, SEQ ID 0043, SEQ ID 0363, SEQ ID 0069 and SEQ ID 1947;
[0070] (ii) 11 lncRNAs of SEQ ID 2373, SEQ ID 1748, SEQ ID 3112, SEQ ID 1231, SEQ ID 0664, SEQ ID 1686, SEQ ID 0791, SEQ ID 2126, SEQ ID 2750, SEQ ID 3010, and SEQ ID 2241;
   [0071] (iii) 14 lncRNAs of SEQ ID 2150, SEQ ID 1534, SEQ ID 0311, SEQ ID 2952, SEQ ID 2838, SEQ ID 1437, SEQ ID 1297, SEQ ID 1059, SEQ ID 1465, SEQ ID 2826, SEQ ID 0180, SEQ ID 0538, SEQ ID 0258, and SEQ ID 2273;
   [0072] (iv) 20 lncRNAs of SEQ ID 0190, SEQ ID 0359, SEQ ID 0776, SEQ ID 1421, SEQ ID 1795, SEQ ID 0477, SEQ ID 1511, SEQ ID 0435, SEQ ID 1418, SEQ ID 1025, SEQ ID 0265, SEQ ID 1311, SEQ ID 2540, SEQ ID 2323, SEQ ID 3011, SEQ ID 2447, SEQ ID 2863, SEQ ID 2697, SEQ ID 3128, and SEQ ID 2265;
   [0073] (v) 11 lncRNAs of SEQ ID 2540, SEQ ID 0545, SEQ ID 1766, SEQ ID 3011, SEQ ID 0968, SEQ ID 2371, SEQ ID 1533, SEQ ID 0749, SEQ ID 0609, SEQ ID 1446, and SEQ ID 2986;
   [0074] (vi) 8 lncRNAs of SEQ1204, SEQ2454, SEQ0334, SEQ1403, SEQ1089, SEQ2692, SEQ2273, SEQ0502;
   [0075] (vii) 4 lncRNAs of SEQ0097, SEQ1947, SEQ1051 and SEQ2996; and
   [0076] (viii) lncRNAs in Table 4, Table 5, Table 8, Table 9, Table 12, Table 15, Table 18, Table 19, Table 20, Table 21, Table 22, Table 24, Table 25, Table 28, Table 29, Table 32, Table 33, Table 34, Table 35, Table 36, Table 37, Table 38, Table 39, Table 40, and/or Table 41.
[0077] 1.21 Any of the preceding methods, wherein the expression level of lncRNA (e.g., SEQ ID NO: 1-SEQ ID NO: 3238) is compared to a control.
[0078] 1.22 Any of the preceding methods, wherein cardiac disorder can be selected from the group consisting of: pathologies or abnormalities related to heart failure (HF) e.g., left and right ventricle dilatation/dysfunction, reduced ejection fraction (HFrEF), independently from HF etiology: ICM (Ischemic HF—related with coronary artery disease, myocardial infarction, etc.) vs Non-ICM (Non-Ischemic HF—related with myocarditis, cardiac toxicity, arrhythmia, hypertension, congenital heart defects, diabetic, idiopathic cardiomyopathy or others).

[0079] The invention also provides Method 2. Method 2 is a method for monitoring treatment efficacy in a subject suffering from a cardiac disease or disorder and receiving a pharmaceutical cardiac therapy, the method comprising
[0080] a.) administering a pharmaceutical to a subject suffering from cardiac injury;
[0081] b.) obtaining a sample (e.g., a biological sample) from the subject;
[0082] c.) detecting the level of expression of one or more lncRNAs (e.g., having a sequence selected from the group consisting of SEQ ID NO1 to SEQ ID NO 3238, isoforms thereof, fragment thereof and variant sharing at least 80% nucleotide sequence homology) in the sample, wherein the expression level of lncRNA is compared to a control; and
[0083] d.) determining the the level of expression of one or more lncRNAs, wherein the level of expression of said one or more lncRNAs indicates the efficacy of the treatment,
[0084] with the proviso that the one or more lncRNAs, fragments thereof, isoforms thereof and variants sharing at least 80% nucleotide sequence identity thereto listed in Table 1 are not part of the present invention.

[0085] In various aspects, Method 2 includes the following:
[0086] 2.1 Method 2, wherein the level of expression of one or more said lncRNAs indicates that the subject has developed or is at risk of developing a cardiac disorder despite the administration of a pharmaceutical.
[0087] 2.2 Method 2 or 2.1, wherein cardiac disorder is selected from the group consisting of: pathologies or abnormalities with Interventricular Septal Thickness (IVS), heart failure (e.g., left and right ventricle dilatation/dysfunction), EF, LVID, MI, HFrEF, myocardial infarction, myocarditis (e.g., viral myocarditis), cardiac toxicity, brachycardia, arrhythmia, congenital heart defects, hypertension, diabetic cardiomyopathy, idiopathic and dilated cardiomyopathy, pathologies characterized by malformation, pathologies characterized by tissue remodeling, pathologies characterized by affected function, pathologies characterized by disorders of the right heart, pathologies characterized by arrhythmias, pathologies characterized by intoxication, pathologies characterized by cancer, pathologies characterized by neurologic disorders, pathologies characterized by trauma, pathologies characterized by a change in hemodynamic, pathologies characterized by vascular disorders altering cardiac functions such as Coronary artery disease (CAD), and pathologies resulted from cardiac dysfunction/disorders inducing ischemic (embolic/thrombotic) stroke.
[0088] 2.3 The method of Method 2, 2.1, or 2.2, wherein the diagnosis step includes predicting the development of heart failure in a subject having suffered AMI, the method comprising determining the level of expression, in a biological sample derived from said subject, of one or more lncRNAs of the invention or calculating differential expression of one of more lncRNAs compared to one or more lncRNAs in the same biological sample, wherein the level of expression or the differential expression of one or more said lncRNAs predicts the risk for the subject to develop HF.
[0089] 2.4 The method of any of Method 2-2.3, wherein the method optionally further comprises the step of administering at least one pharmaceutical to the subject depending on the efficacy of the treatment.
[0090] 2.5 The method of any of Method 2-2.4, wherein the level of expression refers to the differential expression of lncRNAs, the presence of lncRNAs, or the absence of lncRNAs.
[0091] 2.6 The method of any of the preceding methods, wherein the subject has been previously diagnosed with Heart Failure (e.g., congestive heart failure)
[0092] 2.7 Any of the preceding methods, wherein the biological sample is selected from the group consisting of: whole blood, serum, plasma, semen, saliva, tears, urine, fecal material, sweat, buccal smears, skin, cardiac tissue, liver, brain tissue, amniotic fluid, nerve tissue and hair (e.g, wherein the sample is preferably plasma or cardiac tissue).
[0093] 2.8 Any of the preceding methods, wherein the lncRNA expression levels are measured by technique selected from the group consisting of: Si nuclease protection assay, microarray analysis, polymerase chain reaction (PCR), hybridization technologies, reverse transcriptase polymerase chain reaction (RT-PCR), Northern blot, serial analysis of gene expression (SAGE), immunoassay, and mass spectrometry.
[0094] 2.9 Any of the preceding methods, wherein the lncRNA expression level is detected using a singleplexed or multiplexed method selected from a group consisting of: fluorescence, luminescence, radio-marking, next generation sequencing and coded microdisks.
[0095] 2.10 Any of the preceding methods further comprising administering a pharmaceutical composition which modulates one or more lncRNAs, wherein the pharmaceutical composition is selected from the group consisting of: a chemical agent, a RNA mimic, an antibody, an engineered protease, a CRISPR based technology and enzymatically active RNA.
[0096] 2.11 The method of 2.10, wherein the enzymatically active RNA is selected from the group consisting of: a miRNA, a siRNA, a piRNA, a hnRNA, a snRNA, esiRNA, shRNA, decoys, RNA aptamers and an antisense oligonucleotide.
[0097] 2.12 Any of the preceding methods, wherein the expression level of the lncRNAs of the invention are determined by measuring the levels of cDNAs, amplified RNAs or DNAs or quantities of DNA probes, or other molecules that are indicative of the expression level of the lncRNA.
[0098] 2.13 Any of the preceding methods, wherein the lncRNA which is detected is selected from any of SEQ ID NO: 1-SEQ ID NO: 3238.
[0099] 2.14 Any of the preceding methods, wherein the lncRNA which is detected is selected from selected from the group consisting of:
   [0100] (i) 15 lncRNAs of SEQ ID 1204, SEQ ID 1736, SEQ ID 0544, SEQ ID 0915, SEQ ID2368, SEQ ID 1595, SEQ ID 2382, SEQ ID 0859, SEQ ID 3112, SEQ ID 1869, SEQ ID 1406, SEQ ID 0043, SEQ ID 0363, SEQ ID 0069 and SEQ ID 1947;
   [0101] (ii) 11 lncRNAs of SEQ ID 2373, SEQ ID 1748, SEQ ID 3112, SEQ ID 1231, SEQ ID 0664, SEQ ID 1686, SEQ ID 0791, SEQ ID 2126, SEQ ID 2750, SEQ ID 3010, and SEQ ID 2241;
   [0102] (iii)14 lncRNAs of SEQ ID 2150, SEQ ID 1534, SEQ ID 0311, SEQ ID 2952, SEQ ID 2838, SEQ ID 1437, SEQ ID 1297, SEQ ID 1059, SEQ ID 1465, SEQ ID 2826, SEQ ID 0180, SEQ ID 0538, SEQ ID 0258, and SEQ ID 2273;
   [0103] (iv)20 lncRNAs of SEQ ID 0190, SEQ ID 0359, SEQ ID 0776, SEQ ID 1421, SEQ ID 1795, SEQ ID 0477, SEQ ID 1511, SEQ ID 0435, SEQ ID 1418, SEQ ID 1025, SEQ ID 0265, SEQ ID 1311, SEQ ID 2540, SEQ ID 2323, SEQ ID 3011, SEQ ID 2447, SEQ ID 2863, SEQ ID 2697, SEQ ID 3128, and SEQ ID 2265;
   [0104] (v) 11 lncRNAs of SEQ ID 2540, SEQ ID 0545, SEQ ID 1766, SEQ ID 3011, SEQ ID 0968, SEQ ID 2371, SEQ ID 1533, SEQ ID 0749, SEQ ID 0609, SEQ ID 1446, and SEQ ID 2986;
   [0105] (vi) 8 lncRNAs of SEQ1204, SEQ2454, SEQ0334, SEQ1403, SEQ1089, SEQ2692, SEQ2273, SEQ0502;
   [0106] (vii) 4 lncRNAs of SEQ0097, SEQ1947, SEQ1051 and SEQ2996; and
   [0107] (viii) lncRNAs in Table 4, Table 5, Table 8, Table 9, Table 12, Table 15, Table 18, Table 19, Table 20, Table 21, Table 22, Table 24, Table 25, Table 28, Table 29, Table 32, Table 33, Table 34, Table 35, Table 36, Table 37, Table 38, Table 39, Table 40, and/or Table 41.
[0108] 2.15 Any of the preceding methods, wherein cardiac disorder can be selected from the group consisting of: pathologies or abnormalities related to heart failure (HF) e.g., left and right ventricle dilatation/dysfunction, reduced ejection fraction (HFrEF), independently from HF etiology: ICM (Ischemic HF—related with coronary artery disease, myocardial infarction, etc.) vs Non-ICM (Non-Ischemic HF—related with myocarditis, cardiac toxicity, arrhythmia, hypertension, congenital heart defects, diabetic, idiopathic cardiomyopathy or others).

[0109] The invention also provides for Method 3. Method 3 is a method for diagnosing drug-induced cardiac toxicity in a subject receiving a pharmaceutical composition, wherein the method comprises
[0110] a.) obtaining a sample from the subject;
[0111] b.) measuring the level of expression, (e.g., in a biological sample derived from said subject) of one or more lncRNAs of the invention from the sample
[0112] c.) diagnosing the subject as having a cardiac toxicity from the pharmaceutical composition depending upon the level of expression of one or more said lncRNAs (e.g, wherein the lncRNA is one or more sequences selected from SEQ ID NO: 1 to SEQ ID NO: 3238),
[0113] with the proviso that the one or more lncRNAs, fragments thereof, isoforms thereof and variants sharing at least 80% nucleotide sequence identity thereto listed in Table 1 are not part of the present invention.

[0114] The invention also provides for Method 4. Method 4 is a method of detecting one or more lncRNAs (e.g., lncRNAs having a sequence selected from the group consisting of SEQ ID NO 1 to SEQ ID NO 3238) useful for Method 1 et seq, Method 2 et seq, and Method 3 et seq. In one aspect, the method comprises the step of obtaining the lncRNA from a human biological sample (e.g., a human plasma sample). The sample can be any biological sample as described in Method 1 et seq, Method 2 et seq, and Method 3 et seq. Method 4 comprises:
[0115] a.) obtaining a sample (e.g., biological sample) from a subject; and
[0116] b.) measuring the expression level of the lncRNA (e.g, wherein the lncRNA is detected by sequencing (e.g.,next generation sequencing), S1 nuclease protection assay, microarray analysis, polymerase chain reaction (PCR), hybridization technologies, reverse transcriptase polymerase chain reaction (RT-PCR), Northern blot, serial analysis of gene expression (SAGE), immunoassay, and mass spectrometry) (e.g, wherein the lncRNA is one or more sequences selected from SEQ ID NO: 1 to SEQ ID NO: 3238),
[0117] with the proviso that the lncRNAs, fragments thereof, isoforms thereof and variants sharing at least 80% nucleotide sequence identity thereto listed in Table 1 are not part of the present invention.

[0118] In various aspects, Method 4 includes the following:
[0119] 4.1 Method 4, wherein the expression level of the lncRNA is measured by sequencing (e.g., next generation sequencing).
[0120] 4.2 The method of any of the preceding methods, wherein measuring the expression level of the lncRNA comprises the steps of:
   [0121] (i) extracting RNA from the sample (e.g., blood sample),
   [0122] (ii) converting the RNA to cDNA,
   [0123] (iii) optionally, amplifying the cDNA by PCR, and
   [0124] (iv) sequencing the cDNA.
[0125] 4.3 The method of any of the preceding methods further comprising a step of capturing and enriching extracted RNA or cDNA corresponding to lncRNAs of interest prior to sequencing, comprising the steps of:
   [0126] (1) hybridizing extracted RNA or cDNA to oligonucleotide probes specific to lncRNAs of interest (e.g., oligonucleotide probes comprising a sequence complementary to a region of lncRNAs of interest) under a condition allowing for hybridization of the probes and RNA or cDNA corresponding to lncRNAs of interest to form probe-target nucleic acid complexes, and
   [0127] (2) purifying the probe-target nucleic acid complexes.
[0128] 4.4 The method of Method 4.3 wherein oligonucleotide probes are hybridized to cDNA.
[0129] 4.5 The method of any of Methods 4.3-4.4 wherein the oligonucleotide probe is biotinylated and purifying the probe-target nucleic acid complexes comprises binding the probe-target nucleic acid complexes to a streptavidin-coated substrate.
[0130] 4.6 The method of Method 4.5 wherein the streptavidin-coated substrate is a streptavidin coated magnetic particle, e.g., T1 streptavidin coated magnetic bead.
[0131] 4.7 The method of any of the preceding methods wherein the sample is blood sample.
[0132] 4.8 Any of the preceding methods, wherein the lncRNA which is detected is selected from selected from the group consisting of:
   [0133] (i) 15 lncRNAs of SEQ ID 1204, SEQ ID 1736, SEQ ID 0544, SEQ ID 0915, SEQ ID2368, SEQ ID 1595, SEQ ID 2382, SEQ ID 0859, SEQ ID 3112, SEQ ID 1869, SEQ ID 1406, SEQ ID 0043, SEQ ID 0363, SEQ ID 0069 and SEQ ID 1947;
   [0134] (ii) 11 lncRNAs of SEQ ID 2373, SEQ ID 1748, SEQ ID 3112, SEQ ID 1231, SEQ ID 0664, SEQ ID 1686, SEQ ID 0791, SEQ ID 2126, SEQ ID 2750, SEQ ID 3010, and SEQ ID 2241;
   [0135] (iii) 14 lncRNAs of SEQ ID 2150, SEQ ID 1534, SEQ ID 0311, SEQ ID 2952, SEQ ID 2838, SEQ ID 1437, SEQ ID 1297, SEQ ID 1059, SEQ ID 1465, SEQ ID 2826, SEQ ID 0180, SEQ ID 0538, SEQ ID 0258, and SEQ ID 2273;
   [0136] (iv) 20 lncRNAs of SEQ ID 0190, SEQ ID 0359, SEQ ID 0776, SEQ ID 1421, SEQ ID 1795, SEQ ID 0477, SEQ ID 1511, SEQ ID 0435, SEQ ID 1418, SEQ ID 1025, SEQ ID 0265, SEQ ID 1311, SEQ ID 2540, SEQ ID 2323, SEQ ID 3011, SEQ ID 2447, SEQ ID 2863, SEQ ID 2697, SEQ ID 3128, and SEQ ID 2265;
   [0137] (v) 11 lncRNAs of SEQ ID 2540, SEQ ID 0545, SEQ ID 1766, SEQ ID 3011, SEQ ID 0968, SEQ ID 2371, SEQ ID 1533, SEQ ID 0749, SEQ ID 0609, SEQ ID 1446, and SEQ ID 2986;
   [0138] (vi) 8 lncRNAs of SEQ1204, SEQ2454, SEQ0334, SEQ1403, SEQ1089, SEQ2692, SEQ2273, SEQ0502;
   [0139] (vii) 4 lncRNAs of SEQ0097, SEQ1947, SEQ1051 and SEQ2996; and
   [0140] (viii) lncRNAs in Table 4, Table 5, Table 8, Table 9, Table 12, Table 15, Table 18, Table 19, Table 20, Table 21, Table 22, Table 24, Table 25, Table 28, Table 29, Table 32, Table 33, Table 34, Table 35, Table 36, Table 37, Table 38, Table 39, Table 40, and/or Table 41.

[0141] The invention also provides for Method 5. Method 5 is a method for identifying lncRNA from a sample (e.g., a biological sample as described in any of Method 1 et seq, Method 2 et seq, and Method 3 et seq.), wherein the lncRNA can be used to treat, diagnose, and/or predict primary and secondary cardiac disorder(s) in a subject. The method comprises
[0142] a.) isolating total RNA from the biological sample (e.g. cardiac biopsy, serum, or plasma)
[0143] b.) sequencing total RNA from the sample and determining which are lncRNA; and
[0144] c.) comparing the expression (e.g., either relative levels or presence or absence) of lncRNA to a control;
[0145] wherein the expression of the lncRNA, compared to a control, means that the lncRNA can be indicative of primary and secondary cardiac disorder(s) in a subject, with the proviso that the one or more lncRNAs, fragments thereof, isoforms thereof and variants sharing at least 80% nucleotide sequence identity thereto listed in Table 1 are not part of the present invention.

[0146] Method 5 uses any detection method described in Method 1 et seq, Method 2, et seq, Method 3, et seq., and/or Method 4 et seq.

[0147] In still a further aspect, the present invention also encompasses a diagnostic/prognostic kit for carrying out any of the previously cited methods (any of Method 1 et seq, Method 2, et seq, Method 3, et seq., and/or Method 4 et seq and/or Method 5 et seq.). In some embodiments, the diagnostic/prognostic kit comprises one or more oligonucleotide probes specific to lncRNAs of interest (e.g., lncRNAs selected from the group consisting of SEQ ID NO1 to SEQ ID NO 3238, isoforms thereof, fragment thereof and variant sharing at least 80% nucleotide sequence homology) and a reagent for purifying the probe-target nucleic acid complexes. The oligonucleotide probes comprise a sequence complementary to a region of the lncRNAs of interest. The oligonucleotide probes may be DNA or RNA. The oligonucleotide probes are preferably DNA. The length of oligonucleotide probes may be from 30 to 80 nucleotides, e.g., from 40 to 70, from 40 to 60, or about 50 nucleotides. In a preferred embodiment, the oligonucleotide probes are biotinylated and the reagent for purifying the probe-target complexes is a streptavidin-coated substrate, e.g, a streptavidin-coated magnetic particle, e.g., T1 streptavidin coated magnetic bead.

[0148] In some embodiments, the diagnostic/prognostic kit comprises one or more oligonucleotide probes specific to one or more lncRNAs (i.e., oligonucleotide probes comprising a sequence complementary to a region of the lncRNAs of interest) selected from any of SEQ ID NO: 1-SEQ ID NO: 3238.

[0149] In some embodiments, the diagnostic/prognostic kit comprises one or more oligonucleotide probes specific to one or more lncRNAs selected from the group consisting of:
[0150] (i) 15 lncRNAs of SEQ ID 1204, SEQ ID 1736, SEQ ID 0544, SEQ ID 0915, SEQ ID2368, SEQ ID 1595, SEQ ID 2382, SEQ ID 0859, SEQ ID 3112, SEQ ID 1869, SEQ ID 1406, SEQ ID 0043, SEQ ID 0363, SEQ ID 0069 and SEQ ID 1947;
[0151] (ii) 11 lncRNAs of SEQ ID 2373, SEQ ID 1748, SEQ ID 3112, SEQ ID 1231, SEQ ID 0664, SEQ ID 1686, SEQ ID 0791, SEQ ID 2126, SEQ ID 2750, SEQ ID 3010, and SEQ ID 2241;
[0152] (iii) 14 lncRNAs of SEQ ID 2150, SEQ ID 1534, SEQ ID 0311, SEQ ID 2952, SEQ ID 2838, SEQ ID 1437, SEQ ID 1297, SEQ ID 1059, SEQ ID 1465, SEQ ID 2826, SEQ ID 0180, SEQ ID 0538, SEQ ID 0258, and SEQ ID 2273;
[0153] (iv) 20 lncRNAs of SEQ ID 0190, SEQ ID 0359, SEQ ID 0776, SEQ ID 1421, SEQ ID 1795, SEQ ID 0477, SEQ ID 1511, SEQ ID 0435, SEQ ID 1418, SEQ ID 1025, SEQ ID 0265, SEQ ID 1311, SEQ ID 2540, SEQ ID 2323, SEQ ID 3011, SEQ ID 2447, SEQ ID 2863, SEQ ID 2697, SEQ ID 3128, and SEQ ID 2265;
[0154] (v) 11 lncRNAs of SEQ ID 2540, SEQ ID 0545, SEQ ID 1766, SEQ ID 3011, SEQ ID 0968, SEQ ID 2371, SEQ ID 1533, SEQ ID 0749, SEQ ID 0609, SEQ ID 1446, and SEQ ID 2986;
[0155] (vi)8 lncRNAs of SEQ1204, SEQ2454, SEQ0334, SEQ1403, SEQ1089, SEQ2692, SEQ2273, SEQ0502;
[0156] (vii) 4 lncRNAs of SEQ0097, SEQ1947, SEQ1051 and SEQ2996; and
[0157] (viii) lncRNAs in Table 4, Table 5, Table 8, Table 9, Table 12, Table 15, Table 18, Table 19, Table 20, Table 21, Table 22, Table 24, Table 25, Table 28, Table 29, Table 32, Table 33, Table 34, Table 35, Table 36, Table 37, Table 38, Table 39, Table 40, and/or Table 41.

### EXAMPLES

### Example 1

### Identification of lncRNAs of the Invention

[0158] The inventors incorporate deep RNA-sequencing of cardiac biopsies starting from total RNA to characterize both coding and non-coding transcriptomes and identify cardiac relevant lncRNA through a multistep analysis procedure. The Inventors use differential expression analysis as well as novel transcript reconstruction and data integration into genome-wide data sets as well as previously characterized predicted human cardiac-specific lncRNA to systematically identify heart-specific lncRNAs. Using the aforementioned techniques, the Inventors can identify 3,238 lncRNAs potentially relevant to cardiac disorders. Indeed, hundreds of known lncRNA are differentially expressed in a control subject compared to a subject suffering from ischemic or dilated cardiomyopathies. The Inventors are able to determine that 1027 novel lncRNAs, including some orthologs predicted in the art, that are differentially expressed and/or cardiac-enriched.

[0159] Sample Collection

[0160] Cardiac biopsies are obtained from 5 control patients, 11 patients suffering ICM and 10 patients suffering DCM. Biopsies of control hearts are provided from subjects with either head injury (n=2) or subarachnoid haemorrhage (n=3). The protocol is approved by the Local Ethics Committee at Cardinal Stefan Wyszynski Institute of Cardiology (approval number IK-NP-0021-48/846/13 (Apr. 9, 2013). No donors or their relatives completed the National Refusal List. Heart biopsies obtained from the left ventricle are snap-frozen and stored at −80° C. until RNA isolation.

### RNA Isolation

[0161] Total RNA is extracted from cardiac biopsies using the mirVana isolation kit (Life technologies, Merelbeke, Belgium). Potential contaminating genomic DNA is digested with DNase I (Qiagen, Venlo, The Netherlands). RNA concentration is measured with a Nanodrop spectrophotometer (Nanodrop products, Wilmington, USA) and RNA integrity is verified using a 2100 Bioanalyzer (Agilent technologies, Santa Clara, USA).

### Biopsies Sequencing

[0162] Sequencing libraries are prepared from 0.5 μg of total RNA using the Illumina TruSeq stranded total RNA library preparation kit combined with the human/mouse/rat RiboZero rRNA removal kit (Illumina Inc. San Diego, USA, C). All steps are performed with the low-throughput protocol and according to the manufacturer's instructions. Briefly, cytoplasmic rRNA are hybridized to biotinylated target-specific oligos and removed using streptavidin coated magnetic beads. rRNA depleted RNA samples are then fragmented by heat digestion with divalent cations (8 minutes, 94° C.) and reverse transcribed into cDNA. To ensure strand specificity, single stranded cDNA is first synthetized using Super-Script II reverse transcriptase (Invitrogen) and random primers in the presence of Actinomycin D, and then converted to double stranded cDNA with the second strand marking mix that incorporates dUTP in place of dTTP. Resulting blunt ended cDNA are purified using AMPure XP magnetic beads. After a 3′end adenylation step, Illumina's adapters ligation is performed. The singled indexed libraries thus obtained are washed twice using AMPure XP beads to remove excess adapters and enriched by PCR (15 cycles). PCR products are purified with a final AMPure XP beads wash and sequencing ready libraries are eluted in 30 μl of resuspension buffer.

[0163] For quality control, 1 μl of each library is run on the Agilent Technologies 2100 Bioanalyzer using a DNA 1000 chip according to the manufacturer's recommendations. Absence of adapter dimers is checked and the average library size is determined by a region table. Libraries are quantified by qPCR using the KAPA Library quantification kit for Illumina Platforms (KAPAbiosystems,). Samples are run in duplicate and quantified against a standard curve ranging from 20 to 2.10-4 pM. Library size previously determined on the Bioanalyzer is used for size correction of the calculated concentrations.

[0164] All libraries are sequenced with the Illumina NextSeq500 (2×75 bp).

[0165] Sequencing Analysis for Known Transcripts

[0166] All RNA-seq reads of 26 samples are aligned to human reference genome (hg19) using Tophat 2.1.0 (1). Bowtie index of UCSC reference sequences are downloaded from Illumina iGenomes. The transcript assembly is performed using cufflinks 2.2.1 (1) with −G option and the featureCounts function of Rsubread R package (2). The GTF file is generated by integrating GENCODE comprehensive gene annotation release 19 (3) and human lncRNAs identified by Ounzain et al. (4). Cuffdiff (1) and DESeq2 (5) are respectively used for differential expression analysis. Transcripts with an adjusted p-value<0.05 between controls and failing hearts, or with a p-value<0.05 between ICM and DCM are considered to be differentially expressed.

[0167] Pipeline of Novel lncRNA Prediction

[0168] De Novo Transcript Assembly

[0169] RABT (Reference Annotation Based Transcript) assembly (6) is performed using cufflinks with −g option for 3 control samples, 3 ICM samples and 3 DCM samples. The GTF file is the same as the one used for known transcripts. The cuffcompare (1) program is used to compare the assembled transcripts to the reference annotated GTF file and to generate a new GTF file with all transcripts from 9 samples for further analysis.

[0170] Filtering for Novel lncRNAs

[0171] Filtering is done on Transfrag class codes generated by cuffcompare, transcript length, number of exons and protein coding potential. Firstly, the transcripts with code ‘i’, ‘j’, ‘o’, ‘u’, ‘x’ and ‘.’ are extracted, all of which could potentially include novel lncRNAs. The ‘i’ category, for example, could contain the lncRNAs entirely within the intron of known genes. Similarly, the ‘j’ category could be long non-coding isoforms of known genes. The ‘o’ category could include novel lncRNAs having generic exonic overlap with known transcripts. The ‘u’ category could be long intergenic non-coding RNAs (lincRNAs). The ‘x’ category could contain novel lncRNAs on the opposite strand of reference genes. The ‘.’ category may be sequences with multiple classifications. The combined GTF file is converted to a BED file using UCSC table browser (7). Following this, only the transcripts with a length of ≥200 nt and with at least 2 exons are kept for the next step. Finally, the BED files of transcripts from the last 2 filtering steps are uploaded to CPAT (Coding-Potential Assessment Tool) (8) to calculate the coding potential score. The transcripts with CPAT scores<0.364 are considered as non-coding. A new GTF file is generated with the final list of selected novel lncRNAs.

[0172] Differential Expression of Novel lncRNAs

[0173] The cuffdiff (1) is used for all 26 samples with the new GTF file of novel lncRNAs. Transcripts with an adjusted p-value<0.05 are considered to be differentially expressed.

[0174] Analysis for Public Dataset

[0175] Fastq files of GSE45326 are downloaded from ArrayExpress (9). The dataset includes RNA-seq data of 12 normal human tissues. The paired-end sequencing is performed on ribominus total RNA library. Reads alignment and transcript assembly for known genes are performed as described before. Cufflinks (1) with the GTF file of novel lncRNAs is used to calculate FPKM of novel lncRNAs in each tissue. The transcripts with FPKM≥1 and at least twice higher than the FPKM of any other tissues are considered as cardiac-enriched.

[0176] The selection of the lncRNA of the panel is a multistep procedure:

[0177] Known transcripts selection.

[0178] In a first step, the inventors focused on the identification of known lncRNA that are relevant to cardiac pathophysiology. After data alignment and transcript reconstruction using both Cufflink and features counts using Gencode19, the authors used two distinct tools that use different approaches for differential expression analysis, respectively Cuffdiff and DeSeq2, and only transcripts showing high expression (fragments per kilobase of transcript per million mapped reads (FPKM) FPKM or FPM≥1) in at least half the samples of one group are considered. Differential expression using both tools is analysed in controls vs ICM samples, controls vs DCM samples, as well as ICM vs DCM samples. 80 and 1193 differentially expressed transcripts between any of the groups are identified with Cuffdiff and DeSeq2 analysis respectively. This difference is mainly due to the low number of lncRNA flagged OK by Cuffdiff (ie, neither NOTEST nor HIDATA). As those excluded lncRNA are included in the DeSeq2 analysis, Cuffdiff default settings are not modified. Interestingly, we observed from the DeSeq2 analysis that even if the majority of differentially expressed transcripts in controls vs ICM samples are also differentially expressed in controls vs DCM samples (and vice versa), about one third of them are ICM or DCM specific, illustrating that as the coding transcriptome, the noncoding transcriptome shows features common to a common heart defect (cardiomyopathies) but also specific ones differentiating the physiological bases of this defect (ischemic vs non-ischemic). Moreover, 97 lncRNAs are also differentially expressed between ICM and DCM patients, differentiating the 2 pathologies. Similar observations are made from the Cuffdiff analysis.

[0179] The authors also focused on highly expressed non coding transcripts and thus selected 687 lncRNA having a FPKM or FPM≥2 to include in the panel.

[0180] In summary, the authors identified 1,835 lncRNA corresponding to 1,501 genes, previously annotated in Gencode19, as relevant for cardiac function.

[0181] Predicted Human Orthologs Selection

[0182] In order to validate the relevance of the humans orthologs identified by Ounzain et al, the authors realized the same analysis using the GTF file containing the predicted human orthologs as reference for transcripts reconstruction. Surprisingly, the inventors identified few predicted orthologs that are expressed in human tissue: 86 corresponding to 77 genes. Among them, 75 are differentially expressed lncRNA across the control, ICM and DCM groups, 16 highly expressed (FPKM or FPM≥2) lncRNA and 5 of them fitted the 2 criteria. This unexpected low amount of validated predicted human orthologs can in part be explained by the different sequencing approaches used in the 2 studies. Nonetheless, the so identified lncRNAs, shown to be highly tissue and context specific in mice and validated in human cardiac disorders appear to be promising biomarker candidates playing crucial roles in cardiac function regulation.

[0183] Cardiac-Enriched Transcripts Selection

[0184] As stated in the previous study from Ounzain et al, lncRNA regulating cardiac homeostasis identified in mice are highly context specific but also and importantly, cardiac tissue specific. This led us to look for non-coding transcripts that are enriched in the cardiac tissue compared to others and thus might play important roles in cardiac functions. By comparing public RNA-seq data from 12 human tissues (heart, brain, bladder, colon, breast, skin, lung, ovary, kidney, prostate, liver, muscle), the inventors identified 470 and 24 lncRNA, from known and Human predicted transcripts respectively, that had at least a 2 fold higher expression rate in cardiac tissue than in any other tissue.

[0185] Novel Transcripts Selection

[0186] The growing interest on lncRNA together with the development of next generation sequencing techniques over the past years has led to a better knowledge of these non-coding transcripts. Nonetheless, non-coding transcripts account for the majority of the human transcriptome and have so far not been completely characterized. The authors thus performed very deep sequencing to allow for discovery of novel transcripts. After de novo transcript reconstruction and transcript selection as detailed in the material and methods, the inventors can identify over 13,000 new transcripts with no coding potential. Among them, they can identify 696 lncRNA differentially expressed between the 3 groups (FDR<0.05) and 810 lncRNA enriched in cardiac tissue. The transcripts having class codes ‘o’, ‘j’ or ‘i’ and highly positively correlated with overlapped known genes are eliminated. (‘i’ category, for example, could contain the lncRNAs entirely within the intron of known genes, the ‘j’ category could be long non-coding isoforms of known genes and the ‘o’ category could include novel lncRNAs having generic exonic overlap with known transcripts). The transcripts with class codes ‘j’ or ‘o’ and overlapping with exons of known protein-coding genes on the same strand are discarded. This resulted in a total number of novel lncRNAs of 755 relevant to cardiac physiology.

[0187] In summary, the inventors identified a highly relevant panel of 3,092 cardiac-related lncRNAs. This panel encompasses 2,317 known transcripts here shown to be relevant to cardiac physiology, as well as 755 lncRNA, here described for the first time and relevant to cardiac tissue.

### Example 2

[0188] LncRNA Detection in Plasma Samples and PCR Validation in Biopsies

[0189] Sample Selection: Mitocare Aidbank/

[0190] Like miRNA, lncRNA can be released from the original tissue into the body circulation. Thus such markers may be detected in body fluids like whole blood or plasma which facilitates their use in clinics. The expression of four lncRNA previously identified is verified in plasma samples from patients who suffered AMI versus control patients.

[0191] Plasma samples from 3 control subjects and 3 subjects who suffered AMI are used. RNA extraction is performed using Norgen Serum/plasma extraction kit according to the manufacturer's instructions. Isolated RNAs are then subjected to reverse transcription using the high capacity cDNA synthesis kit with the following thermal conditions: 25° C. for 10 min, 37° C. for 2 hours, 85° C. for 5 min. Preamplification reactions are prepared using Applied Biosystems preamplication master mix with 0.1× (100 nM) of each of the 4 primers pairs corresponding to the lncRNAs of interest (sequences listed below). 16 preamplification cycles are performed as recommended by the furnisher (50° C. 2 minutes, 96° C. 10 minutes, 40 cycles at 95° C. for 15 seconds and 60° C. for 1 minute). Preamplified products are then diluted 1/20 in TE buffer and quantified by qPCR using the Biorad Ssoadvanced SYBR green kit. Briefly, 15 μl reactions containing 6 ul of each diluted sample are amplified in a 1× ready to use reaction mix containing 500 μl of the diluted sample, 1× biorad reaction mix and and 500 nM sense and reverse primers are amplified on a ABIHT7900 with the following conditions: 30 sec 95° C., 40 cycles of 15 sec at 95° C. denaturation and 30 sec at 60° C. annealing and extension). Relative expression level is determined against a standard curve realized on a 5 log scale.

TABLE 2

| | |
|---|---|
| Lnc21524Se | TTGAATCCTGGCTTTGCTCT |
| Lnc21524As | GGAAAGGCAATTGAGTGAGG |
| Lnc23749Se | TTGGTCTTTCACCCTTCCTG |
| Lnc23749As | GAAAACGTCCTCCCTCCTTC |
| Lnc19889Se | ACACGGGAAGCTCTTTGAGA |
| Lnc19889As | TCAAGAGGGAAGGATGGATG |
| LncAnx5aSe | GAATTTCTGGGGACCTTTCC |
| LncAnx5aAs | GCAAAGGGAGAGAAAGCAGA |

[0192] In FIG. 4, the authors showed that lncRNA are indeed detectable in plasma samples. Moreover expression profile compared to NGS data (lnc21524 identified with NGS need more precision on DE).

### Example 3

### LncRNA Detection in Serum Samples Using a Total RNA-seq Protocol

[0193] Material and Methods:

[0194] Quantification of lncRNAs in body fluids like whole blood, serum or plasma is a non-invasive way to develop a diagnostic test to use in clinics. The expression of circulating lncRNA released by the tissues was studied in serum samples from patients with AMI and control subjects. Serum samples collected at discharge of patient between D3 and D5 from 30 patients with AMI from the MitoCare cohort were used for lncRNA profiling. Mitocare is a multicenter, randomized, double-blind, placebo controlled study. The study population includes AMI patients undergoing PCI (Percutaneous Coronary Intervention), older than 18 years. The primary endpoint is the level of left ventricular ejection fraction (LVEF) less than 40% at 1 month. Patients demographics are presented in Table 3. Control serum samples were selected from subjects of ADDIA Chronobiological study.

TABLE 3
Demographic data of Mitocare samples:

| | Group 1 | Group 2 | Group 3 |
|---|---|---|---|
| EF | <40 | 41-50 | >50 |
| Nb | 10 | 10 | 10 |
| Age | 64.0 | 64.2 | 60.9 |
| Male | 80% | 80% | 70% |
| BMI | 27.4 | 28.3 | 27.6 |
| Systolic Blood | 103.5 | 116.9 | 113.6 |
| Pressure | | | |
| Diastolic Blood | 67.4 | 70.2 | 66.5 |
| Pressure | | | |
| Heart Rate | 83.3 | 75.9 | 69.3 |

[0195] Serum Samples Sequencing

[0196] RNA is extracted from 1.5 ml of serum, using Norgen Serum extraction and RNA Clean-Up and Concentration Micro-Elute Kits according to the manufacturer's instructions. Sequencing libraries are prepared from the total amount of extracted RNA, using the Illumina TruSeq stranded total RNA library preparation kit combined with the human/mouse/rat RiboZero rRNA removal kit (Illumina Inc. San Diego, USA, C). All steps are performed with the low-throughput protocol and according to the manufacturer's instructions, with no fragmentation step. Briefly, cytoplasmic rRNA are hybridized to biotinylated target-specific oligos and removed using streptavidin coated magnetic beads. rRNA depleted RNA samples are then reverse transcribed into cDNA. To ensure strand specificity, single stranded cDNA is first synthetized using Super-Script II reverse transcriptase (Invitrogen) and random primers in the presence of Actinomycin D, and then converted to double stranded cDNA with the second strand marking mix that incorporates dUTP in place of dTTP. Resulting blunt ended cDNA are purified using AMPure XP magnetic beads. After a 3′end adenylation step, Illumina's adapters ligation is performed. So obtained singled indexed libraries are washed twice using AMPure XP beads to remove excess adapters and enriched by PCR (15 cycles). PCR products are purified with a final AMPure XP beads wash and sequencing ready libraries are eluted in 30 μl of resuspension buffer.

[0197] For quality control, 1 μl of each library is run on the Agilent Technologies 2100 Bioanalyzer using a DNA 1000 chip according to the manufacturer's recommendations. Absence of adapter dimers is checked and the average library size is determined by a region table. Libraries are quantified on Qubit 2.0 using Qubit dsDNA High Sensitivity assay kit (Invitrogen). Library size previously determined on the Bioanalyzer is used to calculate molar concentrations from mass concentrations.

[0198] All libraries are sequenced with the Illumina NextSeq500 (2×75 bp).

[0199] Sequencing Analysis for the 3238 lncRNAs

[0200] RNA-seq data analysis is performed using Partek Flow (Partek Inc., St Louis, Mo., USA build 6). The pre-alignment QA/QC module of Partek Flow is used to visualize the read quality of the FASTQ files. All reads are examined. The raw FASTQ files are trimmed at the 3′ end in function of their quality score (Phred score). The parameters used are an end minimum quality level of 30 and a minimum trimmed read length of 50. Unaligned reads are mapped using the Homo sapiens hg19 genome and using as guide a GTF file with the patented lncRNA annotation. This mapping is done using the software STAR version 2.5.3. The default parameters are used. The post-alignment QC module of Partek Flow is used to visualize the average base quality score per position as well as the mapping quality per alignment. The mapped reads are quantified using the GTF file with the patented lncRNA annotation for quantification using the Partek Expectation/Maximization (E/M) algorithm. The default parameters are used. The transcript counts are normalized by CPM (counts per million). Only transcripts showing high expression (CPM≥10) in at least half the samples of one group are considered.

[0201] Statistical Analysis and Predictive Modelling

[0202] For the statistical analysis, samples are grouped into 2 groups based on the left ventricular ejection fraction (LVEF) measured by echocardiography at 1-month after the PCI. To identify differentially expressed lncRNA, a statistical analysis is performed using a non-parametric Wilcoxon-Mann-Whitney test and a parametric T-test. A lncRNA with a p-value≤0.05 is considered as differentially expressed.

[0203] In order to build classification models for the 2 classifications, the Classification for MicroArrays (CMA) package of R (Slawski et al, 2008) with a leave-one-out cross-validation is used. The algorithms used for this predictive modelling are (a) random forest, (b) linear discriminant analysis and (c) naïve Bayes.

[0204] Results:

[0205] Comparison Between Low LVEF (LVEF≤40) and High LVEF (LVEF>40)

[0206] First, samples were grouped into 2 groups by a dichotomized variable: 1-month LVEF<40% considered as LV dysfunction (Ventricular remodeling) and 1-month LVEF>40% considered as preserved LV function. The volcano plot showed the differential expression of lncRNA. 192 lncRNAs are differentially expressed and among these, 20 lncRNAs are differentially expressed and have a fold change>2 or <0.5 between the low LVEF (LVEF≤40) and the high LVEF (LVEF>40) groups. The p-value and the fold-change of these lncRNA are listed in the Table 4. 316 lncRNAs which have a P<0.05 and/or an individual AUC>0.7 or <0.3 are listed in Table 5.

TABLE 4
List of 20 lncRNAs which are differentially expressed
between the low LVEF group (LVEF ≤ 40) and the
high LVEF group (LVEF > 40)

| lncRNA | p-value | Fold change | lncRNA | p-value | Fold change |
|---|---|---|---|---|---|
| SEQ0930 | 0.03736 | 2.042 | SEQ1837 | 0.04199 | 0.416 |
| SEQ0821 | 0.03299 | 0.491 | SEQ0527 | 0.01436 | 0.487 |
| SEQ1196 | 0.00653 | 2.648 | SEQ1167 | 0.01803 | 0.296 |
| SEQ0664 | 0.00660 | 0.441 | SEQ0153 | 0.04675 | 2.333 |
| SEQ2642 | 0.04102 | 2.623 | SEQ1757 | 0.04483 | 2.224 |
| SEQ1910 | 0.04224 | 2.669 | SEQ1719 | 0.02190 | 0.367 |
| SEQ1239 | 0.01161 | 0.475 | SEQ1650 | 0.00217 | 0.487 |
| SEQ0243 | 0.04133 | 0.490 | SEQ0051 | 0.01192 | 52.864 |
| SEQ2368 | 0.00240 | 0.443 | SEQ1410 | 0.00818 | 2.953 |
| SEQ0283 | 0.01599 | 2.363 | SEQ2699 | 0.02230 | 2.072 |

TABLE 5
List of 316 IncRNAs which are differentially expressed
and/or have an AUC >0.7 or <0.3 between the low
LVEF group (LVEF ≤ 40) and the high LVEF group (LVEF > 40)

| IncRNA | p-value | AUC |
|---|---|---|
| SEQ0005 | 0.033 | 0.755 |
| SEQ0033 | 0.131 | 0.715 |
| SEQ0037 | 0.061 | 0.73 |
| SEQ0042 | 0.119 | 0.715 |
| SEQ0043 | 0.068 | 0.175 |
| SEQ0051 | 0.012 | 0.225 |
| SEQ0069 | 0.168 | 0.255 |
| SEQ0075 | 0.028 | 0.745 |
| SEQ0119 | 0.021 | 0.33 |
| SEQ0120 | 0.046 | 0.735 |
| SEQ0136 | 0.026 | 0.71 |
| SEQ0141 | 0.05 | 0.28 |
| SEQ0153 | 0.047 | 0.328 |
| SEQ0163 | 0.083 | 0.285 |
| SEQ0169 | 0.042 | 0.73 |
| SEQ0172 | 0.045 | 0.74 |
| SEQ0173 | 0.046 | 0.76 |
| SEQ0189 | 0.024 | 0.755 |
| SEQ0190 | 0.043 | 0.73 |
| SEQ0199 | 0.004 | 0.83 |
| SEQ0208 | 0.027 | 0.283 |
| SEQ0216 | 0.087 | 0.735 |
| SEQ0226 | 0.083 | 0.72 |
| SEQ0243 | 0.041 | 0.73 |
| SEQ0244 | 0.01 | 0.24 |
| SEQ0283 | 0.016 | 0.27 |
| SEQ0290 | 0.079 | 0.715 |
| SEQ0312 | 0.065 | 0.25 |
| SEQ0321 | 0.022 | 0.815 |
| SEQ0334 | 0.017 | 0.785 |
| SEQ0339 | 0.042 | 0.71 |
| SEQ0363 | 0.001 | 0.87 |
| SEQ0366 | 0.216 | 0.3 |
| SEQ0383 | 0.052 | 0.7 |
| SEQ0386 | 0.113 | 0.715 |
| SEQ0388 | 0.116 | 0.71 |
| SEQ0392 | 0.029 | 0.74 |
| SEQ0398 | 0.027 | 0.795 |
| SEQ0405 | 0.051 | 0.73 |
| SEQ0420 | 0.06 | 0.72 |
| SEQ0454 | 0.06 | 0.295 |
| SEQ0493 | 0.05 | 0.715 |
| SEQ0495 | 0.072 | 0.755 |
| SEQ0502 | 0.065 | 0.75 |
| SEQ0538 | 0.083 | 0.715 |
| SEQ0544 | 0.002 | 0.825 |
| SEQ0552 | 0.039 | 0.775 |
| SEQ0560 | 0.063 | 0.725 |
| SEQ0565 | 0.064 | 0.7 |
| SEQ0586 | 0.032 | 0.775 |
| SEQ0615 | 0.008 | 0.825 |
| SEQ0638 | 0.017 | 0.77 |
| SEQ0643 | 0.072 | 0.725 |
| SEQ0664 | 0.007 | 0.815 |
| SEQ0677 | 0.073 | 0.74 |
| SEQ0685 | 0.014 | 0.79 |
| SEQ0688 | 0.079 | 0.72 |
| SEQ0702 | 0.035 | 0.77 |
| SEQ0745 | 0.029 | 0.725 |
| SEQ0748 | 0.052 | 0.71 |
| SEQ0753 | 0.063 | 0.7 |
| SEQ0781 | 0.015 | 0.76 |
| SEQ0796 | 0.065 | 0.7 |
| SEQ0821 | 0.033 | 0.738 |
| SEQ0858 | 0.129 | 0.7 |
| SEQ0861 | 0.082 | 0.715 |
| SEQ0866 | 0.036 | 0.735 |
| SEQ0904 | 0.042 | 0.73 |
| SEQ0910 | 0.054 | 0.72 |
| SEQ0915 | 0.009 | 0.81 |
| SEQ0917 | 0.025 | 0.765 |
| SEQ0925 | 0.037 | 0.72 |
| SEQ0930 | 0.037 | 0.3 |
| SEQ0935 | 0.039 | 0.72 |
| SEQ0944 | 0.055 | 0.725 |
| SEQ0948 | 0.073 | 0.28 |
| SEQ0959 | 0.029 | 0.745 |
| SEQ0994 | 0.12 | 0.715 |
| SEQ1001 | 0.11 | 0.713 |
| SEQ1004 | 0.041 | 0.715 |
| SEQ1014 | 0.037 | 0.74 |
| SEQ1036 | 0.038 | 0.25 |
| SEQ1040 | 0.134 | 0.72 |
| SEQ1042 | 0.046 | 0.31 |
| SEQ1046 | 0.006 | 0.785 |
| SEQ1075 | 0.069 | 0.7 |
| SEQ1081 | 0.055 | 0.73 |
| SEQ1089 | 0.045 | 0.765 |
| SEQ1094 | 0.013 | 0.78 |
| SEQ1095 | 0.089 | 0.74 |
| SEQ1113 | 0.037 | 0.725 |
| SEQ1114 | 0.063 | 0.71 |
| SEQ1127 | 0.061 | 0.715 |
| SEQ1171 | 0.106 | 0.745 |
| SEQ1179 | 0.049 | 0.28 |
| SEQ1182 | 0.032 | 0.73 |
| SEQ1198 | 0.016 | 0.765 |
| SEQ1204 | 0 | 0.88 |
| SEQ1205 | 0.001 | 0.8 |
| SEQ1214 | 0.045 | 0.71 |
| SEQ1231 | 0.037 | 0.3 |
| SEQ1240 | 0.044 | 0.74 |
| SEQ1271 | 0.109 | 0.715 |
| SEQ1276 | 0.053 | 0.725 |
| SEQ1281 | 0.016 | 0.22 |
| SEQ1286 | 0.409 | 0.71 |
| SEQ1301 | 0.087 | 0.71 |
| SEQ1319 | 0.048 | 0.32 |
| SEQ1329 | 0.006 | 0.245 |
| SEQ1340 | 0.084 | 0.283 |
| SEQ1347 | 0.065 | 0.705 |
| SEQ1348 | 0.013 | 0.275 |
| SEQ1356 | 0.099 | 0.705 |
| SEQ1373 | 0.024 | 0.215 |
| SEQ1377 | 0.121 | 0.7 |
| SEQ1385 | 0.117 | 0.71 |
| SEQ1391 | 0.133 | 0.71 |
| SEQ1398 | 0.004 | 0.195 |
| SEQ1403 | 0.018 | 0.775 |
| SEQ1404 | 0.109 | 0.705 |
| SEQ1406 | 0.083 | 0.74 |
| SEQ1410 | 0.008 | 0.235 |
| SEQ1412 | 0.042 | 0.775 |
| SEQ1420 | 0.042 | 0.75 |
| SEQ1428 | 0.006 | 0.225 |
| SEQ1442 | 0.026 | 0.715 |
| SEQ1444 | 0.057 | 0.29 |
| SEQ1449 | 0.089 | 0.7 |
| SEQ1454 | 0.098 | 0.708 |
| SEQ1462 | 0.071 | 0.728 |
| SEQ1468 | 0.002 | 0.81 |
| SEQ1483 | 0.041 | 0.27 |
| SEQ1518 | 0.154 | 0.71 |
| SEQ1528 | 0.018 | 0.735 |
| SEQ1556 | 0.102 | 0.72 |
| SEQ1564 | 0.018 | 0.765 |
| SEQ1576 | 0.051 | 0.725 |
| SEQ1583 | 0.083 | 0.715 |
| SEQ1595 | 0.152 | 0.715 |
| SEQ1601 | 0.007 | 0.24 |
| SEQ1618 | 0.056 | 0.275 |
| SEQ1626 | 0.004 | 0.785 |
| SEQ1632 | 0.048 | 0.305 |
| SEQ1638 | 0.091 | 0.275 |
| SEQ1656 | 0.083 | 0.725 |
| SEQ1667 | 0.022 | 0.735 |
| SEQ1674 | 0.006 | 0.8 |
| SEQ1683 | 0.024 | 0.745 |
| SEQ1692 | 0.084 | 0.745 |
| SEQ1693 | 0.05 | 0.7 |
| SEQ1705 | 0.12 | 0.295 |
| SEQ1707 | 0.016 | 0.77 |
| SEQ1712 | 0.063 | 0.71 |
| SEQ1715 | 0.01 | 0.665 |
| SEQ1719 | 0.022 | 0.77 |
| SEQ1726 | 0.006 | 0.23 |
| SEQ1732 | 0.002 | 0.855 |
| SEQ1733 | 0.046 | 0.74 |
| SEQ1737 | 0.037 | 0.315 |
| SEQ1746 | 0.137 | 0.705 |
| SEQ1757 | 0.045 | 0.338 |
| SEQ1793 | 0.13 | 0.71 |
| SEQ1804 | 0.056 | 0.75 |
| SEQ1809 | 0.05 | 0.305 |
| SEQ1818 | 0.022 | 0.74 |
| SEQ1819 | 0.031 | 0.8 |
| SEQ1820 | 0.154 | 0.255 |
| SEQ1837 | 0.042 | 0.748 |
| SEQ1842 | 0.035 | 0.735 |
| SEQ1853 | 0.194 | 0.705 |
| SEQ1869 | 0.051 | 0.755 |
| SEQ1910 | 0.042 | 0.37 |
| SEQ1926 | 0.061 | 0.755 |
| SEQ1938 | 0.058 | 0.71 |
| SEQ1942 | 0.048 | 0.72 |
| SEQ1947 | 0.091 | 0.733 |
| SEQ1950 | 0.156 | 0.71 |
| SEQ1954 | 0.174 | 0.29 |
| SEQ1979 | 0.04 | 0.72 |
| SEQ1983 | 0.002 | 0.865 |
| SEQ2026 | 0.031 | 0.71 |
| SEQ2049 | 0.012 | 0.78 |
| SEQ2053 | 0.121 | 0.71 |
| SEQ2061 | 0.068 | 0.29 |
| SEQ2074 | 0.004 | 0.215 |
| SEQ2100 | 0.007 | 0.78 |
| SEQ2114 | 0.062 | 0.725 |
| SEQ2121 | 0.058 | 0.725 |
| SEQ2126 | 0.032 | 0.25 |
| SEQ2157 | 0.049 | 0.695 |
| SEQ2162 | 0.051 | 0.705 |
| SEQ2190 | 0.109 | 0.705 |
| SEQ2209 | 0.074 | 0.81 |
| SEQ2216 | 0.077 | 0.71 |
| SEQ2240 | 0.069 | 0.27 |
| SEQ2253 | 0.006 | 0.19 |
| SEQ2260 | 0.063 | 0.285 |
| SEQ2273 | 0.064 | 0.72 |
| SEQ2274 | 0.043 | 0.27 |
| SEQ2282 | 0.023 | 0.235 |
| SEQ2286 | 0.06 | 0.295 |
| SEQ2287 | 0.048 | 0.27 |
| SEQ2288 | 0.007 | 0.2 |
| SEQ2294 | 0.086 | 0.705 |
| SEQ2299 | 0.015 | 0.765 |
| SEQ2314 | 0.019 | 0.735 |
| SEQ2320 | 0.005 | 0.83 |
| SEQ2344 | 0.024 | 0.72 |
| SEQ2349 | 0.1 | 0.275 |
| SEQ2352 | 0.033 | 0.32 |
| SEQ2353 | 0.075 | 0.705 |
| SEQ2360 | 0.045 | 0.295 |
| SEQ2368 | 0.002 | 0.85 |
| SEQ2373 | 0 | 0.85 |
| SEQ2374 | 0.016 | 0.245 |
| SEQ2377 | 0.036 | 0.73 |
| SEQ2382 | 0.012 | 0.835 |
| SEQ2385 | 0.05 | 0.72 |
| SEQ2402 | 0.003 | 0.82 |
| SEQ2405 | 0.102 | 0.7 |
| SEQ2407 | 0.1 | 0.275 |
| SEQ2411 | 0.047 | 0.7 |
| SEQ2454 | 0.015 | 0.755 |
| SEQ2457 | 0.027 | 0.74 |
| SEQ2461 | 0.031 | 0.245 |
| SEQ2466 | 0.138 | 0.71 |
| SEQ2470 | 0.001 | 0.15 |
| SEQ2472 | 0.032 | 0.255 |
| SEQ2478 | 0.02 | 0.23 |
| SEQ2484 | 0.038 | 0.28 |
| SEQ2485 | 0.026 | 0.375 |
| SEQ2501 | 0.008 | 0.805 |
| SEQ2502 | 0.049 | 0.745 |
| SEQ2518 | 0.091 | 0.29 |
| SEQ2521 | 0.015 | 0.3 |
| SEQ2523 | 0.019 | 0.76 |
| SEQ2540 | 0.019 | 0.745 |
| SEQ2544 | 0.022 | 0.255 |
| SEQ2560 | 0.075 | 0.705 |
| SEQ2567 | 0.026 | 0.745 |
| SEQ2593 | 0.057 | 0.29 |
| SEQ2605 | 0.044 | 0.32 |
| SEQ2618 | 0.032 | 0.215 |
| SEQ2622 | 0.118 | 0.29 |
| SEQ2631 | 0.027 | 0.27 |
| SEQ2644 | 0.054 | 0.285 |
| SEQ2657 | 0.033 | 0.65 |
| SEQ2658 | 0.069 | 0.27 |
| SEQ2677 | 0.037 | 0.7 |
| SEQ2684 | 0.005 | 0.185 |
| SEQ2692 | 0.062 | 0.28 |
| SEQ2695 | 0.026 | 0.24 |
| SEQ2696 | 0.07 | 0.265 |
| SEQ2697 | 0.045 | 0.725 |
| SEQ2698 | 0.052 | 0.705 |
| SEQ2699 | 0.022 | 0.325 |
| SEQ2702 | 0.041 | 0.34 |
| SEQ2703 | 0.005 | 0.805 |
| SEQ2715 | 0.032 | 0.25 |
| SEQ2720 | 0.054 | 0.7 |
| SEQ2726 | 0.04 | 0.735 |
| SEQ2750 | 0.047 | 0.735 |
| SEQ2752 | 0.025 | 0.695 |
| SEQ2753 | 0.06 | 0.735 |
| SEQ2785 | 0.039 | 0.275 |
| SEQ2794 | 0.035 | 0.32 |
| SEQ2800 | 0.18 | 0.705 |
| SEQ2825 | 0.11 | 0.7 |
| SEQ2830 | 0.018 | 0.72 |
| SEQ2833 | 0.158 | 0.295 |
| SEQ2853 | 0.003 | 0.785 |
| SEQ2875 | 0.047 | 0.28 |
| SEQ2882 | 0.037 | 0.24 |
| SEQ2896 | 0.02 | 0.27 |
| SEQ2912 | 0.119 | 0.7 |
| SEQ2921 | 0.06 | 0.295 |
| SEQ2922 | 0.015 | 0.25 |
| SEQ2928 | 0.016 | 0.775 |
| SEQ2930 | 0.046 | 0.295 |
| SEQ2960 | 0.057 | 0.28 |
| SEQ2971 | 0.024 | 0.755 |
| SEQ2973 | 0.039 | 0.28 |
| SEQ2974 | 0.067 | 0.7 |
| SEQ2982 | 0.007 | 0.22 |
| SEQ2998 | 0.022 | 0.765 |
| SEQ3002 | 0.04 | 0.69 |
| SEQ3006 | 0.023 | 0.77 |
| SEQ3007 | 0.041 | 0.26 |
| SEQ3013 | 0.05 | 0.725 |
| SEQ3040 | 0.066 | 0.705 |
| SEQ3048 | 0.017 | 0.31 |
| SEQ3066 | 0.009 | 0.805 |
| SEQ3070 | 0.052 | 0.3 |
| SEQ3080 | 0.045 | 0.25 |
| SEQ3085 | 0.034 | 0.725 |
| SEQ3112 | 0.029 | 0.265 |
| SEQ3113 | 0.024 | 0.28 |
| SEQ3118 | 0.085 | 0.265 |
| SEQ3128 | 0.034 | 0.295 |
| SEQ3129 | 0.005 | 0.19 |
| SEQ3133 | 0.019 | 0.765 |
| SEQ3141 | 0.126 | 0.74 |
| SEQ3142 | 0.107 | 0.295 |
| SEQ3143 | 0.025 | 0.305 |
| SEQ3153 | 0.005 | 0.795 |
| SEQ3156 | 0.051 | 0.71 |
| SEQ3170 | 0.044 | 0.295 |
| SEQ3180 | 0.039 | 0.725 |
| SEQ3184 | 0.024 | 0.28 |
| SEQ3187 | 0.024 | 0.33 |
| SEQ3200 | 0.049 | 0.26 |
| SEQ3203 | 0.002 | 0.19 |
| SEQ3204 | 0.017 | 0.75 |
| SEQ3210 | 0.044 | 0.665 |
| SEQ3221 | 0.002 | 0.135 |
| SEQ3230 | 0.036 | 0.3 |

[0207] For this classification, the variable selection was performed by using a Random Forest model. A combination of 15 pre-selected lncRNAs through a Random Forest Classifier (Table 6) is the best predictive model obtained here. The lncRNAs were selected using a random forest algorithm. This model has an area under the receiver-operating characteristic curve (AUC) of 0.988, an accuracy of 0.9, a sensitivity of 0.8, a specificity of 0.95, a Positive Predictive Value (PPV) of 0.889 and Negative Predictive Value (PNV) of 0.905. The confusion matrix is presented in Table 7.

TABLE 6
List of 15 pre-selected lncRNAs through a Random Forest
Classifier for the classification low LVEF (LVEF ≤
40) and high LVEF (LVEF > 40)

| lncRNA | Rank in the model |
|---|---|
| SEQ1204 | 1 |
| SEQ1736 | 2 |
| SEQ0544 | 3 |
| SEQ0915 | 4 |
| SEQ2368 | 5 |
| SEQ1595 | 6 |
| SEQ2382 | 7 |
| SEQ0859 | 8 |
| SEQ3112 | 9 |
| SEQ1869 | 10 |
| SEQ1406 | 11 |
| SEQ0043 | 12 |
| SEQ0363 | 13 |
| SEQ0069 | 14 |
| SEQ1947 | 15 |

TABLE 7
Confusion matrix of the best model for this classification

| | Low LVEF predicted | High LVEF predicted |
|---|---|---|
| Low LVEF real | 8 | 2 |
| High LVEF real | 1 | 19 |

[0208] Comparison Between Low LVEF (LVEF≤45) and High LVEF (LVEF>45)

[0209] In this analysis, samples were grouped into 2 groups using the threshold of 45% LVEF: low LVEF (LVEF≤45) and high LVEF (LVEF>45). The volcano plot showed the differential expression of lncRNA. 147 lncRNAs are differentially expressed and among them 15 lncRNA are differentially expressed and have a fold change>2 or <0.5 between the low LVEF (LVEF≤45) and the high LVEF (LVEF>45) groups. The p-value and the fold-change of these lncRNA are listed in the Table 8. 206 lncRNAs which have a P<0.05 and/or an individual AUC>0.7 or <0.3 are listed in Table 9.

TABLE 8
List of 15 lncRNAs which are differentially expressed
and have a fold change > 2 or <0.5 between the
low LVEF group (LVEF ≤ 45) and the high LVEF group (LVEF > 45)

| lncRNA | p-value | fold change | lncRNA | p-value | fold change |
|---|---|---|---|---|---|
| SEQ2114 | 0.03396 | 0.471 | SEQ1167 | 0.01103 | 0.222 |
| SEQ2512 | 0.04168 | 0.498 | SEQ1719 | 0.04844 | 0.434 |
| SEQ0372 | 0.02201 | 0.427 | SEQ0917 | 0.00885 | 0.499 |
| SEQ0821 | 0.03922 | 0.499 | SEQ2295 | 0.02772 | 3.217 |
| SEQ0664 | 0.00001 | 0.253 | SEQ1692 | 0.00763 | 0.453 |
| SEQ1239 | 0.02909 | 0.499 | SEQ1707 | 0.00490 | 0.463 |
| SEQ2709 | 0.04561 | 0.433 | SEQ2477 | 0.02006 | 2.142 |
| SEQ1385 | 0.03278 | 0.490 | | | |

TABLE 9
List of 206 IncRNAs which are differentially expressed
and/or have an AUC >0.7 or <0.3 between the low
LVEF group (LVEF ≤ 45) and the high LVEF group (LVEF > 45)

| IncRNA | p-value | AUC |
|---|---|---|
| SEQ0005 | 0.029 | 0.72 |
| SEQ0022 | 0.046 | 0.62 |
| SEQ0023 | 0.012 | 0.73 |
| SEQ0024 | 0.010 | 0.25 |
| SEQ0037 | 0.056 | 0.72 |
| SEQ0043 | 0.074 | 0.23 |
| SEQ0069 | 0.054 | 0.26 |
| SEQ0076 | 0.051 | 0.73 |
| SEQ0139 | 0.016 | 0.75 |
| SEQ0141 | 0.039 | 0.29 |
| SEQ0147 | 0.021 | 0.72 |
| SEQ0173 | 0.020 | 0.74 |
| SEQ0190 | 0.016 | 0.75 |
| SEQ0213 | 0.123 | 0.72 |
| SEQ0216 | 0.095 | 0.71 |
| SEQ0226 | 0.060 | 0.71 |
| SEQ0227 | 0.054 | 0.72 |
| SEQ0276 | 0.052 | 0.29 |
| SEQ0321 | 0.059 | 0.71 |
| SEQ0334 | 0.023 | 0.77 |
| SEQ0336 | 0.032 | 0.75 |
| SEQ0348 | 0.158 | 0.70 |
| SEQ0357 | 0.025 | 0.72 |
| SEQ0372 | 0.022 | 0.73 |
| SEQ0400 | 0.015 | 0.75 |
| SEQ0440 | 0.022 | 0.75 |
| SEQ0472 | 0.033 | 0.74 |
| SEQ0493 | 0.042 | 0.73 |
| SEQ0502 | 0.065 | 0.71 |
| SEQ0544 | 0.019 | 0.75 |
| SEQ0586 | 0.025 | 0.73 |
| SEQ0615 | 0.066 | 0.70 |
| SEQ0664 | 0.000 | 0.95 |
| SEQ0670 | 0.032 | 0.74 |
| SEQ0688 | 0.040 | 0.72 |
| SEQ0724 | 0.019 | 0.72 |
| SEQ0758 | 0.043 | 0.75 |
| SEQ0778 | 0.524 | 0.73 |
| SEQ0781 | 0.031 | 0.71 |
| SEQ0790 | 0.038 | 0.72 |
| SEQ0821 | 0.039 | 0.71 |
| SEQ0838 | 0.027 | 0.73 |
| SEQ0845 | 0.068 | 0.70 |
| SEQ0867 | 0.039 | 0.72 |
| SEQ0885 | 0.035 | 0.30 |
| SEQ0886 | 0.041 | 0.71 |
| SEQ0891 | 0.059 | 0.30 |
| SEQ0892 | 0.055 | 0.28 |
| SEQ0914 | 0.037 | 0.23 |
| SEQ0915 | 0.018 | 0.76 |
| SEQ0917 | 0.009 | 0.78 |
| SEQ0935 | 0.030 | 0.69 |
| SEQ0983 | 0.055 | 0.28 |
| SEQ1066 | 0.019 | 0.75 |
| SEQ1089 | 0.012 | 0.76 |
| SEQ1097 | 0.065 | 0.28 |
| SEQ1103 | 0.073 | 0.29 |
| SEQ1109 | 0.041 | 0.70 |
| SEQ1162 | 0.030 | 0.72 |
| SEQ1188 | 0.047 | 0.68 |
| SEQ1191 | 0.039 | 0.73 |
| SEQ1204 | 0.062 | 0.72 |
| SEQ1207 | 0.006 | 0.76 |
| SEQ1231 | 0.018 | 0.25 |
| SEQ1237 | 0.104 | 0.29 |
| SEQ1251 | 0.011 | 0.76 |
| SEQ1281 | 0.031 | 0.24 |
| SEQ1302 | 0.033 | 0.27 |
| SEQ1315 | 0.051 | 0.71 |
| SEQ1321 | 0.069 | 0.72 |
| SEQ1329 | 0.032 | 0.26 |
| SEQ1337 | 0.057 | 0.72 |
| SEQ1377 | 0.012 | 0.76 |
| SEQ1385 | 0.033 | 0.75 |
| SEQ1402 | 0.030 | 0.73 |
| SEQ1403 | 0.034 | 0.76 |
| SEQ1404 | 0.031 | 0.72 |
| SEQ1406 | 0.011 | 0.77 |
| SEQ1426 | 0.040 | 0.75 |
| SEQ1428 | 0.005 | 0.22 |
| SEQ1446 | 0.083 | 0.74 |
| SEQ1454 | 0.063 | 0.70 |
| SEQ1468 | 0.024 | 0.76 |
| SEQ1483 | 0.032 | 0.27 |
| SEQ1489 | 0.141 | 0.26 |
| SEQ1499 | 0.078 | 0.30 |
| SEQ1564 | 0.011 | 0.73 |
| SEQ1576 | 0.096 | 0.70 |
| SEQ1601 | 0.078 | 0.29 |
| SEQ1667 | 0.063 | 0.71 |
| SEQ1674 | 0.055 | 0.73 |
| SEQ1692 | 0.008 | 0.82 |
| SEQ1707 | 0.005 | 0.78 |
| SEQ1719 | 0.048 | 0.71 |
| SEQ1728 | 0.042 | 0.32 |
| SEQ1737 | 0.008 | 0.27 |
| SEQ1748 | 0.111 | 0.72 |
| SEQ1767 | 0.036 | 0.29 |
| SEQ1793 | 0.067 | 0.73 |
| SEQ1804 | 0.048 | 0.69 |
| SEQ1819 | 0.035 | 0.74 |
| SEQ1820 | 0.048 | 0.26 |
| SEQ1821 | 0.055 | 0.71 |
| SEQ1858 | 0.054 | 0.27 |
| SEQ1869 | 0.003 | 0.81 |
| SEQ1873 | 0.071 | 0.71 |
| SEQ1923 | 0.017 | 0.72 |
| SEQ1983 | 0.002 | 0.84 |
| SEQ2049 | 0.029 | 0.74 |
| SEQ2074 | 0.022 | 0.24 |
| SEQ2100 | 0.041 | 0.69 |
| SEQ2114 | 0.034 | 0.68 |
| SEQ2121 | 0.035 | 0.76 |
| SEQ2126 | 0.031 | 0.27 |
| SEQ2127 | 0.220 | 0.73 |
| SEQ2170 | 0.013 | 0.19 |
| SEQ2209 | 0.124 | 0.71 |
| SEQ2216 | 0.033 | 0.72 |
| SEQ2234 | 0.032 | 0.26 |
| SEQ2253 | 0.004 | 0.21 |
| SEQ2255 | 0.055 | 0.70 |
| SEQ2260 | 0.060 | 0.27 |
| SEQ2273 | 0.052 | 0.72 |
| SEQ2282 | 0.043 | 0.29 |
| SEQ2287 | 0.009 | 0.22 |
| SEQ2288 | 0.024 | 0.15 |
| SEQ2313 | 0.013 | 0.74 |
| SEQ2320 | 0.051 | 0.72 |
| SEQ2344 | 0.028 | 0.71 |
| SEQ2362 | 0.031 | 0.76 |
| SEQ2368 | 0.013 | 0.74 |
| SEQ2372 | 0.035 | 0.72 |
| SEQ2373 | 0.002 | 0.85 |
| SEQ2377 | 0.009 | 0.77 |
| SEQ2382 | 0.029 | 0.73 |
| SEQ2402 | 0.012 | 0.83 |
| SEQ2411 | 0.077 | 0.70 |
| SEQ2420 | 0.043 | 0.73 |
| SEQ2454 | 0.015 | 0.75 |
| SEQ2466 | 0.041 | 0.70 |
| SEQ2470 | 0.072 | 0.28 |
| SEQ2471 | 0.039 | 0.76 |
| SEQ2472 | 0.022 | 0.27 |
| SEQ2478 | 0.027 | 0.27 |
| SEQ2485 | 0.033 | 0.33 |
| SEQ2502 | 0.061 | 0.71 |
| SEQ2512 | 0.042 | 0.70 |
| SEQ2521 | 0.031 | 0.32 |
| SEQ2523 | 0.066 | 0.73 |
| SEQ2558 | 0.160 | 0.72 |
| SEQ2571 | 0.013 | 0.76 |
| SEQ2583 | 0.115 | 0.28 |
| SEQ2622 | 0.023 | 0.24 |
| SEQ2625 | 0.027 | 0.72 |
| SEQ2637 | 0.046 | 0.31 |
| SEQ2657 | 0.036 | 0.65 |
| SEQ2658 | 0.040 | 0.28 |
| SEQ2677 | 0.022 | 0.75 |
| SEQ2692 | 0.052 | 0.29 |
| SEQ2699 | 0.020 | 0.27 |
| SEQ2703 | 0.020 | 0.76 |
| SEQ2712 | 0.091 | 0.30 |
| SEQ2737 | 0.072 | 0.70 |
| SEQ2742 | 0.034 | 0.73 |
| SEQ2750 | 0.000 | 0.88 |
| SEQ2791 | 0.045 | 0.28 |
| SEQ2825 | 0.046 | 0.72 |
| SEQ2830 | 0.013 | 0.76 |
| SEQ2856 | 0.017 | 0.73 |
| SEQ2875 | 0.019 | 0.26 |
| SEQ2880 | 0.054 | 0.28 |
| SEQ2883 | 0.028 | 0.35 |
| SEQ2896 | 0.012 | 0.25 |
| SEQ2912 | 0.102 | 0.72 |
| SEQ2928 | 0.033 | 0.69 |
| SEQ2957 | 0.048 | 0.31 |
| SEQ2968 | 0.045 | 0.28 |
| SEQ2982 | 0.002 | 0.19 |
| SEQ2984 | 0.043 | 0.28 |
| SEQ2998 | 0.005 | 0.79 |
| SEQ3006 | 0.026 | 0.72 |
| SEQ3010 | 0.016 | 0.23 |
| SEQ3053 | 0.013 | 0.76 |
| SEQ3054 | 0.019 | 0.27 |
| SEQ3056 | 0.030 | 0.71 |
| SEQ3061 | 0.023 | 0.71 |
| SEQ3064 | 0.023 | 0.77 |
| SEQ3080 | 0.033 | 0.26 |
| SEQ3084 | 0.034 | 0.73 |
| SEQ3096 | 0.044 | 0.31 |
| SEQ3104 | 0.070 | 0.30 |
| SEQ3112 | 0.010 | 0.22 |
| SEQ3125 | 0.041 | 0.71 |
| SEQ3128 | 0.041 | 0.32 |
| SEQ3133 | 0.080 | 0.70 |
| SEQ3137 | 0.163 | 0.73 |
| SEQ3184 | 0.049 | 0.28 |
| SEQ3187 | 0.038 | 0.30 |
| SEQ3193 | 0.065 | 0.71 |
| SEQ3196 | 0.030 | 0.29 |
| SEQ3197 | 0.029 | 0.71 |
| SEQ3200 | 0.015 | 0.26 |
| SEQ3210 | 0.036 | 0.70 |
| SEQ3215 | 0.012 | 0.24 |
| SEQ3230 | 0.012 | 0.27 |
| SEQ3231 | 0.016 | 0.75 |

[0210] For this classification, the 2 groups (low LVEF (LVEF≤45) and high LVEF (LVEF>45)) have the same number of samples. The variable selection was performed by using a Random Forest model. A combination of 11 pre-selected lncRNAs through a Random Forest Classifier (Table 10) is the best predictive model obtained here. The lncRNAs were selected using a random forest algorithm. This model has an area under the receiver-operating characteristic curve (AUC) of 0.996, an accuracy of 0.933, a sensitivity of 0.882, a specificity of 1, a Positive Predictive Value (PPV) of 1 and Negative Predictive Value (PNV) of 0.867. The confusion matrix is presented in Table 11.

TABLE 10
List of 11 pre-selected lncRNAs through a Random Forest
Classifier for the classification low LVEF (LVEF ≤
45) and high LVEF (LVEF > 45)

| lncRNA | Ranking |
|---|---|
| SEQ2373 | 1 |
| SEQ1748 | 2 |
| SEQ3112 | 3 |
| SEQ1231 | 4 |
| SEQ0664 | 5 |
| SEQ1686 | 6 |
| SEQ0791 | 7 |
| SEQ2126 | 8 |
| SEQ2750 | 9 |
| SEQ3010 | 10 |
| SEQ2241 | 11 |

TABLE 11
Confusion matrix

| | Low LVEF predicted | High LVEF predicted |
|---|---|---|
| Low LVEF real | 15 | 2 |
| High LVEF real | 0 | 13 |

[0211] Correlation Between LncRNA and Left Ventricular Ejection Fraction

[0212] Instead of applying a threshold to predict patients as HF or non HF, the expression level of LncRNAs can be considered as a continuous value. For this approach, spearman correlation factor is calculated to measure the correlation between LVEF value at one month and expression level of LncRNA. When a threshold of (+ or −) 0.45 for correlation factor is applied, the expression of 73 lncRNAs are positively or negatively correlated with LVEF at 1 month. Among these 73 lncRNAs, 26 have a positive correlation factor whereas 47 have a negative correlation factor (Table 12).

TABLE 12
List of 73 IncRNA with spearman correlation
factor higher than 0.45 (absolute value)

| LncRNA | Correlation |
|---|---|
| SEQ0005 | −0.52414 |
| SEQ0008 | −0.45621 |
| SEQ0069 | −0.56061 |
| SEQ0173 | −0.52934 |
| SEQ0285 | −0.47612 |
| SEQ0321 | −0.52163 |
| SEQ0334 | −0.49958 |
| SEQ0352 | 0.60914 |
| SEQ0398 | 0.607739 |
| SEQ0544 | 0.46328 |
| SEQ0566 | 0.461135 |
| SEQ0586 | 0.510946 |
| SEQ0664 | 0.547218 |
| SEQ0688 | −0.45551 |
| SEQ0758 | −0.46513 |
| SEQ0914 | −0.55591 |
| SEQ1109 | −0.5676 |
| SEQ1144 | −0.45238 |
| SEQ1204 | −0.45716 |
| SEQ1281 | 0.466222 |
| SEQ1385 | −0.45266 |
| SEQ1398 | −0.50488 |
| SEQ1406 | −0.55967 |
| SEQ1428 | −0.5583 |
| SEQ1564 | −0.61193 |
| SEQ1626 | 0.457149 |
| SEQ1674 | 0.566205 |
| SEQ1707 | 0.467787 |
| SEQ1715 | 0.477576 |
| SEQ1804 | −0.48111 |
| SEQ1858 | −0.52538 |
| SEQ1869 | −0.4541 |
| SEQ2100 | 0.534861 |
| SEQ2157 | −0.52703 |
| SEQ2216 | −0.53537 |
| SEQ2253 | −0.50086 |
| SEQ2281 | −0.46295 |
| SEQ2287 | −0.63378 |
| SEQ2311 | −0.58252 |
| SEQ2368 | 0.510665 |
| SEQ2373 | −0.55046 |
| SEQ2377 | −0.45729 |
| SEQ2382 | −0.48369 |
| SEQ2402 | −0.51064 |
| SEQ2454 | −0.48739 |
| SEQ2470 | 0.495523 |
| SEQ2472 | −0.46052 |
| SEQ2478 | −0.46735 |
| SEQ2501 | 0.470795 |
| SEQ2523 | −0.51113 |
| SEQ2545 | −0.49398 |
| SEQ2593 | −0.4538 |
| SEQ2637 | 0.455663 |
| SEQ2645 | −0.49274 |
| SEQ2703 | 0.459314 |
| SEQ2742 | −0.45062 |
| SEQ2746 | −0.47907 |
| SEQ2750 | 0.542019 |
| SEQ2753 | 0.514263 |
| SEQ2830 | 0.460882 |
| SEQ2896 | 0.499645 |
| SEQ2928 | 0.463878 |
| SEQ2930 | −0.48812 |
| SEQ2971 | 0.50357 |
| SEQ2973 | 0.483104 |
| SEQ2982 | −0.4529 |
| SEQ2998 | 0.49442 |
| SEQ3013 | 0.476852 |
| SEQ3080 | −0.48109 |
| SEQ3128 | −0.66808 |
| SEQ3196 | −0.49516 |
| SEQ3200 | 0.536685 |
| SEQ3230 | −0.50558 |

### Example 4

### LncRNA Detection in Serum Samples with a Targeted lncRNA-seq (FiMICS) Protocol

[0213] Circulating lncRNAs in body fluids such as whole blood, serum or plasma are numerous and released from many different tissues. Thus, performing total RNA sequencing on peripheral samples implies to generate a high amount of data to get sufficient data on the lncRNAs of interest. To optimize cardiac lncRNA quantification in peripheral blood samples, a targeted sequencing kit is developed to specifically quantify the cardiac lncRNAs of interest. For this purpose, capture probes of 50 nucleotides specific and complementary to the sequence of lncRNAs associated to the cardiac tissue (SEQ ID NO 1 to SEQ ID NO 3238) are designed. Each probe covers region of 200 bp. Multiple probes are designed for each lncRNA over 200 bp to cover specific region. Maximum probe coverage is limited to 2000 nucleotides. Celemics technology was used to develop the assay but similar technologies using capture probes for targeting sequencing panel can be used.

[0214] Material and Methods:

[0215] Serum samples collected at discharge of patient between D3 and D5 from 30 patients with AMI from the MitoCare cohort were used for lncRNA profiling. Mitocare is a multicenter, randomized, double-blind, placebo controlled study. The study population includes AMI patients undergoing PCI, older than 18 years. The primary endpoint is the level of left ventricular ejection fraction (LVEF) less than 40% at 1 month. Demographics of the patients are presented in Table 13. Control serum samples were selected from subjects of ADDIA Chronobiological study.

TABLE 13
Demographic data for Mitocare patients used with Fi-MICS test

| | Group 1 | Group 2 | Group 3 |
|---|---|---|---|
| EF | <40 | 41-50 | >50 |
| Nb | 6 | 6 | 5 |
| Age | 62.8 | 63.8 | 59.9 |
| Male | 100% | 83% | 60% |
| BMI | 27.9 | 28.0 | 27.6 |
| Systolic Blood | 108 | 123.5 | 117.4 |
| Pressure | | | |
| Diastolic Blood | 70.5 | 70.7 | 66.2 |
| Pressure | | | |
| Heart Rate | 83.0 | 79.6 | 67.4 |

[0216] Sequencing libraries constructed in Example 3 from Serum RNA of 18 patients who suffered AMI, (6 who developed heart failure (HF) and 12 who did not) and 6 control subjects are used. The lncRNA capture panel called Fi-MICS kit is used to capture 3238 cardiac lncRNAs of interest, according to the manufacturer instructions. Briefly, biotinylated target capture probes, specific for the lncRNAs of interest, are hybridized to the sequencing libraries for 24 hours. So, captured lncRNA sequences are purified on T1 streptavidin coated magnetic beads. Six successive washes are performed to eliminate all libraries sequences not specific to the panel probes. Finally, captures sequenced are enriched by PCR (14 cycles) and PCR products are purified with a final AMPure XP beads wash. Captured libraries are eluted in 30 μl of nuclease-free water.

[0217] For quality control, 1 μl of each library is run on the Agilent Technologies 2100 Bioanalyzer using a DNA 1000 chip according to the manufacturer's recommendations. Absence of adapter dimers is checked and the average library size is determined by a region table. Libraries are quantified on Qubit 2.0 using Qubit dsDNA High Sensitivity assay kit (Invitrogen). Library size previously determined on the Bioanalyzer is used to calculate molar concentrations from mass concentrations. All libraries are sequenced using the Illumina NextSeq500 (2×75 bp).

[0218] Sequencing Analysis and Statistical Analysis

[0219] The read alignment and the quantification are performed as described in Example 3. The transcript counts were normalized by CPM (counts per millions). To determine differentially expressed lncRNAs, a statistical analysis is performed using a non-parametric Wilcoxon-Mann-Whitney test and a parametric T-test. A lncRNA with a p-value≤0.05 is considered as differentially expressed.

[0220] Results:

[0221] Coverage in Targeted Sequencing is Improved

[0222] The average coverage depth across all bases in the sample is the sum of the read depths of each base in each region divided by the sum of the lengths of every region. Using the Fi-MICS kit, the average coverage is improved (11 times better in average with equivalent number of reads) compared to a total RNA-seq protocol, as shown in Table 14. Among the 3238 lncRNAs present in the panel, 2432 lncRNAs passed the threshold of 10 CPM in serum samples. Detection and quantification in function of coverage depth is presented in FIG. 5. Whereas 2744 lncRNAs are measured with a coverage of at least 1× by total RNA-Seq experiment, 3162 lncRNAs are measured with a coverage of at least 1× with FiMICS panel with 10 fold less reads generated. At a coverage of at least 2×, half of the lncRNAs are excluded with total-RNA-Seq approach (1385) whereas 3041 lncRNAs are passing the threshold in FiMICS panel. Efficiency of the targeted panel is highly enhanced (FIG. 5). The FiMICS (targeted sequencing) detects more lncRNA in terms of numbers of lncRNAs and their level of expression and thus using much less total sequencing reads.

TABLE 14
Number of reads and average coverage for
18 samples in the 2 sequencing protocols

| | Total RNA-seq protocol | | Targeted RNA-seq protocol | |
|---|---|---|---|---|
| Sample | Total | Average | Total | Average |
| name | reads | coverage depth | reads | coverage depth |
| Sample 1 | 35,545,396 | 62.01 | 4,113,215 | 135.54 |
| Sample 2 | 34,427,599 | 70.57 | 5,051,804 | 107.11 |
| Sample 3 | 27,820,331 | 64.19 | 7,664,878 | 100.01 |
| Sample 4 | 46,070,066 | 87.04 | 5,939,425 | 94.2 |
| Sample 5 | 37,846,232 | 76.60 | 5,251,571 | 96.98 |
| Sample 6 | 45,285,008 | 51.97 | 8,649,560 | 118.7 |
| Sample 7 | 63,215,798 | 88.00 | 5,342,296 | 99.26 |
| Sample 8 | 37,467,050 | 67.20 | 6,552,391 | 93.25 |
| Sample 9 | 65,796,180 | 87.51 | 6,602,505 | 129.06 |
| Sample 10 | 50,693,623 | 48.89 | 5,043,709 | 76.41 |
| Sample 11 | 64,165,816 | 88.80 | 6,586,358 | 83.5 |
| Sample 12 | 33,302,080 | 54.82 | 6,725,419 | 105.28 |
| Sample 13 | 29,673,123 | 50.11 | 8,178,840 | 123.15 |
| Sample 14 | 56,386,693 | 76.81 | 5,613,486 | 105.63 |
| Sample 15 | 75,267,997 | 107.00 | 6,789,160 | 124.8 |
| Sample 16 | 40,789,456 | 66.70 | 5,875,488 | 81.59 |
| Sample 17 | 54,651,503 | 78.11 | 7,038,893 | 85.31 |
| Sample 18 | 66,866,920 | 78.91 | 5,275,438 | 82.16 |

[0223] Comparison Between Samples After Myocardial Infarction and Control Samples

[0224] First, the statistical analysis was performed by comparing 18 samples after myocardial infarction (AMI) and 6 control samples with the goal to diagnose myocardial infraction. The volcano plot showed the differential expression of lncRNA. 20 lncRNAs are differentially expressed between the samples AMI and the control samples. The p-value and the fold-change of these lncRNA are listed in the Table 15.

TABLE 15
List of 20 lncRNAs which are differentially expressed
between samples AMI and control samples

| lncRNA | p-value | Fold change |
|---|---|---|
| SEQ0097 | 1.35E−05 | 0.446 |
| SEQ2114 | 0.00194062 | 0.477 |
| SEQ0534 | 0.02513143 | 0.354 |
| SEQ1404 | 0.0128132 | 0.486 |
| SEQ0311 | 0.00046383 | 0.217 |
| SEQ1262 | 0.01381743 | 0.412 |
| SEQ0990 | 0.00060722 | 0.182 |
| SEQ1300 | 0.04098375 | 0.364 |
| SEQ0978 | 0.00358642 | 0.498 |
| SEQ0215 | 0.00013071 | 0.369 |
| SEQ0288 | 0.04991173 | 0.392 |
| SEQ1418 | 0.00010606 | 0.450 |
| SEQ2070 | 0.00078855 | 0.457 |
| SEQ0309 | 0.00322822 | 0.141 |
| SEQ0597 | 0.0182368 | 0.401 |
| SEQ1875 | 0.0343985 | 0.457 |
| SEQ1984 | 0.0108457 | 0.479 |
| SEQ0538 | 3.89E−05 | 0.386 |
| SEQ1871 | 0.00021278 | 0.360 |

[0225] For this classification, a combination of 14 pre-selected lncRNA through a Random Forest Classifier (Table 16) is the best predictive model obtained here. The lncRNAs were selected using a random forest algorithm. This model has an area under the receiver-operating characteristic curve (AUC) of 0.971, an accuracy of 0.870, a sensitivity of 0.941, a specificity of 0.667, a Positive Predictive Value (PPV) of 0.889 and Negative Predictive Value (PNV) of 0.800. The confusion matrix is presented in Table 17.

TABLE 16
List of 14 pre-selected lncRNAs through a Random
Forest Classifier for the classification between
the samples AMI and the control samples

| lncRNA | rank |
|---|---|
| SEQ2150 | 1 |
| SEQ1534 | 2 |
| SEQ0311 | 3 |
| SEQ2952 | 4 |
| SEQ2838 | 5 |
| SEQ1437 | 6 |
| SEQ1297 | 7 |
| SEQ1059 | 8 |
| SEQ1465 | 9 |
| SEQ2826 | 10 |
| SEQ0180 | 11 |
| SEQ0538 | 12 |
| SEQ0258 | 13 |
| SEQ2273 | 14 |

TABLE 17
Confusion matrix of the Random Forest model

| | Predicted AMI | Predicted Control |
|---|---|---|
| Real Control | 4 | 2 |
| True AMI | 1 | 16 |

[0226] Comparison Between Low LVEF (LVEF≤40) and High LVEF (LVEF>40)

[0227] In this analysis, the 18 samples AMI were grouped into 2 groups based on the 1-month LVEF: low LVEF (LVEF≤40) and high LVEF (LVEF>40). The volcano plot showed the differential expression of lncRNA. 95 lncRNAs are differentially expressed and among them, 6 lncRNAs are differentially expressed with a fold change>2 or <0.5 between the samples with low LVEF and the samples with high LVEF. The p-value and the fold-change and individual AUC of these 6 lncRNAs are listed in the Table 18 and 353 lncRNAs which have a P<0.05 and/or an individual AUC>0.7 or <0.3 are listed in Table 19.

TABLE 18
List of 6 lncRNAs which are differentially expressed and
have a fold change > 2 or <0.5 between the low
LVEF group (LVEF ≤ 40) and the high LVEF group (LVEF > 40)

| lncRNA | p-value | Fold change | Individual AUC |
|---|---|---|---|
| SEQ0631 | 0.022 | 2.497 | 0.848 |
| SEQ0758 | 0.030 | 0.354 | 0.242 |
| SEQ0789 | 0.030 | 0.388 | 0.258 |
| SEQ1399 | 0.021 | 0.163 | 0.242 |
| SEQ2914 | 0.012 | 2.493 | 0.985 |
| SEQ2924 | 0.147 | 2.232 | 0.727 |

TABLE 19
List of 353 IncRNAs which are differentially expressed
and/or have an AUC >0.7 or <0.3 between the low
LVEF group (LVEF ≤ 40) and the high LVEF group (LVEF > 40)

| IncRNA | p-value | AUC |
|---|---|---|
| SEQ0002 | 0.006 | 0.939 |
| SEQ0006 | 0.965 | 0.712 |
| SEQ0007 | 0.199 | 0.712 |
| SEQ0008 | 0.224 | 0.288 |
| SEQ0018 | 0.5 | 0.258 |
| SEQ0019 | 0.027 | 0.182 |
| SEQ0023 | 0.127 | 0.742 |
| SEQ0041 | 0.091 | 0.258 |
| SEQ0042 | 0.151 | 0.242 |
| SEQ0048 | 0.145 | 0.288 |
| SEQ0057 | 0.163 | 0.712 |
| SEQ0060 | 0.192 | 0.288 |
| SEQ0094 | 0.264 | 0.773 |
| SEQ0106 | 0.168 | 0.273 |
| SEQ0117 | 0.097 | 0.727 |
| SEQ0120 | 0.642 | 0.288 |
| SEQ0134 | 0.075 | 0.212 |
| SEQ0149 | 0.448 | 0.712 |
| SEQ0151 | 0.011 | 0.182 |
| SEQ0155 | 0.023 | 0.833 |
| SEQ0190 | 0.05 | 0.242 |
| SEQ0191 | 0.064 | 0.818 |
| SEQ0205 | 0.047 | 0.212 |
| SEQ0208 | 0.051 | 0.197 |
| SEQ0222 | 0.018 | 0.833 |
| SEQ0228 | 0.171 | 0.712 |
| SEQ0236 | 0.06 | 0.788 |
| SEQ0239 | 0.121 | 0.712 |
| SEQ0241 | 0.097 | 0.288 |
| SEQ0242 | 0.462 | 0.727 |
| SEQ0285 | 0.149 | 0.758 |
| SEQ0295 | 0.076 | 0.273 |
| SEQ0308 | 0.12 | 0.273 |
| SEQ0312 | 0.075 | 0.212 |
| SEQ0334 | 0.021 | 0.864 |
| SEQ0345 | 0.107 | 0.758 |
| SEQ0350 | 0.017 | 0.152 |
| SEQ0354 | 0.346 | 0.727 |
| SEQ0358 | 0.161 | 0.288 |
| SEQ0362 | 0.25 | 0.273 |
| SEQ0366 | 0.095 | 0.758 |
| SEQ0371 | 0.349 | 0.258 |
| SEQ0380 | 0.141 | 0.727 |
| SEQ0384 | 0.026 | 0.803 |
| SEQ0394 | 0.029 | 0.152 |
| SEQ0412 | 0.342 | 0.227 |
| SEQ0434 | 0.179 | 0.712 |
| SEQ0441 | 0.05 | 0.197 |
| SEQ0443 | 0.211 | 0.712 |
| SEQ0445 | 0.446 | 0.288 |
| SEQ0460 | 0.046 | 0.227 |
| SEQ0468 | 0.059 | 0.727 |
| SEQ0469 | 0.09 | 0.288 |
| SEQ0487 | 0.091 | 0.212 |
| SEQ0502 | 0.106 | 0.758 |
| SEQ0542 | 0.068 | 0.727 |
| SEQ0547 | 0.016 | 0.803 |
| SEQ0551 | 0.196 | 0.742 |
| SEQ0552 | 0.042 | 0.833 |
| SEQ0561 | 0.192 | 0.712 |
| SEQ0581 | 0.057 | 0.758 |
| SEQ0597 | 0.108 | 0.742 |
| SEQ0601 | 0.075 | 0.803 |
| SEQ0604 | 0.284 | 0.258 |
| SEQ0612 | 0.071 | 0.288 |
| SEQ0621 | 0.21 | 0.742 |
| SEQ0629 | 0.176 | 0.758 |
| SEQ0631 | 0.022 | 0.848 |
| SEQ0659 | 0.052 | 0.848 |
| SEQ0661 | 0.157 | 0.742 |
| SEQ0670 | 0.053 | 0.742 |
| SEQ0677 | 0.035 | 0.788 |
| SEQ0680 | 0.045 | 0.227 |
| SEQ0681 | 0.047 | 0.773 |
| SEQ0701 | 0.159 | 0.212 |
| SEQ0702 | 0.365 | 0.712 |
| SEQ0724 | 0.058 | 0.742 |
| SEQ0726 | 0.515 | 0.712 |
| SEQ0729 | 0.017 | 0.864 |
| SEQ0730 | 0.076 | 0.818 |
| SEQ0732 | 0.098 | 0.758 |
| SEQ0751 | 0.03 | 0.212 |
| SEQ0758 | 0.03 | 0.242 |
| SEQ0766 | 0.033 | 0.803 |
| SEQ0779 | 0.36 | 0.742 |
| SEQ0789 | 0.03 | 0.258 |
| SEQ0821 | 0.004 | 0.864 |
| SEQ0823 | 0.117 | 0.273 |
| SEQ0829 | 0.143 | 0.227 |
| SEQ0841 | 0.063 | 0.773 |
| SEQ0844 | 0.021 | 0.136 |
| SEQ0847 | 0.107 | 0.288 |
| SEQ0868 | 0.228 | 0.242 |
| SEQ0884 | 0.322 | 0.288 |
| SEQ0891 | 0.044 | 0.742 |
| SEQ0915 | 0.077 | 0.758 |
| SEQ0926 | 0.285 | 0.288 |
| SEQ0937 | 0.075 | 0.727 |
| SEQ0938 | 0.271 | 0.742 |
| SEQ0946 | 0.008 | 0.833 |
| SEQ0956 | 0.012 | 0.879 |
| SEQ0958 | 0.027 | 0.818 |
| SEQ0960 | 0.036 | 0.788 |
| SEQ0981 | 0.07 | 0.288 |
| SEQ0986 | 0.044 | 0.788 |
| SEQ1005 | 0.178 | 0.712 |
| SEQ1052 | 0.221 | 0.727 |
| SEQ1065 | 0.045 | 0.212 |
| SEQ1075 | 0.025 | 0.197 |
| SEQ1076 | 0.275 | 0.288 |
| SEQ1089 | 0.002 | 0.97 |
| SEQ1093 | 0.037 | 0.197 |
| SEQ1109 | 0.114 | 0.788 |
| SEQ1111 | 0.139 | 0.288 |
| SEQ1146 | 0.039 | 0.182 |
| SEQ1156 | 0.28 | 0.742 |
| SEQ1162 | 0.019 | 0.803 |
| SEQ1164 | 0.181 | 0.273 |
| SEQ1179 | 0.078 | 0.197 |
| SEQ1186 | 0.135 | 0.273 |
| SEQ1191 | 0.064 | 0.242 |
| SEQ1204 | 0.012 | 0.848 |
| SEQ1207 | 0.047 | 0.864 |
| SEQ1217 | 0.13 | 0.742 |
| SEQ1232 | 0.086 | 0.773 |
| SEQ1252 | 0.208 | 0.273 |
| SEQ1273 | 0.016 | 0.182 |
| SEQ1288 | 0.021 | 0.197 |
| SEQ1326 | 0.056 | 0.258 |
| SEQ1333 | 0.199 | 0.712 |
| SEQ1338 | 0.097 | 0.288 |
| SEQ1350 | 0.162 | 0.242 |
| SEQ1354 | 0.059 | 0.803 |
| SEQ1399 | 0.021 | 0.242 |
| SEQ1403 | 0.063 | 0.788 |
| SEQ1405 | 0.17 | 0.727 |
| SEQ1412 | 0.097 | 0.712 |
| SEQ1422 | 0.04 | 0.758 |
| SEQ1433 | 0.056 | 0.258 |
| SEQ1439 | 0.029 | 0.152 |
| SEQ1449 | 0.073 | 0.227 |
| SEQ1459 | 0.125 | 0.242 |
| SEQ1465 | 0.182 | 0.288 |
| SEQ1467 | 0.067 | 0.742 |
| SEQ1475 | 0.034 | 0.242 |
| SEQ1476 | 0.022 | 0.833 |
| SEQ1484 | 0.124 | 0.288 |
| SEQ1485 | 0.143 | 0.727 |
| SEQ1515 | 0.014 | 0.136 |
| SEQ1516 | 0.076 | 0.818 |
| SEQ1527 | 0.185 | 0.273 |
| SEQ1534 | 0.038 | 0.212 |
| SEQ1535 | 0.284 | 0.712 |
| SEQ1556 | 0.133 | 0.727 |
| SEQ1573 | 0.045 | 0.258 |
| SEQ1578 | 0.197 | 0.742 |
| SEQ1580 | 0.229 | 0.712 |
| SEQ1598 | 0.146 | 0.712 |
| SEQ1624 | 0.048 | 0.227 |
| SEQ1635 | 0.089 | 0.758 |
| SEQ1660 | 0.014 | 0.864 |
| SEQ1661 | 0.038 | 0.258 |
| SEQ1678 | 0.075 | 0.258 |
| SEQ1696 | 0.231 | 0.288 |
| SEQ1710 | 0.056 | 0.742 |
| SEQ1722 | 0.091 | 0.864 |
| SEQ1740 | 0.162 | 0.712 |
| SEQ1744 | 0.021 | 0.167 |
| SEQ1754 | 0.453 | 0.727 |
| SEQ1760 | 0.086 | 0.727 |
| SEQ1773 | 0.146 | 0.288 |
| SEQ1806 | 0.168 | 0.258 |
| SEQ1816 | 0.06 | 0.833 |
| SEQ1818 | 0.106 | 0.288 |
| SEQ1833 | 0.14 | 0.273 |
| SEQ1852 | 0.008 | 0.864 |
| SEQ1853 | 0.069 | 0.227 |
| SEQ1854 | 0.164 | 0.773 |
| SEQ1860 | 0.19 | 0.727 |
| SEQ1862 | 0.107 | 0.258 |
| SEQ1871 | 0.096 | 0.288 |
| SEQ1872 | 0.142 | 0.712 |
| SEQ1880 | 0.377 | 0.712 |
| SEQ1896 | 0.083 | 0.227 |
| SEQ1903 | 0.105 | 0.227 |
| SEQ1908 | 0.066 | 0.758 |
| SEQ1912 | 0.049 | 0.258 |
| SEQ1937 | 0.098 | 0.773 |
| SEQ1939 | 0.139 | 0.197 |
| SEQ1959 | 0.012 | 0.212 |
| SEQ1962 | 0.094 | 0.258 |
| SEQ1992 | 0.049 | 0.227 |
| SEQ1995 | 0.06 | 0.773 |
| SEQ2000 | 0.06 | 0.197 |
| SEQ2021 | 0.037 | 0.212 |
| SEQ2022 | 0.27 | 0.258 |
| SEQ2050 | 0.117 | 0.273 |
| SEQ2084 | 0.104 | 0.788 |
| SEQ2086 | 0.065 | 0.242 |
| SEQ2091 | 0.214 | 0.712 |
| SEQ2109 | 0.22 | 0.242 |
| SEQ2141 | 0.128 | 0.242 |
| SEQ2149 | 0.071 | 0.227 |
| SEQ2151 | 0.064 | 0.242 |
| SEQ2161 | 0.051 | 0.273 |
| SEQ2170 | 0.099 | 0.227 |
| SEQ2172 | 0.023 | 0.773 |
| SEQ2174 | 0.01 | 0.848 |
| SEQ2192 | 0.013 | 0.864 |
| SEQ2198 | 0.027 | 0.803 |
| SEQ2205 | 0.047 | 0.758 |
| SEQ2207 | 0.088 | 0.197 |
| SEQ2218 | 0.078 | 0.788 |
| SEQ2220 | 0.105 | 0.758 |
| SEQ2221 | 0.105 | 0.788 |
| SEQ2226 | 0.214 | 0.712 |
| SEQ2227 | 0.058 | 0.258 |
| SEQ2235 | 0.032 | 0.167 |
| SEQ2238 | 0.024 | 0.197 |
| SEQ2244 | 0.102 | 0.742 |
| SEQ2273 | 0.098 | 0.773 |
| SEQ2285 | 0.107 | 0.242 |
| SEQ2286 | 0.16 | 0.712 |
| SEQ2294 | 0.079 | 0.803 |
| SEQ2311 | 0.388 | 0.273 |
| SEQ2318 | 0.114 | 0.758 |
| SEQ2325 | 0.482 | 0.288 |
| SEQ2327 | 0.097 | 0.727 |
| SEQ2338 | 0.012 | 0.818 |
| SEQ2341 | 0.086 | 0.242 |
| SEQ2345 | 0.102 | 0.227 |
| SEQ2364 | 0.149 | 0.742 |
| SEQ2368 | 0.045 | 0.742 |
| SEQ2371 | 0.144 | 0.258 |
| SEQ2375 | 0.01 | 0.121 |
| SEQ2379 | 0.029 | 0.773 |
| SEQ2395 | 0.113 | 0.773 |
| SEQ2406 | 0.018 | 0.182 |
| SEQ2407 | 0.27 | 0.773 |
| SEQ2411 | 0.02 | 0.864 |
| SEQ2422 | 0.138 | 0.742 |
| SEQ2425 | 0.15 | 0.712 |
| SEQ2429 | 0.049 | 0.212 |
| SEQ2436 | 0.11 | 0.758 |
| SEQ2440 | 0.238 | 0.258 |
| SEQ2441 | 0.067 | 0.242 |
| SEQ2451 | 0.205 | 0.712 |
| SEQ2454 | 0.054 | 0.758 |
| SEQ2475 | 0.045 | 0.197 |
| SEQ2497 | 0.109 | 0.712 |
| SEQ2513 | 0.189 | 0.712 |
| SEQ2517 | 0.189 | 0.758 |
| SEQ2520 | 0.176 | 0.727 |
| SEQ2529 | 0.256 | 0.273 |
| SEQ2544 | 0.259 | 0.742 |
| SEQ2546 | 0.055 | 0.258 |
| SEQ2553 | 0.196 | 0.242 |
| SEQ2562 | 0.099 | 0.712 |
| SEQ2572 | 0.227 | 0.727 |
| SEQ2584 | 0.206 | 0.288 |
| SEQ2611 | 0.112 | 0.288 |
| SEQ2613 | 0.105 | 0.758 |
| SEQ2621 | 0.152 | 0.727 |
| SEQ2627 | 0.068 | 0.788 |
| SEQ2629 | 0.093 | 0.712 |
| SEQ2639 | 0.131 | 0.288 |
| SEQ2640 | 0.08 | 0.727 |
| SEQ2641 | 0.379 | 0.742 |
| SEQ2656 | 0.085 | 0.712 |
| SEQ2676 | 0.03 | 0.864 |
| SEQ2677 | 0.082 | 0.212 |
| SEQ2680 | 0.161 | 0.727 |
| SEQ2681 | 0.07 | 0.788 |
| SEQ2683 | 0.053 | 0.818 |
| SEQ2684 | 0.076 | 0.197 |
| SEQ2692 | 0.047 | 0.242 |
| SEQ2713 | 0.052 | 0.803 |
| SEQ2735 | 0.261 | 0.712 |
| SEQ2737 | 0.035 | 0.848 |
| SEQ2754 | 0.133 | 0.212 |
| SEQ2760 | 0.135 | 0.273 |
| SEQ2767 | 0.156 | 0.727 |
| SEQ2768 | 0.14 | 0.758 |
| SEQ2784 | 0.09 | 0.742 |
| SEQ2788 | 0.15 | 0.288 |
| SEQ2789 | 0.426 | 0.727 |
| SEQ2796 | 0.162 | 0.773 |
| SEQ2806 | 0.058 | 0.773 |
| SEQ2819 | 0.111 | 0.727 |
| SEQ2827 | 0.024 | 0.894 |
| SEQ2834 | 0.098 | 0.288 |
| SEQ2841 | 0.014 | 0.818 |
| SEQ2856 | 0.13 | 0.273 |
| SEQ2857 | 0.135 | 0.742 |
| SEQ2870 | 0.035 | 0.212 |
| SEQ2881 | 0.014 | 0.818 |
| SEQ2903 | 0.19 | 0.712 |
| SEQ2911 | 0.177 | 0.742 |
| SEQ2914 | 0.012 | 0.985 |
| SEQ2917 | 0.226 | 0.712 |
| SEQ2924 | 0.147 | 0.727 |
| SEQ2939 | 0.06 | 0.258 |
| SEQ2945 | 0.727 | 0.727 |
| SEQ2955 | 0.089 | 0.288 |
| SEQ2958 | 0.071 | 0.758 |
| SEQ2959 | 0.34 | 0.879 |
| SEQ2961 | 0.009 | 0.121 |
| SEQ2963 | 0.114 | 0.758 |
| SEQ2967 | 0.042 | 0.227 |
| SEQ2969 | 0.22 | 0.727 |
| SEQ2973 | 0.17 | 0.773 |
| SEQ2982 | 0.069 | 0.818 |
| SEQ2995 | 0.063 | 0.273 |
| SEQ3001 | 0.088 | 0.727 |
| SEQ3007 | 0.217 | 0.712 |
| SEQ3013 | 0.059 | 0.758 |
| SEQ3015 | 0.147 | 0.727 |
| SEQ3029 | 0.03 | 0.212 |
| SEQ3035 | 0.004 | 0.136 |
| SEQ3036 | 0.071 | 0.818 |
| SEQ3052 | 0.064 | 0.773 |
| SEQ3053 | 0.002 | 0.909 |
| SEQ3058 | 0.037 | 0.803 |
| SEQ3060 | 0.371 | 0.712 |
| SEQ3064 | 0.048 | 0.758 |
| SEQ3065 | 0.16 | 0.742 |
| SEQ3069 | 0.328 | 0.258 |
| SEQ3090 | 0.046 | 0.773 |
| SEQ3091 | 0.161 | 0.712 |
| SEQ3098 | 0.094 | 0.212 |
| SEQ3101 | 0.102 | 0.833 |
| SEQ3107 | 0.221 | 0.258 |
| SEQ3124 | 0.008 | 0.864 |
| SEQ3130 | 0.134 | 0.742 |
| SEQ3134 | 0.158 | 0.727 |
| SEQ3142 | 0.111 | 0.242 |
| SEQ3146 | 0.114 | 0.712 |
| SEQ3147 | 0.237 | 0.273 |
| SEQ3148 | 0.33 | 0.758 |
| SEQ3169 | 0.138 | 0.742 |
| SEQ3172 | 0.033 | 0.758 |
| SEQ3176 | 0.037 | 0.879 |
| SEQ3183 | 0.006 | 0.909 |
| SEQ3190 | 0.085 | 0.788 |
| SEQ3195 | 0.186 | 0.273 |
| SEQ3196 | 0.036 | 0.773 |
| SEQ3197 | 0.119 | 0.758 |
| SEQ3199 | 0.081 | 0.788 |
| SEQ3208 | 0.015 | 0.197 |
| SEQ3209 | 0.133 | 0.258 |
| SEQ3213 | 0.027 | 0.152 |
| SEQ3222 | 0.051 | 0.197 |
| SEQ3236 | 0.293 | 0.712 |

[0228] Comparison Between Low LVEF (LVEF≤45) and High LVEF (LVEF>45)

[0229] In this analysis, the 18 samples AMI were grouped into 2 groups using the threshold of 45% LVEF: low LVEF (LVEF≤45) and high LVEF (LVEF>45). The volcano plot showed the differential expression of lncRNA. 80 lncRNA are differentially expressed and among them, 1 lncRNA has a fold change>2 or <0.5, which is shown in Table 20. 467 lncRNAs which have a P<0.05 and/or an individual AUC>0.7 or <0.3 are listed in Table 21.

TABLE 20
List of 1 lncRNA which is differentially expressed with
a fold change > 2 or <0.5 between the low LVEF
group (LVEF ≤ 45) and the high LVEF group (LVEF > 45)

| lncRNA | p-value | Fold change | AUC |
|---|---|---|---|
| SEQ2924 | 0.034 | 2.526 | 0.829 |

TABLE 21
List of 467 IncRNAs which are differentially expressed
and/or have an AUC >0.7 or <0.3 between the low
LVEF group (LVEF ≤ 45) and the high LVEF group (LVEF > 45)

| IncRNA | p-value | AUC |
|---|---|---|
| SEQ0008 | 0.186 | 0.286 |
| SEQ0023 | 0.152 | 0.743 |
| SEQ0024 | 0.151 | 0.3 |
| SEQ0063 | 0.014 | 0.843 |
| SEQ0067 | 0.09 | 0.757 |
| SEQ0068 | 0.105 | 0.229 |
| SEQ0071 | 0.106 | 0.2 |
| SEQ0076 | 0.18 | 0.729 |
| SEQ0092 | 0.103 | 0.729 |
| SEQ0095 | 0.092 | 0.214 |
| SEQ0104 | 0.286 | 0.3 |
| SEQ0105 | 0.031 | 0.2 |
| SEQ0106 | 0.006 | 0.1 |
| SEQ0107 | 0.143 | 0.729 |
| SEQ0108 | 0.118 | 0.729 |
| SEQ0112 | 0.201 | 0.3 |
| SEQ0113 | 0.146 | 0.3 |
| SEQ0117 | 0.134 | 0.743 |
| SEQ0127 | 0.015 | 0.843 |
| SEQ0130 | 0.07 | 0.757 |
| SEQ0134 | 0.047 | 0.186 |
| SEQ0136 | 0.234 | 0.714 |
| SEQ0139 | 0.089 | 0.771 |
| SEQ0141 | 0.007 | 0.143 |
| SEQ0155 | 0.065 | 0.743 |
| SEQ0161 | 0.162 | 0.7 |
| SEQ0162 | 0.191 | 0.3 |
| SEQ0167 | 0.142 | 0.729 |
| SEQ0170 | 0.151 | 0.257 |
| SEQ0193 | 0.129 | 0.271 |
| SEQ0194 | 0.029 | 0.2 |
| SEQ0200 | 0.186 | 0.3 |
| SEQ0208 | 0.647 | 0.3 |
| SEQ0215 | 0.202 | 0.743 |
| SEQ0217 | 0.099 | 0.3 |
| SEQ0219 | 0.149 | 0.7 |
| SEQ0236 | 0.111 | 0.771 |
| SEQ0239 | 0.011 | 0.771 |
| SEQ0242 | 0.184 | 0.757 |
| SEQ0267 | 0.146 | 0.286 |
| SEQ0273 | 0.14 | 0.757 |
| SEQ0299 | 0.122 | 0.257 |
| SEQ0309 | 0.383 | 0.729 |
| SEQ0317 | 0.082 | 0.214 |
| SEQ0331 | 0.2 | 0.286 |
| SEQ0334 | 0.155 | 0.757 |
| SEQ0343 | 0.119 | 0.743 |
| SEQ0359 | 0.081 | 0.257 |
| SEQ0373 | 0.209 | 0.714 |
| SEQ0393 | 0.175 | 0.271 |
| SEQ0394 | 0.041 | 0.157 |
| SEQ0395 | 0.096 | 0.729 |
| SEQ0398 | 0.32 | 0.714 |
| SEQ0405 | 0.168 | 0.286 |
| SEQ0412 | 0.522 | 0.229 |
| SEQ0425 | 0.284 | 0.714 |
| SEQ0426 | 0.119 | 0.7 |
| SEQ0427 | 0.128 | 0.757 |
| SEQ0434 | 0.381 | 0.7 |
| SEQ0440 | 0.15 | 0.714 |
| SEQ0441 | 0.122 | 0.243 |
| SEQ0467 | 0.201 | 0.7 |
| SEQ0474 | 0.252 | 0.757 |
| SEQ0479 | 0.073 | 0.214 |
| SEQ0482 | 0.231 | 0.714 |
| SEQ0490 | 0.13 | 0.714 |
| SEQ0493 | 0.142 | 0.714 |
| SEQ0494 | 0.095 | 0.743 |
| SEQ0501 | 0.093 | 0.271 |
| SEQ0502 | 0.178 | 0.7 |
| SEQ0510 | 0.108 | 0.3 |
| SEQ0515 | 0.085 | 0.229 |
| SEQ0534 | 0.43 | 0.743 |
| SEQ0536 | 0.074 | 0.743 |
| SEQ0538 | 0.259 | 0.7 |
| SEQ0540 | 0.038 | 0.2 |
| SEQ0542 | 0.021 | 0.857 |
| SEQ0547 | 0.12 | 0.729 |
| SEQ0549 | 0.104 | 0.743 |
| SEQ0550 | 0.137 | 0.743 |
| SEQ0552 | 0.151 | 0.743 |
| SEQ0571 | 0.415 | 0.271 |
| SEQ0574 | 0.168 | 0.3 |
| SEQ0581 | 0.081 | 0.729 |
| SEQ0596 | 0.208 | 0.229 |
| SEQ0598 | 0.352 | 0.3 |
| SEQ0603 | 0.238 | 0.286 |
| SEQ0615 | 0.231 | 0.257 |
| SEQ0617 | 0.174 | 0.714 |
| SEQ0620 | 0.06 | 0.257 |
| SEQ0635 | 0.089 | 0.214 |
| SEQ0636 | 0.148 | 0.743 |
| SEQ0659 | 0.005 | 0.914 |
| SEQ0677 | 0.081 | 0.757 |
| SEQ0698 | 0.048 | 0.771 |
| SEQ0702 | 0.074 | 0.757 |
| SEQ0707 | 0.092 | 0.757 |
| SEQ0709 | 0.137 | 0.286 |
| SEQ0716 | 0.017 | 0.186 |
| SEQ0724 | 0.048 | 0.814 |
| SEQ0731 | 0.108 | 0.2 |
| SEQ0748 | 0.11 | 0.286 |
| SEQ0750 | 0.009 | 0.143 |
| SEQ0751 | 0.102 | 0.2 |
| SEQ0766 | 0.16 | 0.714 |
| SEQ0772 | 0.134 | 0.286 |
| SEQ0779 | 0.716 | 0.714 |
| SEQ0805 | 0.504 | 0.714 |
| SEQ0806 | 0.16 | 0.3 |
| SEQ0833 | 0.067 | 0.214 |
| SEQ0839 | 0.178 | 0.714 |
| SEQ0851 | 0.103 | 0.743 |
| SEQ0852 | 0.122 | 0.243 |
| SEQ0862 | 0.023 | 0.843 |
| SEQ0864 | 0.174 | 0.257 |
| SEQ0866 | 0.095 | 0.7 |
| SEQ0874 | 0.152 | 0.7 |
| SEQ0877 | 0.05 | 0.757 |
| SEQ0892 | 0.061 | 0.171 |
| SEQ0897 | 0.074 | 0.257 |
| SEQ0906 | 0.157 | 0.243 |
| SEQ0907 | 0.227 | 0.7 |
| SEQ0933 | 0.122 | 0.229 |
| SEQ0937 | 0.023 | 0.843 |
| SEQ0939 | 0.177 | 0.714 |
| SEQ0940 | 0.105 | 0.743 |
| SEQ0946 | 0.083 | 0.743 |
| SEQ0956 | 0.07 | 0.786 |
| SEQ0958 | 0.066 | 0.771 |
| SEQ0966 | 0.031 | 0.786 |
| SEQ0986 | 0.029 | 0.814 |
| SEQ0993 | 0.102 | 0.729 |
| SEQ1007 | 0.138 | 0.286 |
| SEQ1016 | 0.064 | 0.229 |
| SEQ1025 | 0.023 | 0.214 |
| SEQ1028 | 0.042 | 0.729 |
| SEQ1034 | 0.077 | 0.714 |
| SEQ1036 | 0.052 | 0.186 |
| SEQ1053 | 0.044 | 0.229 |
| SEQ1055 | 0.127 | 0.729 |
| SEQ1056 | 0.151 | 0.7 |
| SEQ1057 | 0.191 | 0.257 |
| SEQ1080 | 0.139 | 0.743 |
| SEQ1086 | 0.045 | 0.786 |
| SEQ1088 | 0.075 | 0.771 |
| SEQ1089 | 0.184 | 0.786 |
| SEQ1093 | 0.129 | 0.271 |
| SEQ1099 | 0.169 | 0.3 |
| SEQ1106 | 0.199 | 0.7 |
| SEQ1109 | 0.141 | 0.771 |
| SEQ1111 | 0.48 | 0.3 |
| SEQ1115 | 0.347 | 0.743 |
| SEQ1116 | 0.1 | 0.771 |
| SEQ1121 | 0.268 | 0.3 |
| SEQ1129 | 0.108 | 0.257 |
| SEQ1136 | 0.069 | 0.214 |
| SEQ1146 | 0.139 | 0.286 |
| SEQ1164 | 0.136 | 0.271 |
| SEQ1182 | 0.126 | 0.743 |
| SEQ1184 | 0.015 | 0.814 |
| SEQ1189 | 0.097 | 0.757 |
| SEQ1192 | 0.115 | 0.3 |
| SEQ1204 | 0.19 | 0.7 |
| SEQ1207 | 0.016 | 0.829 |
| SEQ1213 | 0.008 | 0.086 |
| SEQ1222 | 0.068 | 0.214 |
| SEQ1237 | 0.059 | 0.186 |
| SEQ1241 | 0.22 | 0.3 |
| SEQ1242 | 0.347 | 0.257 |
| SEQ1268 | 0.06 | 0.757 |
| SEQ1270 | 0.121 | 0.257 |
| SEQ1273 | 0.147 | 0.257 |
| SEQ1291 | 0.067 | 0.257 |
| SEQ1300 | 0.097 | 0.8 |
| SEQ1304 | 0.216 | 0.714 |
| SEQ1310 | 0.022 | 0.157 |
| SEQ1321 | 0.081 | 0.257 |
| SEQ1328 | 0.129 | 0.3 |
| SEQ1336 | 0.047 | 0.743 |
| SEQ1343 | 0.132 | 0.714 |
| SEQ1345 | 0.188 | 0.286 |
| SEQ1350 | 0.118 | 0.3 |
| SEQ1354 | 0.181 | 0.714 |
| SEQ1369 | 0.141 | 0.271 |
| SEQ1378 | 0.28 | 0.286 |
| SEQ1379 | 0.181 | 0.743 |
| SEQ1381 | 0.757 | 0.286 |
| SEQ1384 | 0.095 | 0.271 |
| SEQ1398 | 0.468 | 0.3 |
| SEQ1403 | 0.096 | 0.757 |
| SEQ1406 | 0.108 | 0.271 |
| SEQ1409 | 0.218 | 0.229 |
| SEQ1411 | 0.091 | 0.757 |
| SEQ1426 | 0.165 | 0.714 |
| SEQ1433 | 0.006 | 0.129 |
| SEQ1439 | 0.056 | 0.229 |
| SEQ1440 | 0.198 | 0.3 |
| SEQ1445 | 0.229 | 0.7 |
| SEQ1458 | 0.149 | 0.771 |
| SEQ1474 | 0.092 | 0.257 |
| SEQ1478 | 0.27 | 0.3 |
| SEQ1490 | 0.223 | 0.3 |
| SEQ1491 | 0.195 | 0.3 |
| SEQ1493 | 0.042 | 0.2 |
| SEQ1495 | 0.185 | 0.3 |
| SEQ1504 | 0.211 | 0.271 |
| SEQ1508 | 0.115 | 0.157 |
| SEQ1515 | 0.251 | 0.257 |
| SEQ1516 | 0.21 | 0.729 |
| SEQ1536 | 0.066 | 0.229 |
| SEQ1537 | 0.127 | 0.7 |
| SEQ1539 | 0.168 | 0.729 |
| SEQ1548 | 0.183 | 0.3 |
| SEQ1558 | 0.079 | 0.229 |
| SEQ1570 | 0.014 | 0.171 |
| SEQ1573 | 0.107 | 0.271 |
| SEQ1576 | 0.044 | 0.786 |
| SEQ1587 | 0.009 | 0.9 |
| SEQ1591 | 0.192 | 0.714 |
| SEQ1592 | 0.24 | 0.743 |
| SEQ1593 | 0.032 | 0.814 |
| SEQ1594 | 0.147 | 0.286 |
| SEQ1599 | 0.101 | 0.729 |
| SEQ1609 | 0.059 | 0.186 |
| SEQ1623 | 0.153 | 0.271 |
| SEQ1638 | 0.1 | 0.3 |
| SEQ1647 | 0.181 | 0.7 |
| SEQ1649 | 0.054 | 0.229 |
| SEQ1656 | 0.102 | 0.271 |
| SEQ1660 | 0.067 | 0.786 |
| SEQ1671 | 0.421 | 0.257 |
| SEQ1678 | 0.148 | 0.286 |
| SEQ1691 | 0.223 | 0.7 |
| SEQ1692 | 0.207 | 0.7 |
| SEQ1708 | 0.298 | 0.3 |
| SEQ1722 | 0.078 | 0.771 |
| SEQ1744 | 0.204 | 0.271 |
| SEQ1754 | 0.13 | 0.714 |
| SEQ1755 | 0.16 | 0.729 |
| SEQ1758 | 0.103 | 0.757 |
| SEQ1771 | 0.057 | 0.2 |
| SEQ1777 | 0.016 | 0.871 |
| SEQ1788 | 0.093 | 0.729 |
| SEQ1815 | 0.108 | 0.743 |
| SEQ1833 | 0.122 | 0.229 |
| SEQ1834 | 0.182 | 0.729 |
| SEQ1842 | 0.099 | 0.743 |
| SEQ1852 | 0.003 | 0.914 |
| SEQ1854 | 0.032 | 0.857 |
| SEQ1882 | 0.06 | 0.143 |
| SEQ1887 | 0.567 | 0.3 |
| SEQ1888 | 0.184 | 0.729 |
| SEQ1903 | 0.126 | 0.186 |
| SEQ1913 | 0.165 | 0.286 |
| SEQ1944 | 0.039 | 0.786 |
| SEQ1947 | 0.1 | 0.757 |
| SEQ1951 | 0.196 | 0.243 |
| SEQ1962 | 0.071 | 0.229 |
| SEQ1972 | 0.129 | 0.757 |
| SEQ1976 | 0.193 | 0.7 |
| SEQ1995 | 0.174 | 0.743 |
| SEQ2003 | 0.106 | 0.729 |
| SEQ2021 | 0.06 | 0.214 |
| SEQ2024 | 0.097 | 0.729 |
| SEQ2031 | 0.032 | 0.186 |
| SEQ2068 | 0.147 | 0.3 |
| SEQ2079 | 0.261 | 0.3 |
| SEQ2082 | 0.052 | 0.771 |
| SEQ2085 | 0.141 | 0.743 |
| SEQ2086 | 0.101 | 0.286 |
| SEQ2109 | 0.12 | 0.271 |
| SEQ2113 | 0.125 | 0.2 |
| SEQ2114 | 0.057 | 0.743 |
| SEQ2131 | 0.005 | 0.1 |
| SEQ2138 | 0.209 | 0.3 |
| SEQ2157 | 0.043 | 0.743 |
| SEQ2159 | 0.228 | 0.7 |
| SEQ2171 | 0.2 | 0.7 |
| SEQ2176 | 0.036 | 0.771 |
| SEQ2177 | 0.335 | 0.714 |
| SEQ2192 | 0.285 | 0.729 |
| SEQ2202 | 0.173 | 0.3 |
| SEQ2204 | 0.122 | 0.243 |
| SEQ2205 | 0.154 | 0.743 |
| SEQ2217 | 0.195 | 0.286 |
| SEQ2226 | 0.12 | 0.729 |
| SEQ2227 | 0.024 | 0.157 |
| SEQ2234 | 0.16 | 0.257 |
| SEQ2235 | 0.065 | 0.214 |
| SEQ2244 | 0.63 | 0.7 |
| SEQ2252 | 0.006 | 0.9 |
| SEQ2264 | 0.206 | 0.3 |
| SEQ2268 | 0.013 | 0.086 |
| SEQ2270 | 0.146 | 0.257 |
| SEQ2273 | 0.026 | 0.857 |
| SEQ2279 | 0.121 | 0.3 |
| SEQ2281 | 0.108 | 0.714 |
| SEQ2289 | 0.145 | 0.7 |
| SEQ2294 | 0.082 | 0.729 |
| SEQ2297 | 0.619 | 0.714 |
| SEQ2305 | 0.082 | 0.757 |
| SEQ2309 | 0.117 | 0.757 |
| SEQ2318 | 0.066 | 0.714 |
| SEQ2319 | 0.264 | 0.3 |
| SEQ2321 | 0.021 | 0.771 |
| SEQ2326 | 0.126 | 0.743 |
| SEQ2334 | 0.285 | 0.257 |
| SEQ2336 | 0.085 | 0.757 |
| SEQ2339 | 0.15 | 0.729 |
| SEQ2347 | 0.043 | 0.743 |
| SEQ2355 | 0.207 | 0.3 |
| SEQ2375 | 0.349 | 0.3 |
| SEQ2379 | 0.036 | 0.857 |
| SEQ2382 | 0.072 | 0.229 |
| SEQ2386 | 0.172 | 0.257 |
| SEQ2388 | 0.289 | 0.271 |
| SEQ2389 | 0.015 | 0.171 |
| SEQ2392 | 0.189 | 0.243 |
| SEQ2393 | 0.124 | 0.257 |
| SEQ2395 | 0.068 | 0.714 |
| SEQ2402 | 0.438 | 0.714 |
| SEQ2405 | 0.001 | 0.929 |
| SEQ2406 | 0.049 | 0.186 |
| SEQ2408 | 0.22 | 0.257 |
| SEQ2409 | 0.045 | 0.829 |
| SEQ2410 | 0.102 | 0.257 |
| SEQ2420 | 0.08 | 0.743 |
| SEQ2427 | 0.038 | 0.8 |
| SEQ2429 | 0.082 | 0.186 |
| SEQ2433 | 0.105 | 0.257 |
| SEQ2437 | 0.058 | 0.757 |
| SEQ2440 | 0.157 | 0.257 |
| SEQ2450 | 0.101 | 0.229 |
| SEQ2454 | 0.058 | 0.771 |
| SEQ2459 | 0.03 | 0.8 |
| SEQ2472 | 0.2 | 0.271 |
| SEQ2475 | 0.303 | 0.286 |
| SEQ2487 | 0.115 | 0.786 |
| SEQ2492 | 0.147 | 0.3 |
| SEQ2497 | 0.149 | 0.729 |
| SEQ2501 | 0.138 | 0.743 |
| SEQ2503 | 0.122 | 0.7 |
| SEQ2511 | 0.314 | 0.286 |
| SEQ2513 | 0.048 | 0.857 |
| SEQ2518 | 0.075 | 0.243 |
| SEQ2521 | 0.153 | 0.286 |
| SEQ2529 | 0.099 | 0.271 |
| SEQ2532 | 0.164 | 0.714 |
| SEQ2533 | 0.02 | 0.157 |
| SEQ2552 | 0.107 | 0.214 |
| SEQ2555 | 0.504 | 0.3 |
| SEQ2561 | 0.214 | 0.3 |
| SEQ2576 | 0.01 | 0.114 |
| SEQ2599 | 0.18 | 0.271 |
| SEQ2602 | 0.048 | 0.229 |
| SEQ2606 | 0.021 | 0.857 |
| SEQ2632 | 0.186 | 0.257 |
| SEQ2637 | 0.007 | 0.857 |
| SEQ2647 | 0.171 | 0.286 |
| SEQ2648 | 0.161 | 0.257 |
| SEQ2660 | 0.111 | 0.286 |
| SEQ2675 | 0.306 | 0.286 |
| SEQ2676 | 0.101 | 0.7 |
| SEQ2690 | 0.231 | 0.271 |
| SEQ2692 | 0.153 | 0.271 |
| SEQ2695 | 0.105 | 0.743 |
| SEQ2696 | 0.33 | 0.3 |
| SEQ2701 | 0.111 | 0.3 |
| SEQ2706 | 0.136 | 0.286 |
| SEQ2712 | 0.213 | 0.286 |
| SEQ2726 | 0.051 | 0.229 |
| SEQ2727 | 0.399 | 0.3 |
| SEQ2729 | 0.129 | 0.243 |
| SEQ2735 | 0.241 | 0.729 |
| SEQ2740 | 0.19 | 0.271 |
| SEQ2741 | 0.714 | 0.3 |
| SEQ2745 | 0.086 | 0.729 |
| SEQ2751 | 0.102 | 0.2 |
| SEQ2760 | 0.017 | 0.186 |
| SEQ2765 | 0.208 | 0.7 |
| SEQ2768 | 0.333 | 0.714 |
| SEQ2777 | 0.066 | 0.243 |
| SEQ2785 | 0.029 | 0.2 |
| SEQ2788 | 0.161 | 0.257 |
| SEQ2795 | 0.201 | 0.3 |
| SEQ2796 | 0.276 | 0.7 |
| SEQ2805 | 0.054 | 0.243 |
| SEQ2815 | 0.196 | 0.3 |
| SEQ2827 | 0.061 | 0.771 |
| SEQ2829 | 0.076 | 0.814 |
| SEQ2834 | 0.216 | 0.257 |
| SEQ2852 | 0.145 | 0.286 |
| SEQ2857 | 0.034 | 0.843 |
| SEQ2859 | 0.111 | 0.3 |
| SEQ2860 | 0.075 | 0.214 |
| SEQ2891 | 0.18 | 0.286 |
| SEQ2916 | 0.101 | 0.257 |
| SEQ2920 | 0.084 | 0.229 |
| SEQ2922 | 0.126 | 0.186 |
| SEQ2924 | 0.034 | 0.829 |
| SEQ2928 | 0.268 | 0.7 |
| SEQ2930 | 0.247 | 0.257 |
| SEQ2933 | 0.081 | 0.229 |
| SEQ2956 | 0.113 | 0.271 |
| SEQ2957 | 0.091 | 0.286 |
| SEQ2959 | 0.885 | 0.7 |
| SEQ2961 | 0.014 | 0.186 |
| SEQ2963 | 0.128 | 0.714 |
| SEQ2967 | 0.134 | 0.257 |
| SEQ2972 | 0.378 | 0.743 |
| SEQ2974 | 0.169 | 0.743 |
| SEQ2977 | 0.043 | 0.129 |
| SEQ2978 | 0.261 | 0.271 |
| SEQ2986 | 0.062 | 0.229 |
| SEQ2988 | 0.141 | 0.257 |
| SEQ2993 | 0.026 | 0.171 |
| SEQ2995 | 0.152 | 0.286 |
| SEQ2996 | 0.197 | 0.3 |
| SEQ2997 | 0.054 | 0.243 |
| SEQ2998 | 0.089 | 0.243 |
| SEQ3009 | 0.224 | 0.3 |
| SEQ3017 | 0.168 | 0.271 |
| SEQ3027 | 0.389 | 0.3 |
| SEQ3030 | 0.165 | 0.271 |
| SEQ3040 | 0.036 | 0.8 |
| SEQ3042 | 0.214 | 0.186 |
| SEQ3054 | 0.188 | 0.243 |
| SEQ3058 | 0.091 | 0.757 |
| SEQ3064 | 0.171 | 0.714 |
| SEQ3067 | 0.148 | 0.286 |
| SEQ3069 | 0.291 | 0.3 |
| SEQ3077 | 0.212 | 0.3 |
| SEQ3078 | 0.057 | 0.786 |
| SEQ3079 | 0.031 | 0.186 |
| SEQ3083 | 0.171 | 0.286 |
| SEQ3092 | 0.283 | 0.243 |
| SEQ3102 | 0.209 | 0.3 |
| SEQ3111 | 0.303 | 0.286 |
| SEQ3119 | 0.042 | 0.229 |
| SEQ3124 | 0.04 | 0.829 |
| SEQ3126 | 0.158 | 0.714 |
| SEQ3129 | 0.152 | 0.271 |
| SEQ3140 | 0.185 | 0.271 |
| SEQ3141 | 0.036 | 0.214 |
| SEQ3142 | 0.015 | 0.157 |
| SEQ3144 | 0.145 | 0.243 |
| SEQ3147 | 0.037 | 0.171 |
| SEQ3148 | 0.19 | 0.714 |
| SEQ3154 | 0.302 | 0.714 |
| SEQ3156 | 0.09 | 0.257 |
| SEQ3157 | 0.092 | 0.243 |
| SEQ3169 | 0.005 | 0.914 |
| SEQ3170 | 0.428 | 0.286 |
| SEQ3176 | 0.032 | 0.771 |
| SEQ3178 | 0.017 | 0.2 |
| SEQ3179 | 0.235 | 0.3 |
| SEQ3182 | 0.064 | 0.786 |
| SEQ3183 | 0.059 | 0.743 |
| SEQ3186 | 0.092 | 0.2 |
| SEQ3207 | 0.123 | 0.257 |
| SEQ3208 | 0.138 | 0.3 |
| SEQ3209 | 0.11 | 0.257 |
| SEQ3210 | 0.055 | 0.757 |
| SEQ3213 | 0.052 | 0.157 |
| SEQ3221 | 0.207 | 0.3 |
| SEQ3222 | 0.092 | 0.229 |
| SEQ3228 | 0.265 | 0.3 |

[0230] Correlation Between LncRNA and Left Ventricular Ejection Fraction

[0231] LncRNAs expression level can be considered as a continuous value. Spearman correlation factor is calculated to measure the correlation between LVEF value at one month and expression level. When a threshold of (+ or −) 0.45 for correlation factor is applied, the expression of 159 lncRNAs is positively or negatively correlated with prediction of LVEF at 1 month. Among these 159 lncRNAs, 94 have a positive correlation factor whereas 65 have a negative correlation factor (Table 22).

TABLE 22
List of 159 IncRNAs with spearman correlation
factor higher than 0.45 (absolute value)

| LncRNA | correlation |
|---|---|
| SEQ0002 | −0.522 |
| SEQ0005 | −0.477 |
| SEQ0008 | 0.565 |
| SEQ0068 | 0.461 |
| SEQ0104 | 0.454 |
| SEQ0108 | −0.581 |
| SEQ0111 | 0.67 |
| SEQ0134 | 0.729 |
| SEQ0139 | −0.489 |
| SEQ0155 | −0.511 |
| SEQ0168 | 0.522 |
| SEQ0210 | −0.458 |
| SEQ0219 | −0.476 |
| SEQ0246 | 0.523 |
| SEQ0292 | 0.585 |
| SEQ0343 | −0.47 |
| SEQ0394 | 0.497 |
| SEQ0443 | −0.573 |
| SEQ0462 | 0.452 |
| SEQ0487 | 0.456 |
| SEQ0510 | 0.504 |
| SEQ0536 | −0.481 |
| SEQ0596 | 0.544 |
| SEQ0624 | 0.493 |
| SEQ0635 | 0.503 |
| SEQ0639 | 0.482 |
| SEQ0659 | −0.486 |
| SEQ0677 | −0.519 |
| SEQ0681 | −0.547 |
| SEQ0698 | −0.666 |
| SEQ0701 | 0.455 |
| SEQ0716 | 0.529 |
| SEQ0731 | 0.518 |
| SEQ0766 | −0.476 |
| SEQ0772 | 0.524 |
| SEQ0833 | 0.471 |
| SEQ0841 | −0.527 |
| SEQ0884 | 0.472 |
| SEQ0914 | 0.454 |
| SEQ0946 | −0.451 |
| SEQ0958 | −0.482 |
| SEQ0966 | −0.545 |
| SEQ0980 | 0.456 |
| SEQ0986 | −0.651 |
| SEQ1055 | −0.455 |
| SEQ1057 | 0.585 |
| SEQ1065 | 0.667 |
| SEQ1075 | 0.474 |
| SEQ1093 | 0.461 |
| SEQ1207 | −0.591 |
| SEQ1208 | 0.543 |
| SEQ1213 | 0.541 |
| SEQ1222 | 0.466 |
| SEQ1270 | 0.516 |
| SEQ1299 | −0.479 |
| SEQ1343 | −0.593 |
| SEQ1354 | −0.47 |
| SEQ1403 | −0.463 |
| SEQ1412 | −0.524 |
| SEQ1433 | 0.564 |
| SEQ1440 | 0.575 |
| SEQ1465 | 0.632 |
| SEQ1477 | 0.553 |
| SEQ1508 | 0.667 |
| SEQ1558 | 0.57 |
| SEQ1560 | 0.567 |
| SEQ1573 | 0.525 |
| SEQ1587 | −0.465 |
| SEQ1594 | 0.499 |
| SEQ1598 | −0.496 |
| SEQ1660 | −0.47 |
| SEQ1678 | 0.507 |
| SEQ1682 | 0.451 |
| SEQ1687 | −0.49 |
| SEQ1698 | −0.53 |
| SEQ1723 | −0.581 |
| SEQ1740 | −0.533 |
| SEQ1794 | 0.517 |
| SEQ1852 | −0.541 |
| SEQ1854 | −0.534 |
| SEQ1899 | 0.564 |
| SEQ1935 | 0.55 |
| SEQ1962 | 0.473 |
| SEQ2021 | 0.49 |
| SEQ2031 | 0.475 |
| SEQ2062 | 0.546 |
| SEQ2082 | −0.542 |
| SEQ2094 | 0.648 |
| SEQ2161 | 0.565 |
| SEQ2176 | −0.686 |
| SEQ2177 | −0.467 |
| SEQ2192 | −0.554 |
| SEQ2204 | 0.461 |
| SEQ2205 | −0.566 |
| SEQ2225 | 0.569 |
| SEQ2227 | 0.573 |
| SEQ2230 | 0.569 |
| SEQ2263 | 0.532 |
| SEQ2303 | 0.618 |
| SEQ2309 | −0.527 |
| SEQ2326 | −0.481 |
| SEQ2346 | −0.533 |
| SEQ2390 | 0.521 |
| SEQ2392 | 0.567 |
| SEQ2405 | −0.499 |
| SEQ2406 | 0.617 |
| SEQ2444 | 0.472 |
| SEQ2450 | 0.451 |
| SEQ2459 | −0.656 |
| SEQ2487 | −0.497 |
| SEQ2492 | 0.557 |
| SEQ2497 | −0.496 |
| SEQ2513 | −0.525 |
| SEQ2542 | −0.536 |
| SEQ2576 | 0.542 |
| SEQ2586 | 0.524 |
| SEQ2611 | 0.452 |
| SEQ2636 | 0.493 |
| SEQ2642 | 0.514 |
| SEQ2645 | 0.471 |
| SEQ2647 | 0.452 |
| SEQ2660 | 0.483 |
| SEQ2692 | 0.603 |
| SEQ2740 | 0.52 |
| SEQ2742 | −0.475 |
| SEQ2745 | −0.531 |
| SEQ2767 | −0.484 |
| SEQ2785 | 0.457 |
| SEQ2827 | −0.493 |
| SEQ2843 | 0.473 |
| SEQ2857 | −0.459 |
| SEQ2860 | 0.572 |
| SEQ2865 | −0.517 |
| SEQ2886 | −0.493 |
| SEQ2920 | 0.453 |
| SEQ2961 | 0.467 |
| SEQ2974 | −0.575 |
| SEQ2978 | 0.555 |
| SEQ2993 | 0.453 |
| SEQ3006 | −0.476 |
| SEQ3029 | 0.606 |
| SEQ3046 | −0.483 |
| SEQ3058 | −0.474 |
| SEQ3079 | 0.487 |
| SEQ3086 | 0.468 |
| SEQ3108 | 0.576 |
| SEQ3124 | −0.487 |
| SEQ3128 | 0.577 |
| SEQ3141 | 0.527 |
| SEQ3142 | 0.604 |
| SEQ3156 | 0.517 |
| SEQ3169 | −0.675 |
| SEQ3176 | −0.457 |
| SEQ3178 | 0.46 |
| SEQ3183 | −0.582 |
| SEQ3200 | 0.543 |
| SEQ3207 | 0.451 |
| SEQ3209 | 0.533 |
| SEQ3213 | 0.665 |

[0232] Comparison of the Total RNA-Seq and FiMICS Analysis

[0233] Detection level and performance of the lncRNAs can vary in function of the method and number of samples used. FIG. 6 represent the Venn diagram for each analysis using a threshold of LVEF at 40% and 45% for total RNA-Sequencing and FiMICS test. For the comparison of the 4 conditions, 8 lncRNAs are common to all conditions (SEQ1204, SEQ2454, SEQ0334, SEQ1403, SEQ1089, SEQ2692, SEQ2273, and SEQ0502).

[0234] An example of probes sequences designed on FiMICS for the first lncRNA (SEQ1204) includes the below sequences;

| FIMICS Probe sequence | lncRNA |
|---|---|
| GTTCTACTCAAAGGGTCAGTTTAGGGCATAATTAAAGTCAATTACTTT | SEQ1204 |
| CTGAAAGGCCATCAGGACAACTGTTAGAGAAAATGATAGCAGCCCCG | |
| CACTTGCTGTAGGAATTATTAGCTT | |
| CAGGACAACTGTTAGAGAAAATGATAGCAGCCCCGCACTTGCTGTAG | SEQ1204 |
| GAATTATTAGCTTGTCAGCCTCCAGGCTTATGGAGACAAAGGATCAAA | |
| AAGTTAGAGAGATCCAGGTGTTCAC | |
| GTCAGCCTCCAGGCTTATGGAGACAAAGGATCAAAAAGTTAGAGAGA | SEQ1204 |
| TCCAGGTGTTCACCTATTTGTTCACTAATTCTTTTATTGTGAGTGTGCA | |
| TGTGTGTGGGTGGGTGTGACATTT | |
| CTATTTGTTCACTAATTCTTTTATTGTGAGTGTGCATGTGTGTGGGTGG | SEQ1204 |
| GTGTGACATTTATTATGAACCAGAGGGCAGGAGCCAGTGACACAGTG | |
| GTGCAGAGAATAATCATATTCCCT | |
| ATTATGAACCAGAGGGCAGGAGCCAGTGACACAGTGGTGCAGAGAAT | SEQ1204 |
| AATCATATTCCCTGCCTTCCTGGGGTCATACAGCTTGGTGGAGGACAC | |
| AGATGTGAATTCGGTAATCACTCCA | |
| GCCTTCCTGGGGTCATACAGCTTGGTGGAGGACACAGATGTGAATTCG | SEQ1204 |
| GTAATCACTCCAATAAATATTCTCCTACAGATGAAGAAAGATGATACG | |
| ATGTGATGGACAACAGAGACTTAT | |
| ATAAATATTCTCCTACAGATGAAGAAAGATGATACGATGTGATGGAC | SEQ1204 |
| AACAGAGACTTATATGGTGGGGTCTGGGCTGGTCTTTCTGAAGCTAAG | |
| ACTGGCAGGATGAGCAGGAGTTTGC | |
| ATGGTGGGGTCTGGGCTGGTCTTTCTGAAGCTAAGACTGGCAGGATGA | SEQ1204 |
| GCAGGAGTTTGCCAGACAAAGAGGAGTGGAGTTGTTTTCCAAACACA | |
| TCTCAGCACAAAGTGTTGTCTTTGC | |
| CAGACAAAGAGGAGTGGAGTTGTTTTCCAAACACATCTCAGCACAAA | SEQ1204 |
| GTGTTGTCTTTGCTGGGAGCTGAAAAAAGATAGTGTGGGCAGAGACC | |
| ATTAGGTGAGACGCTTGATATGAGAT | |
| TGGGAGCTGAAAAAAGATAGTGTGGGCAGAGACCATTAGGTGAGACG | SEQ1204 |
| CTTGATATGAGATACAACCTCAACAGGTGGAAGAAGATCATGAGAGA | |
| TGAAGAGAGGAATATAGTACAGCAGA | |
| ACAACCTCAACAGGTGGAAGAAGATCATGAGAGATGAAGAGAGGAA | SEQ1204 |
| TATAGTACAGCAGAGAGGACACAGAAGCTGACGTCAGGGTGTCTCAG | |
| TTTGAAACCAGTGGCCACCCTGTTCCT | |
| GAGGACACAGAAGCTGACGTCAGGGTGTCTCAGTTTGAAACCAGTGG | SEQ1204 |
| CCACCCTGTTCCTCTCCCATGTGGTCCCATCATGGGCCTCTAGGGTCTG | |
| GGATAAGAGGTTAATGAATATCTC | |
| CTCCCATGTGGTCCCATCATGGGCCTCTAGGGTCTGGGATAAGAGGTT | SEQ1204 |
| AATGAATATCTCATACCCTAAGCAGGGGTGGTCCCTGCACTTTAGCAA | |
| AAAGTTAAGGAACTAGGGAAAAGA | |
| ATACCCTAAGCAGGGGTGGTCCCTGCACTTTAGCAAAAAGTTAAGGA | SEQ1204 |
| ACTAGGGAAAAGAGATGGAAATAATAAAGAGATGGGACAAAGACTTT | |
| GAAGACCAAAGCCCCTGGGCTATTCT | |
| GATGGAAATAATAAAGAGATGGGACAAAGACTTTGAAGACCAAAGCC | SEQ1204 |
| CCTGGGCTATTCTCTTTTTTAAATTTTTTTATTTAAATTTTCATTTATTT | |
| TTATCAAGATAGGGTCTCACTAT | |
| CTTTTTTAAATTTTTTTATTTAAATTTTCATTTATTTTTATCAAGATAGG | SEQ1204 |
| GTCTCACTATGTTGCCCAGGTTGGTCTCAAACTTTTGGCCTAAAGCAA | |
| TCCTCCCACCTTGGCCTCCCAA | |
| GTTGCCCAGGTTGGTCTCAAACTTTTGGCCTAAAGCAATCCTCCCACC | SEQ1204 |
| TTGGCCTCCCAATGTGCTGGGATTACAATGTGAGCCACCACGTCCAGC | |
| CTCCTGGGATATTTCTCAATGAAA | |
| TGTGCTGGGATTACAATGTGAGCCACCACGTCCAGCCTCCTGGGATAT | SEQ1204 |
| TTCTCAATGAAACATTGGATGCCAAGATTGGTTTTGTGCCACATGCCA | |
| ATTTCACAGAAGCCAGTCTATGAG | |
| CATTGGATGCCAAGATTGGTTTTGTGCCACATGCCAATTTCACAGAAG | SEQ1204 |
| CCAGTCTATGAGCCACCAGCTCTACTCAGCAATTACAGTTTCTGGAAC | |
| TTTGGCTAAATTCCTGTAGATGCA | |
| CCACCAGCTCTACTCAGCAATTACAGTTTCTGGAACTTTGGCTAAATT | SEQ1204 |
| CCTGTAGATGCACCACTGCTTGTGGCCTGACTCTTTGCCACCCAAGTG | |
| CGCTCAGCCTCCCCTGGGGAGTCT | |
| CCACTGCTTGTGGCCTGACTCTTTGCCACCCAAGTGCGCTCAGCCTCCC | SEQ1204 |
| CTGGGGAGTCTGCCAGGCTTGCATGGCTCCCACTGCACTTGCTGTGCT | |
| GGGACCGAAAACAGTTTTTGTGC | |
| GCCAGGCTTGCATGGCTCCCACTGCACTTGCTGTGCTGGGACCGAAAA | SEQ1204 |
| CAGTTTTTGTGCCCCTAGCTTAACTCCACTGGATTCATAGAGGCTTTGG | |
| CCTCCTCAATGGCTGTCCTGGGA | |
| CCCTAGCTTAACTCCACTGGATTCATAGAGGCTTTGGCCTCCTCAATG | SEQ1204 |
| GCTGTCCTGGGACAGGGAGGCTGGTTAGCACAATTAACACAACCTGG | |
| TCATGCAAGGCATTGATGGTCCGTA | |
| CAGGGAGGCTGGTTAGCACAATTAACACAACCTGGTCATGCAAGGCA | SEQ1204 |
| TTGATGGTCCGTAACATGAACTTTGACCAGTAGGAGACAGAGAATGG | |
| AAAAAAGCCAGCAGATAAATCATCTG | |
| ACATGAACTTTGACCAGTAGGAGACAGAGAATGGAAAAAAGCCAGCA | SEQ1204 |
| GATAAATCATCTGGCCTTCCTCCCCTATGACAGACTGTTCTGAGCCAC | |
| AGTGTTTCACATGTCTTCCTGGAGA | |
| GCCTTCCTCCCCTATGACAGACTGTTCTGAGCCACAGTGTTTCACATGT | SEQ1204 |
| CTTCCTGGAGATGTCCCACATGACTTGAGCAACCAGCTGGAGCTCTGG | |
| AGAAACTGTGGCCATCCTGGTAA | |
| TGTCCCACATGACTTGAGCAACCAGCTGGAGCTCTGGAGAAACTGTGG | SEQ1204 |
| CCATCCTGGTAACATATGACCTTGTATTTGCTTTCTCTCCTTCCTGCTTT | |
| ATTTCCCTATGTCCCTTACTTT | |
| CTGTGGCCATCCTGGTAACATATGACCTTGTATTTGCTTTCTCTCCTTC | SEQ1204 |
| CTGCTTTATTTCCCTATGTCCCTTACTTTGGTTGTTGGGATTGCACCTCC | |
| CAATAAAGCATTAGCATGTCC | |

### Example 5

### LncRNA Detection in PAXgene Samples Using a mRNA-seq Protocol

[0235] Material and Methods:

[0236] Paxgene samples collected at discharge of patient between D3 and D5 from 57 patients with AMI from the MitoCare cohort are used for lncRNA profiling. Mitocare is a multicenter, randomized, double-blind, placebo controlled study. The study population includes AMI patients undergoing PCI, older than 18 years. The primary endpoint is the level of left ventricular ejection fraction (LVEF) less than 40% at 1 month. Demographics data are presented in Table 23.

TABLE 23
Demographic data of patients used from Mitocare study

| | Group 1 | Group 2 | Group 3 |
|---|---|---|---|
| EF | <40 | 41-50 | >50 |
| Nb | 8 | 20 | 29 |
| Age | 68.9 | 60.5 | 60.0 |
| Male | 88% | 95% | 81% |
| BMI | 27.0 | 28.1 | 26.6 |
| Systolic Blood | 103.0 | 119.4 | 116.9 |
| Pressure | | | |
| Diastolic Blood | 66.0 | 71.9 | 69.6 |
| Pressure | | | |
| Heart Rate | 82.3 | 72.9 | 66.9 |

[0237] RNA extraction, preparation of sequencing libraires and sequencing are performed as described in Example 3.

[0238] Results:

[0239] Comparison Between low LVEF (LVEF≤40) and High LVEF (LVEF>40)

[0240] In this analysis, the 57 samples AMI were grouped into 2 groups using the threshold of 40% LVEF: low LVEF (LVEF≤40) and high LVEF (LVEF>40). The volcano plot showed the differential expression of lncRNA. 102 lncRNA are differentially expressed and among them, 19 lncRNA have a fold change>2 or <0.5, which are shown in Table 24. 171 lncRNAs with P<0.05 and/or individual AUC>0.7 or <0.3 are listed in Table 25.

TABLE 24
List of 19 lncRNAs which are differentially expressed
with a fold change > 2 or <0.5 between the low
LVEF group (LVEF ≤ 40) and the high LVEF group (LVEF > 40)

| lncRNA | P-value | Fold change | Individual AUC |
|---|---|---|---|
| SEQ0822 | 0.0003 | 0.119 | 0.717 |
| SEQ1170 | 0.0012 | 0.446 | 0.744 |
| SEQ1755 | 0.0014 | 0.434 | 0.75 |
| SEQ0058 | 0.0024 | 0.244 | 0.709 |
| SEQ2007 | 0.0027 | 0.289 | 0.744 |
| SEQ0430 | 0.0039 | 0.394 | 0.717 |
| SEQ0110 | 0.0053 | 0.33 | 0.745 |
| SEQ1331 | 0.0071 | 0.202 | 0.712 |
| SEQ0388 | 0.0104 | 0.294 | 0.699 |
| SEQ0585 | 0.0156 | 2.091 | 0.194 |
| SEQ0117 | 0.0174 | 0.356 | 0.673 |
| SEQ0415 | 0.0204 | 0.407 | 0.653 |
| SEQ1263 | 0.0223 | 0.471 | 0.672 |
| SEQ0383 | 0.0269 | 0.38 | 0.708 |
| SEQ0187 | 0.0281 | 0.436 | 0.741 |
| SEQ0611 | 0.0310 | 0.355 | 0.656 |
| SEQ2446 | 0.0364 | 0.363 | 0.663 |
| SEQ0548 | 0.0389 | 0.488 | 0.592 |
| SEQ0074 | 0.0461 | 12.549 | 0.221 |

TABLE 25
List of 171 IncRNA, which are differentially expressed
and/or have an AUC >0.7 or <0.3 between the low
LVEF group (LVEF ≤ 40) and the high LVEF group (LVEF > 40)

| IncRNA | P-value | AUC |
|---|---|---|
| SEQ0007 | 0.0583 | 0.268 |
| SEQ0016 | 0.0542 | 0.263 |
| SEQ0058 | 0.0024 | 0.709 |
| SEQ0069 | 0.0124 | 0.196 |
| SEQ0074 | 0.0461 | 0.221 |
| SEQ0110 | 0.0053 | 0.745 |
| SEQ0113 | 0.0656 | 0.26 |
| SEQ0114 | 0.0453 | 0.661 |
| SEQ0117 | 0.0174 | 0.673 |
| SEQ0163 | 0.0042 | 0.158 |
| SEQ0169 | 0.0956 | 0.296 |
| SEQ0187 | 0.0281 | 0.741 |
| SEQ0211 | 0.107 | 0.276 |
| SEQ0240 | 0.0145 | 0.293 |
| SEQ0244 | 0.0702 | 0.291 |
| SEQ0246 | 0.1547 | 0.758 |
| SEQ0265 | 0.2273 | 0.763 |
| SEQ0321 | 0.0044 | 0.727 |
| SEQ0329 | 0.0702 | 0.26 |
| SEQ0334 | 0.3913 | 0.782 |
| SEQ0336 | 0.1104 | 0.276 |
| SEQ0348 | 0.0269 | 0.314 |
| SEQ0359 | 0.0171 | 0.237 |
| SEQ0360 | 0.0816 | 0.263 |
| SEQ0367 | 0.0418 | 0.666 |
| SEQ0383 | 0.0269 | 0.708 |
| SEQ0388 | 0.0104 | 0.699 |
| SEQ0409 | 0.0056 | 0.73 |
| SEQ0415 | 0.0204 | 0.653 |
| SEQ0430 | 0.0039 | 0.717 |
| SEQ0435 | 0.0126 | 0.214 |
| SEQ0459 | 0.093 | 0.733 |
| SEQ0460 | 0.0418 | 0.676 |
| SEQ0477 | 0.0012 | 0.156 |
| SEQ0493 | 0.0178 | 0.722 |
| SEQ0534 | 0.0453 | 0.656 |
| SEQ0548 | 0.0389 | 0.592 |
| SEQ0559 | 0.0698 | 0.273 |
| SEQ0566 | 0.0805 | 0.263 |
| SEQ0585 | 0.0156 | 0.194 |
| SEQ0598 | 0.0505 | 0.263 |
| SEQ0608 | 0.0648 | 0.714 |
| SEQ0611 | 0.031 | 0.656 |
| SEQ0690 | 0.0004 | 0.23 |
| SEQ0720 | 0.1176 | 0.73 |
| SEQ0749 | 0.0645 | 0.263 |
| SEQ0756 | 0.0586 | 0.273 |
| SEQ0784 | 0.1568 | 0.283 |
| SEQ0802 | 0.0345 | 0.745 |
| SEQ0803 | 0.0922 | 0.288 |
| SEQ0807 | 0.0841 | 0.281 |
| SEQ0816 | 0.0431 | 0.633 |
| SEQ0822 | 0.0003 | 0.717 |
| SEQ0845 | 0.0437 | 0.671 |
| SEQ0914 | 0.0473 | 0.635 |
| SEQ0957 | 0.0172 | 0.783 |
| SEQ0968 | 0.0541 | 0.27 |
| SEQ0982 | 0.0477 | 0.607 |
| SEQ0997 | 0.0532 | 0.199 |
| SEQ1023 | 0.0664 | 0.263 |
| SEQ1025 | 0.028 | 0.204 |
| SEQ1036 | 0.0415 | 0.281 |
| SEQ1047 | 0.0529 | 0.702 |
| SEQ1065 | 0.008 | 0.255 |
| SEQ1066 | 0.0476 | 0.27 |
| SEQ1110 | 0.0596 | 0.263 |
| SEQ1116 | 0.0118 | 0.23 |
| SEQ1151 | 0.0542 | 0.255 |
| SEQ1170 | 0.0012 | 0.744 |
| SEQ1209 | 0.0023 | 0.184 |
| SEQ1211 | 0.0298 | 0.758 |
| SEQ1252 | 0.0275 | 0.222 |
| SEQ1263 | 0.0223 | 0.672 |
| SEQ1265 | 0.1112 | 0.291 |
| SEQ1285 | 0.0491 | 0.626 |
| SEQ1290 | 0.0851 | 0.288 |
| SEQ1300 | 0.0452 | 0.625 |
| SEQ1319 | 0.0549 | 0.273 |
| SEQ1325 | 0.0718 | 0.288 |
| SEQ1331 | 0.0071 | 0.712 |
| SEQ1386 | 0.0312 | 0.676 |
| SEQ1406 | 0.0161 | 0.689 |
| SEQ1421 | 0.1131 | 0.264 |
| SEQ1451 | 0.0196 | 0.709 |
| SEQ1458 | 0.0329 | 0.635 |
| SEQ1460 | 0.1292 | 0.298 |
| SEQ1483 | 0.0008 | 0.176 |
| SEQ1507 | 0.0098 | 0.293 |
| SEQ1510 | 0.0003 | 0.765 |
| SEQ1511 | 0.0166 | 0.212 |
| SEQ1519 | 0.0066 | 0.681 |
| SEQ1531 | 0.0143 | 0.694 |
| SEQ1533 | 0.0079 | 0.699 |
| SEQ1536 | 0.011 | 0.196 |
| SEQ1591 | 0.0256 | 0.661 |
| SEQ1632 | 0.0308 | 0.283 |
| SEQ1638 | 0.0316 | 0.24 |
| SEQ1669 | 0.0466 | 0.247 |
| SEQ1705 | 0.1096 | 0.288 |
| SEQ1755 | 0.0014 | 0.75 |
| SEQ1777 | 0.0585 | 0.255 |
| SEQ1795 | 0.0046 | 0.199 |
| SEQ1809 | 0.041 | 0.265 |
| SEQ1822 | 0.0575 | 0.268 |
| SEQ1826 | 0.101 | 0.298 |
| SEQ1885 | 0.0416 | 0.577 |
| SEQ1936 | 0.0348 | 0.263 |
| SEQ1949 | 0.0036 | 0.676 |
| SEQ1973 | 0.0075 | 0.148 |
| SEQ1976 | 0.0367 | 0.643 |
| SEQ2003 | 0.0712 | 0.714 |
| SEQ2007 | 0.0027 | 0.744 |
| SEQ2025 | 0.028 | 0.676 |
| SEQ2042 | 0.0214 | 0.704 |
| SEQ2057 | 0.025 | 0.245 |
| SEQ2070 | 0.0208 | 0.714 |
| SEQ2084 | 0.0164 | 0.23 |
| SEQ2095 | 0.082 | 0.288 |
| SEQ2150 | 0.0561 | 0.224 |
| SEQ2229 | 0.5132 | 0.707 |
| SEQ2254 | 0.0465 | 0.714 |
| SEQ2277 | 0.0804 | 0.276 |
| SEQ2291 | 0.0315 | 0.27 |
| SEQ2325 | 0.0406 | 0.651 |
| SEQ2369 | 0.0483 | 0.296 |
| SEQ2371 | 0.3109 | 0.745 |
| SEQ2387 | 0.1645 | 0.296 |
| SEQ2436 | 0.0619 | 0.247 |
| SEQ2446 | 0.0364 | 0.663 |
| SEQ2487 | 0.036 | 0.712 |
| SEQ2490 | 0.0171 | 0.268 |
| SEQ2506 | 0.4184 | 0.704 |
| SEQ2522 | 0.0929 | 0.281 |
| SEQ2540 | 0.0604 | 0.27 |
| SEQ2563 | 0.0566 | 0.217 |
| SEQ2571 | 0.0761 | 0.189 |
| SEQ2579 | 0.0415 | 0.263 |
| SEQ2588 | 0.0888 | 0.296 |
| SEQ2647 | 0.0615 | 0.283 |
| SEQ2651 | 0.1479 | 0.286 |
| SEQ2672 | 0.0525 | 0.255 |
| SEQ2675 | 0.0735 | 0.286 |
| SEQ2692 | 0.0639 | 0.298 |
| SEQ2697 | 0.0147 | 0.237 |
| SEQ2701 | 0.0295 | 0.245 |
| SEQ2720 | 0.0434 | 0.255 |
| SEQ2727 | 0.0337 | 0.24 |
| SEQ2755 | 0.1095 | 0.709 |
| SEQ2779 | 0.0642 | 0.291 |
| SEQ2783 | 0.0001 | 0.839 |
| SEQ2794 | 0.0636 | 0.298 |
| SEQ2803 | 0.1414 | 0.293 |
| SEQ2814 | 0.1279 | 0.298 |
| SEQ2855 | 0.022 | 0.217 |
| SEQ2863 | 0.0823 | 0.298 |
| SEQ2878 | 0.0148 | 0.191 |
| SEQ2887 | 0.082 | 0.298 |
| SEQ2928 | 0.0927 | 0.286 |
| SEQ2967 | 0.0218 | 0.296 |
| SEQ2992 | 0.0096 | 0.209 |
| SEQ3011 | 0.0128 | 0.189 |
| SEQ3029 | 0.0721 | 0.268 |
| SEQ3080 | 0.0223 | 0.24 |
| SEQ3118 | 0.0086 | 0.194 |
| SEQ3128 | 0.0276 | 0.224 |
| SEQ3154 | 0.0255 | 0.288 |
| SEQ3160 | 0.02 | 0.247 |
| SEQ3184 | 0.1028 | 0.26 |
| SEQ3186 | 0.0802 | 0.291 |
| SEQ3203 | 0.0226 | 0.235 |
| SEQ3235 | 0.0114 | 0.232 |

[0241] For this classification, the variable selection was performed by using a Random Forest model. A combination of 20 pre-selected lncRNA through a Random Forest Classifier (Table 26) is the best predictive model obtained here. The lncRNAs were selected using a random forest algorithm. The model was produced with Naives Bayes algorithm. This model has an area under the receiver-operating characteristic curve (AUC) of 0.834, an accuracy of 0.895, a sensitivity of 0.918, a specificity of 0.75, a Positive Predictive Value (PPV) of 0.957 and Negative Predictive Value (PNV) of 0.6. The confusion matrix is presented in Table 27.

TABLE 26
List of 20 pre-selected lncRNA through a Random Forest
Classifier for the classification low LVEF (LVEF ≤
40) and high LVEF (LVEF > 40)

| lncRNA | Rank in the model |
|---|---|
| SEQ0190 | 1 |
| SEQ0359 | 2 |
| SEQ0776 | 3 |
| SEQ1421 | 4 |
| SEQ1795 | 5 |
| SEQ0477 | 6 |
| SEQ1511 | 7 |
| SEQ0435 | 8 |
| SEQ1418 | 9 |
| SEQ1025 | 10 |
| SEQ0265 | 11 |
| SEQ1311 | 12 |
| SEQ2540 | 13 |
| SEQ2323 | 14 |
| SEQ3011 | 15 |
| SEQ2447 | 16 |
| SEQ2863 | 17 |
| SEQ2697 | 18 |
| SEQ3128 | 19 |
| SEQ2265 | 20 |

TABLE 27
Confusion matrix of the best model for this classification

| | Low LVEF predicted | High LVEF predicted |
|---|---|---|
| Low LVEF True | 6 | 2 |
| High LVEF True | 4 | 45 |

[0242] Comparison Between Low LVEF (LVEF≤45) and High LVEF (LVEF>45)

[0243] In this analysis, the 57 samples AMI were grouped into 2 groups using the threshold of 45% LVEF: low LVEF (LVEF≤45) and high LVEF (LVEF>45). The volcano plot showed the differential expression of lncRNA. 110 lncRNA are differentially expressed and among them 11 lncRNA have a fold change>2 or <0.5, which are in Table 28. 112 lncRNAs with P<0.05 and/or individual AUC>0.7 or <0.3 are listed in Table 29.

TABLE 28
List of 11 lncRNAs which are differentially expressed
with a fold change > 2 or <0.5between the low
LVEF group (LVEF ≤ 40) and the high LVEF group (LVEF > 40)

| lncRNA | P-Value | foldchange | AUC |
|---|---|---|---|
| SEQ1755 | 0.00017 | 0.460 | 0.740 |
| SEQ1331 | 0.00072 | 0.243 | 0.710 |
| SEQ1372 | 0.00560 | 0.437 | 0.695 |
| SEQ1341 | 0.01608 | 0.364 | 0.664 |
| SEQ0173 | 0.02953 | 0.481 | 0.654 |
| SEQ0611 | 0.03193 | 0.434 | 0.645 |
| SEQ1602 | 0.03198 | 2.164 | 0.301 |
| SEQ0442 | 0.04288 | 0.477 | 0.635 |
| SEQ0117 | 0.04364 | 0.494 | 0.607 |
| SEQ0074 | 0.04683 | 7.908 | 0.346 |
| SEQ2168 | 0.04815 | 0.452 | 0.627 |

TABLE 29
List of 112 IncRNAs which are differentially expressed
and/or have an AUC >0.7 or <0.3 between the low
LVEF group (LVEF ≤ 40) and the high LVEF group (LVEF > 40)

| IncRNA | P-Value | AUC |
|---|---|---|
| SEQ0007 | 0.028 | 0.33 |
| SEQ0036 | 0.057 | 0.72 |
| SEQ0064 | 0.031 | 0.65 |
| SEQ0074 | 0.047 | 0.35 |
| SEQ0079 | 0.004 | 0.73 |
| SEQ0117 | 0.044 | 0.61 |
| SEQ0137 | 0.012 | 0.72 |
| SEQ0163 | 0.017 | 0.30 |
| SEQ0169 | 0.024 | 0.29 |
| SEQ0173 | 0.030 | 0.65 |
| SEQ0240 | 0.017 | 0.31 |
| SEQ0265 | 0.024 | 0.73 |
| SEQ0269 | 0.016 | 0.31 |
| SEQ0359 | 0.003 | 0.29 |
| SEQ0376 | 0.013 | 0.29 |
| SEQ0440 | 0.009 | 0.65 |
| SEQ0442 | 0.043 | 0.64 |
| SEQ0446 | 0.049 | 0.32 |
| SEQ0476 | 0.016 | 0.66 |
| SEQ0477 | 0.048 | 0.31 |
| SEQ0493 | 0.020 | 0.65 |
| SEQ0534 | 0.040 | 0.65 |
| SEQ0535 | 0.010 | 0.70 |
| SEQ0545 | 0.009 | 0.27 |
| SEQ0559 | 0.017 | 0.30 |
| SEQ0564 | 0.040 | 0.63 |
| SEQ0609 | 0.046 | 0.66 |
| SEQ0611 | 0.032 | 0.65 |
| SEQ0627 | 0.015 | 0.70 |
| SEQ0690 | 0.019 | 0.30 |
| SEQ0709 | 0.031 | 0.64 |
| SEQ0720 | 0.008 | 0.71 |
| SEQ0749 | 0.031 | 0.29 |
| SEQ0756 | 0.023 | 0.33 |
| SEQ0762 | 0.021 | 0.31 |
| SEQ0802 | 0.019 | 0.68 |
| SEQ0845 | 0.013 | 0.68 |
| SEQ0914 | 0.039 | 0.62 |
| SEQ1025 | 0.026 | 0.31 |
| SEQ1042 | 0.012 | 0.26 |
| SEQ1047 | 0.044 | 0.66 |
| SEQ1065 | 0.011 | 0.29 |
| SEQ1117 | 0.032 | 0.70 |
| SEQ1123 | 0.028 | 0.32 |
| SEQ1150 | 0.030 | 0.66 |
| SEQ1158 | 0.032 | 0.65 |
| SEQ1211 | 0.027 | 0.64 |
| SEQ1228 | 0.011 | 0.65 |
| SEQ1290 | 0.049 | 0.30 |
| SEQ1300 | 0.024 | 0.62 |
| SEQ1331 | 0.001 | 0.71 |
| SEQ1341 | 0.016 | 0.66 |
| SEQ1372 | 0.006 | 0.70 |
| SEQ1403 | 0.010 | 0.66 |
| SEQ1406 | 0.016 | 0.68 |
| SEQ1446 | 0.032 | 0.30 |
| SEQ1458 | 0.033 | 0.67 |
| SEQ1475 | 0.012 | 0.70 |
| SEQ1483 | 0.025 | 0.30 |
| SEQ1511 | 0.007 | 0.30 |
| SEQ1518 | 0.023 | 0.31 |
| SEQ1519 | 0.017 | 0.68 |
| SEQ1533 | 0.004 | 0.73 |
| SEQ1536 | 0.026 | 0.32 |
| SEQ1539 | 0.002 | 0.73 |
| SEQ1591 | 0.043 | 0.61 |
| SEQ1596 | 0.044 | 0.63 |
| SEQ1602 | 0.032 | 0.30 |
| SEQ1739 | 0.002 | 0.70 |
| SEQ1755 | 0.000 | 0.74 |
| SEQ1762 | 0.024 | 0.69 |
| SEQ1766 | 0.037 | 0.32 |
| SEQ1795 | 0.026 | 0.34 |
| SEQ1930 | 0.010 | 0.30 |
| SEQ1973 | 0.016 | 0.29 |
| SEQ2003 | 0.025 | 0.68 |
| SEQ2084 | 0.024 | 0.30 |
| SEQ2113 | 0.021 | 0.32 |
| SEQ2149 | 0.031 | 0.33 |
| SEQ2168 | 0.048 | 0.63 |
| SEQ2186 | 0.042 | 0.63 |
| SEQ2218 | 0.021 | 0.66 |
| SEQ2254 | 0.033 | 0.67 |
| SEQ2323 | 0.050 | 0.65 |
| SEQ2347 | 0.019 | 0.69 |
| SEQ2369 | 0.047 | 0.34 |
| SEQ2426 | 0.030 | 0.62 |
| SEQ2436 | 0.020 | 0.29 |
| SEQ2471 | 0.007 | 0.73 |
| SEQ2502 | 0.033 | 0.33 |
| SEQ2540 | 0.008 | 0.26 |
| SEQ2647 | 0.027 | 0.31 |
| SEQ2684 | 0.028 | 0.27 |
| SEQ2697 | 0.004 | 0.28 |
| SEQ2727 | 0.008 | 0.30 |
| SEQ2783 | 0.018 | 0.68 |
| SEQ2850 | 0.045 | 0.33 |
| SEQ2863 | 0.040 | 0.32 |
| SEQ3011 | 0.007 | 0.25 |
| SEQ3049 | 0.047 | 0.59 |
| SEQ3051 | 0.015 | 0.30 |
| SEQ3069 | 0.040 | 0.61 |
| SEQ3106 | 0.035 | 0.31 |
| SEQ3118 | 0.028 | 0.33 |
| SEQ3128 | 0.007 | 0.28 |
| SEQ3137 | 0.042 | 0.62 |
| SEQ3160 | 0.015 | 0.31 |
| SEQ3184 | 0.184 | 0.30 |
| SEQ3186 | 0.035 | 0.30 |
| SEQ3193 | 0.026 | 0.32 |
| SEQ3203 | 0.031 | 0.32 |
| SEQ3235 | 0.027 | 0.31 |

[0244] For this classification, the variable selection was performed by using a Random Forest model. A combination of 11 pre-selected lncRNA through a Random Forest Classifier (Table 30) is the best predictive model obtained here. The lncRNAs were selected using a random forest algorithm. This model has an area under the receiver-operating characteristic curve (AUC) of 0.905, an accuracy of 0.807, a sensitivity of 0.927, a specificity of 0.5, a Positive Predictive Value (PPV) of 0.826 and Negative Predictive Value (PNV) of 0.727. The confusion matrix is presented in Table 31.

TABLE 30
List of 11 pre-selected lncRNA through a Random Forest
Classifier for the classification low LVEF (LVEF ≤
45) and high LVEF (LVEF > 45)

| lncRNA | Rank in the model |
|---|---|
| SEQ2540 | 1 |
| SEQ0545 | 2 |
| SEQ1766 | 3 |
| SEQ3011 | 4 |
| SEQ0968 | 5 |
| SEQ2371 | 6 |
| SEQ1533 | 7 |
| SEQ0749 | 8 |
| SEQ0609 | 9 |
| SEQ1446 | 10 |
| SEQ2986 | 11 |

TABLE 31
Confusion matrix of the best model for this classification

| | Low LVEF predicted | High LVEF predicted |
|---|---|---|
| Low LVEF True | 8 | 8 |
| High LVEF True | 3 | 38 |

### Example 6

### Analysis Control Subject Versus AMI Patients at D0 Total Seq on Cardiac Enriched lncRNAs

[0245] Quantification of lncRNAs in body fluids including but not limited to whole blood, serum, plasma, urine, saliva is a non-invasive way to develop a diagnostic test to use in clinics. The expression of circulating lncRNA is studied in serum samples from patients with AMI and control subjects.

[0246] Serum samples collected at D0 of patient with AMI from the MitoCare cohort and control subject of chronobiological study are used for lncRNA profiling. Mitocare demographics are presented in Table 3. Technical workflow is identical as described in Example 3.

[0247] Results:

[0248] Comparison Between Control Subject Versus AMI Patients at D0

[0249] First, samples are grouped into 2 group by a dichotomized variable: patients with cardiac disorder (AMI) and subjects with no cardiac disease. We found that 1736 lncRNAs are differentially expressed (p<0.05). Most of the lncRNAs are overexpressed in patient undergoing an AMI. We show here that the lncRNAs identified in heart biopsie are biomarkers for diagnosis of heart diseases. By selecting lncRNAs with p<0.01; a fold change>2 or <0.5 and an individual AUC>0.8 or <0.2, we identified a list of 288 lncRNAs that can diagnose AMI or heart diseases (Table 32).

TABLE 32
list of 288 IncRNAs differentially expressed, with a fold change >2
or <0.5 and an individual AUC >0.8 or <0.2.

| IncRNA | P-Value | Fold change | auc |
|---|---|---|---|
| SEQ0014 | 0.00009 | 0.49 | 0.19 |
| SEQ0020 | 0.00002 | 0.35 | 0.13 |
| SEQ0027 | 0.00005 | 0.31 | 0.16 |
| SEQ0042 | 0.00000 | 0.50 | 0.11 |
| SEQ0051 | 0.00315 | 10.58 | 0.85 |
| SEQ0055 | 0.00001 | 0.42 | 0.13 |
| SEQ0085 | 0.00001 | 0.29 | 0.13 |
| SEQ0097 | 0.00012 | 0.49 | 0.17 |
| SEQ0107 | 0.00009 | 0.26 | 0.16 |
| SEQ0130 | 0.00012 | 0.24 | 0.16 |
| SEQ0138 | 0.00007 | 0.47 | 0.17 |
| SEQ0151 | 0.00000 | 0.26 | 0.09 |
| SEQ0155 | 0.00007 | 0.32 | 0.15 |
| SEQ0176 | 0.00025 | 0.44 | 0.17 |
| SEQ0190 | 0.00000 | 0.34 | 0.05 |
| SEQ0199 | 0.00030 | 0.46 | 0.19 |
| SEQ0206 | 0.00003 | 0.40 | 0.16 |
| SEQ0210 | 0.00001 | 0.48 | 0.12 |
| SEQ0215 | 0.00003 | 0.27 | 0.16 |
| SEQ0226 | 0.00000 | 0.46 | 0.02 |
| SEQ0227 | 0.00001 | 0.46 | 0.15 |
| SEQ0236 | 0.00009 | 0.44 | 0.17 |
| SEQ0251 | 0.00010 | 0.26 | 0.20 |
| SEQ0263 | 0.00032 | 0.42 | 0.20 |
| SEQ0268 | 0.00001 | 0.43 | 0.14 |
| SEQ0281 | 0.00003 | 0.44 | 0.14 |
| SEQ0293 | 0.00000 | 0.12 | 0.16 |
| SEQ0325 | 0.00100 | 0.20 | 0.18 |
| SEQ0330 | 0.00008 | 0.27 | 0.16 |
| SEQ0350 | 0.00000 | 0.38 | 0.10 |
| SEQ0365 | 0.00001 | 0.47 | 0.14 |
| SEQ0368 | 0.00022 | 0.32 | 0.20 |
| SEQ0372 | 0.00009 | 0.35 | 0.18 |
| SEQ0374 | 0.00032 | 0.23 | 0.17 |
| SEQ0383 | 0.00054 | 0.49 | 0.19 |
| SEQ0387 | 0.00006 | 0.41 | 0.18 |
| SEQ0396 | 0.00019 | 0.34 | 0.17 |
| SEQ0402 | 0.00021 | 0.36 | 0.20 |
| SEQ0439 | 0.00029 | 0.45 | 0.19 |
| SEQ0465 | 0.00000 | 0.31 | 0.05 |
| SEQ0486 | 0.00041 | 0.46 | 0.19 |
| SEQ0494 | 0.00003 | 0.42 | 0.16 |
| SEQ0499 | 0.00000 | 0.38 | 0.13 |
| SEQ0507 | 0.00001 | 0.17 | 0.13 |
| SEQ0511 | 0.00016 | 0.44 | 0.17 |
| SEQ0523 | 0.00000 | 0.21 | 0.01 |
| SEQ0538 | 0.00059 | 0.29 | 0.20 |
| SEQ0559 | 0.00016 | 0.47 | 0.19 |
| SEQ0560 | 0.00027 | 0.34 | 0.19 |
| SEQ0564 | 0.00000 | 0.28 | 0.08 |
| SEQ0572 | 0.00000 | 0.21 | 0.09 |
| SEQ0589 | 0.00018 | 0.48 | 0.19 |
| SEQ0594 | 0.00000 | 20.93 | 1.00 |
| SEQ0597 | 0.00009 | 0.17 | 0.09 |
| SEQ0599 | 0.00001 | 0.40 | 0.12 |
| SEQ0639 | 0.00005 | 2.02 | 0.85 |
| SEQ0647 | 0.00000 | 0.43 | 0.10 |
| SEQ0657 | 0.00000 | 0.49 | 0.08 |
| SEQ0662 | 0.00024 | 0.31 | 0.17 |
| SEQ0664 | 0.00001 | 0.42 | 0.15 |
| SEQ0668 | 0.00015 | 0.29 | 0.18 |
| SEQ0674 | 0.00000 | 0.47 | 0.13 |
| SEQ0685 | 0.00009 | 0.46 | 0.17 |
| SEQ0696 | 0.00010 | 0.29 | 0.16 |
| SEQ0697 | 0.00000 | 0.23 | 0.12 |
| SEQ0707 | 0.00000 | 0.43 | 0.05 |
| SEQ0710 | 0.00003 | 0.40 | 0.17 |
| SEQ0714 | 0.00002 | 0.37 | 0.11 |
| SEQ0745 | 0.00044 | 0.38 | 0.19 |
| SEQ0755 | 0.00000 | 0.19 | 0.08 |
| SEQ0772 | 0.00006 | 2.32 | 0.82 |
| SEQ0804 | 0.00012 | 0.35 | 0.20 |
| SEQ0809 | 0.00075 | 0.20 | 0.19 |
| SEQ0818 | 0.00000 | 0.46 | 0.01 |
| SEQ0839 | 0.00000 | 0.42 | 0.04 |
| SEQ0846 | 0.00000 | 0.41 | 0.03 |
| SEQ0862 | 0.00024 | 0.32 | 0.19 |
| SEQ0866 | 0.00000 | 0.25 | 0.11 |
| SEQ0884 | 0.00004 | 0.44 | 0.17 |
| SEQ0886 | 0.00001 | 0.32 | 0.12 |
| SEQ0899 | 0.00000 | 0.38 | 0.10 |
| SEQ0916 | 0.00000 | 0.41 | 0.03 |
| SEQ0917 | 0.00003 | 0.33 | 0.15 |
| SEQ0936 | 0.00005 | 0.45 | 0.17 |
| SEQ0939 | 0.00009 | 0.29 | 0.19 |
| SEQ0949 | 0.00000 | 0.45 | 0.05 |
| SEQ0955 | 0.00023 | 0.37 | 0.16 |
| SEQ0970 | 0.00001 | 0.46 | 0.14 |
| SEQ0983 | 0.00000 | 0.46 | 0.11 |
| SEQ0984 | 0.00000 | 0.12 | 0.09 |
| SEQ0986 | 0.00017 | 0.50 | 0.20 |
| SEQ0989 | 0.00027 | 0.32 | 0.19 |
| SEQ0990 | 0.00000 | 0.11 | 0.11 |
| SEQ0995 | 0.00007 | 0.31 | 0.17 |
| SEQ1001 | 0.00004 | 0.44 | 0.17 |
| SEQ1008 | 0.00000 | 0.47 | 0.11 |
| SEQ1028 | 0.00010 | 0.31 | 0.19 |
| SEQ1047 | 0.00005 | 0.43 | 0.19 |
| SEQ1051 | 0.00002 | 0.49 | 0.16 |
| SEQ1055 | 0.00000 | 0.46 | 0.03 |
| SEQ1066 | 0.00000 | 0.48 | 0.09 |
| SEQ1072 | 0.00000 | 0.29 | 0.07 |
| SEQ1086 | 0.00000 | 0.31 | 0.08 |
| SEQ1088 | 0.00001 | 0.20 | 0.15 |
| SEQ1106 | 0.00004 | 0.40 | 0.14 |
| SEQ1113 | 0.00000 | 0.34 | 0.13 |
| SEQ1115 | 0.00022 | 0.43 | 0.19 |
| SEQ1116 | 0.00000 | 0.49 | 0.03 |
| SEQ1131 | 0.00000 | 0.25 | 0.05 |
| SEQ1135 | 0.00024 | 0.40 | 0.19 |
| SEQ1138 | 0.00000 | 0.25 | 0.10 |
| SEQ1142 | 0.00037 | 7.14 | 0.97 |
| SEQ1146 | 0.00008 | 0.38 | 0.17 |
| SEQ1180 | 0.00005 | 0.18 | 0.17 |
| SEQ1184 | 0.00000 | 0.36 | 0.07 |
| SEQ1211 | 0.00000 | 0.47 | 0.02 |
| SEQ1220 | 0.00000 | 0.41 | 0.12 |
| SEQ1239 | 0.00001 | 0.43 | 0.14 |
| SEQ1253 | 0.00030 | 0.28 | 0.17 |
| SEQ1276 | 0.00164 | 0.40 | 0.19 |
| SEQ1291 | 0.00000 | 0.38 | 0.08 |
| SEQ1297 | 0.00000 | 0.43 | 0.02 |
| SEQ1301 | 0.00011 | 0.25 | 0.16 |
| SEQ1306 | 0.00015 | 0.15 | 0.17 |
| SEQ1307 | 0.00005 | 0.30 | 0.16 |
| SEQ1314 | 0.00001 | 0.46 | 0.14 |
| SEQ1320 | 0.00004 | 0.18 | 0.12 |
| SEQ1336 | 0.00006 | 0.48 | 0.17 |
| SEQ1350 | 0.00008 | 0.48 | 0.19 |
| SEQ1357 | 0.00008 | 0.29 | 0.13 |
| SEQ1367 | 0.00010 | 0.34 | 0.16 |
| SEQ1372 | 0.00063 | 0.46 | 0.19 |
| SEQ1374 | 0.00000 | 0.48 | 0.02 |
| SEQ1393 | 0.00000 | 0.37 | 0.12 |
| SEQ1404 | 0.00001 | 0.42 | 0.14 |
| SEQ1415 | 0.00000 | 0.23 | 0.06 |
| SEQ1424 | 0.00024 | 0.31 | 0.17 |
| SEQ1434 | 0.00005 | 0.26 | 0.17 |
| SEQ1469 | 0.00000 | 0.45 | 0.03 |
| SEQ1477 | 0.00000 | 2.06 | 0.90 |
| SEQ1484 | 0.00000 | 0.42 | 0.04 |
| SEQ1492 | 0.00007 | 0.26 | 0.18 |
| SEQ1499 | 0.00000 | 0.37 | 0.09 |
| SEQ1502 | 0.00004 | 0.22 | 0.17 |
| SEQ1509 | 0.00000 | 0.32 | 0.12 |
| SEQ1523 | 0.00027 | 0.31 | 0.16 |
| SEQ1532 | 0.00005 | 0.17 | 0.16 |
| SEQ1534 | 0.00000 | 0.48 | 0.00 |
| SEQ1537 | 0.00009 | 0.40 | 0.15 |
| SEQ1567 | 0.00012 | 0.47 | 0.16 |
| SEQ1572 | 0.00003 | 0.43 | 0.15 |
| SEQ1582 | 0.00026 | 0.13 | 0.17 |
| SEQ1585 | 0.00026 | 2.17 | 0.83 |
| SEQ1587 | 0.00000 | 0.40 | 0.10 |
| SEQ1597 | 0.00009 | 0.19 | 0.16 |
| SEQ1601 | 0.00001 | 6.65 | 0.88 |
| SEQ1608 | 0.00046 | 0.44 | 0.20 |
| SEQ1612 | 0.00000 | 0.08 | 0.10 |
| SEQ1624 | 0.00000 | 0.41 | 0.05 |
| SEQ1625 | 0.00000 | 0.21 | 0.05 |
| SEQ1638 | 0.00001 | 2.06 | 0.85 |
| SEQ1646 | 0.00000 | 0.42 | 0.08 |
| SEQ1647 | 0.00000 | 0.44 | 0.05 |
| SEQ1652 | 0.00539 | 0.21 | 0.15 |
| SEQ1670 | 0.00036 | 0.34 | 0.20 |
| SEQ1680 | 0.00003 | 0.26 | 0.13 |
| SEQ1716 | 0.00000 | 0.12 | 0.10 |
| SEQ1717 | 0.00062 | 0.05 | 0.15 |
| SEQ1719 | 0.00038 | 0.30 | 0.20 |
| SEQ1721 | 0.00001 | 0.37 | 0.15 |
| SEQ1731 | 0.00000 | 0.06 | 0.09 |
| SEQ1732 | 0.00002 | 0.45 | 0.14 |
| SEQ1735 | 0.00000 | 0.19 | 0.04 |
| SEQ1739 | 0.00001 | 0.33 | 0.10 |
| SEQ1747 | 0.00001 | 0.37 | 0.15 |
| SEQ1753 | 0.00001 | 0.43 | 0.12 |
| SEQ1761 | 0.00057 | 0.48 | 0.19 |
| SEQ1764 | 0.00112 | 0.32 | 0.19 |
| SEQ1774 | 0.00028 | 0.32 | 0.19 |
| SEQ1777 | 0.00000 | 0.43 | 0.12 |
| SEQ1810 | 0.00010 | 0.50 | 0.17 |
| SEQ1837 | 0.00009 | 0.34 | 0.14 |
| SEQ1859 | 0.00000 | 0.43 | 0.13 |
| SEQ1874 | 0.00030 | 0.43 | 0.20 |
| SEQ1888 | 0.00000 | 0.34 | 0.09 |
| SEQ1891 | 0.00006 | 0.44 | 0.18 |
| SEQ1893 | 0.00005 | 0.06 | 0.13 |
| SEQ1900 | 0.00041 | 0.40 | 0.20 |
| SEQ1927 | 0.00000 | 0.48 | 0.09 |
| SEQ1947 | 0.00000 | 0.33 | 0.12 |
| SEQ1963 | 0.00000 | 0.40 | 0.09 |
| SEQ1975 | 0.00024 | 0.26 | 0.18 |
| SEQ1985 | 0.00468 | 0.46 | 0.20 |
| SEQ1991 | 0.00000 | 0.33 | 0.10 |
| SEQ1992 | 0.00000 | 0.47 | 0.11 |
| SEQ1994 | 0.00000 | 0.43 | 0.06 |
| SEQ1998 | 0.00000 | 0.48 | 0.05 |
| SEQ1999 | 0.00002 | 0.41 | 0.13 |
| SEQ2020 | 0.00001 | 0.39 | 0.13 |
| SEQ2043 | 0.00001 | 0.11 | 0.10 |
| SEQ2059 | 0.00005 | 0.38 | 0.16 |
| SEQ2065 | 0.00000 | 0.43 | 0.02 |
| SEQ2070 | 0.00000 | 0.32 | 0.12 |
| SEQ2071 | 0.00001 | 0.37 | 0.13 |
| SEQ2077 | 0.00005 | 0.10 | 0.07 |
| SEQ2082 | 0.00000 | 0.42 | 0.12 |
| SEQ2085 | 0.00002 | 0.28 | 0.14 |
| SEQ2093 | 0.00000 | 0.26 | 0.10 |
| SEQ2108 | 0.00000 | 0.21 | 0.07 |
| SEQ2127 | 0.00322 | 0.36 | 0.16 |
| SEQ2129 | 0.00000 | 0.47 | 0.13 |
| SEQ2133 | 0.00061 | 0.45 | 0.19 |
| SEQ2148 | 0.00000 | 2.04 | 0.89 |
| SEQ2156 | 0.00010 | 0.18 | 0.16 |
| SEQ2161 | 0.00000 | 2.05 | 0.93 |
| SEQ2163 | 0.00000 | 0.19 | 0.05 |
| SEQ2173 | 0.00000 | 0.46 | 0.04 |
| SEQ2184 | 0.00006 | 0.32 | 0.14 |
| SEQ2192 | 0.00000 | 0.47 | 0.11 |
| SEQ2196 | 0.00005 | 0.44 | 0.16 |
| SEQ2198 | 0.00010 | 0.49 | 0.18 |
| SEQ2207 | 0.00004 | 0.24 | 0.13 |
| SEQ2245 | 0.00002 | 0.38 | 0.16 |
| SEQ2250 | 0.00000 | 0.49 | 0.05 |
| SEQ2260 | 0.00024 | 2.31 | 0.82 |
| SEQ2280 | 0.00012 | 0.12 | 0.12 |
| SEQ2295 | 0.00000 | 0.41 | 0.13 |
| SEQ2310 | 0.00002 | 0.21 | 0.16 |
| SEQ2343 | 0.00017 | 0.33 | 0.20 |
| SEQ2373 | 0.00000 | 0.47 | 0.03 |
| SEQ2406 | 0.00014 | 2.65 | 0.81 |
| SEQ2420 | 0.00001 | 0.40 | 0.12 |
| SEQ2462 | 0.00000 | 0.36 | 0.08 |
| SEQ2479 | 0.00063 | 0.49 | 0.19 |
| SEQ2488 | 0.00000 | 0.40 | 0.09 |
| SEQ2489 | 0.00018 | 2.10 | 0.81 |
| SEQ2571 | 0.00001 | 0.36 | 0.14 |
| SEQ2584 | 0.00000 | 0.45 | 0.07 |
| SEQ2603 | 0.00000 | 0.42 | 0.02 |
| SEQ2676 | 0.00000 | 0.49 | 0.12 |
| SEQ2682 | 0.00000 | 0.46 | 0.05 |
| SEQ2766 | 0.00001 | 0.19 | 0.12 |
| SEQ2832 | 0.00064 | 0.45 | 0.19 |
| SEQ2842 | 0.00011 | 0.40 | 0.19 |
| SEQ2868 | 0.00001 | 0.16 | 0.07 |
| SEQ2904 | 0.00242 | 0.20 | 0.14 |
| SEQ2924 | 0.00000 | 2.10 | 0.87 |
| SEQ2939 | 0.00000 | 0.49 | 0.13 |
| SEQ2946 | 0.00000 | 0.41 | 0.04 |
| SEQ2985 | 0.00000 | 0.47 | 0.03 |
| SEQ2996 | 0.00047 | 0.15 | 0.17 |
| SEQ3006 | 0.00002 | 0.43 | 0.16 |
| SEQ3073 | 0.00037 | 0.37 | 0.19 |
| SEQ3133 | 0.00000 | 0.39 | 0.02 |
| SEQ3139 | 0.00000 | 0.28 | 0.07 |
| SEQ3198 | 0.00000 | 0.46 | 0.08 |
| SEQ3212 | 0.00000 | 0.49 | 0.09 |
| SEQ3220 | 0.00033 | 0.41 | 0.19 |

[0250] Correlation Between lncRNA Expression at D0 and LVEF at 3 Days

[0251] In order to predict outcome of patient suffering from AMI at day 3 and recovery of the patients, LVEF at day 3 is considered as continuous value and spearman correlation is performed between lncRNA expression at D0 and LVEF at day 3. We found that 72 lncRNAs present a correlation factor over 0.45 or below −0.45 as represented in Table 33. These lncRNAs can be used as predictor of outcome 3 days after AMI to evaluate LVEF.

TABLE 33
72 lncRNAs with spearman correlation factor
over 0.45 or below −0.45 wit LVEF at D 3.

| lncRNA | Correlation |
|---|---|
| SEQ0026 | −0.475 |
| SEQ0090 | −0.530 |
| SEQ0097 | 0.453 |
| SEQ0103 | −0.639 |
| SEQ0131 | −0.512 |
| SEQ0212 | −0.454 |
| SEQ0242 | 0.517 |
| SEQ0255 | −0.559 |
| SEQ0266 | −0.649 |
| SEQ0433 | −0.504 |
| SEQ0489 | −0.454 |
| SEQ0563 | 0.494 |
| SEQ0573 | −0.537 |
| SEQ0595 | −0.605 |
| SEQ0602 | 0.557 |
| SEQ0718 | 0.593 |
| SEQ0721 | −0.472 |
| SEQ0741 | −0.598 |
| SEQ0777 | −0.617 |
| SEQ0786 | −0.529 |
| SEQ0900 | −0.469 |
| SEQ0903 | −0.629 |
| SEQ0947 | −0.473 |
| SEQ1021 | −0.508 |
| SEQ1034 | 0.453 |
| SEQ1045 | −0.474 |
| SEQ1051 | −0.499 |
| SEQ1076 | −0.652 |
| SEQ1176 | −0.512 |
| SEQ1245 | −0.568 |
| SEQ1295 | 0.599 |
| SEQ1373 | 0.533 |
| SEQ1391 | 0.500 |
| SEQ1392 | −0.474 |
| SEQ1482 | −0.492 |
| SEQ1514 | −0.453 |
| SEQ1571 | −0.476 |
| SEQ1579 | 0.506 |
| SEQ1637 | −0.469 |
| SEQ1830 | −0.477 |
| SEQ1847 | −0.465 |
| SEQ1848 | 0.666 |
| SEQ1932 | −0.531 |
| SEQ1947 | −0.477 |
| SEQ2091 | −0.553 |
| SEQ2095 | −0.496 |
| SEQ2244 | −0.458 |
| SEQ2258 | −0.595 |
| SEQ2273 | 0.502 |
| SEQ2307 | −0.547 |
| SEQ2312 | 0.574 |
| SEQ2329 | 0.545 |
| SEQ2371 | 0.493 |
| SEQ2387 | 0.594 |
| SEQ2390 | 0.644 |
| SEQ2396 | −0.513 |
| SEQ2429 | 0.529 |
| SEQ2452 | 0.452 |
| SEQ2517 | 0.531 |
| SEQ2523 | −0.479 |
| SEQ2549 | −0.520 |
| SEQ2628 | −0.505 |
| SEQ2674 | −0.492 |
| SEQ2709 | −0.487 |
| SEQ2827 | 0.501 |
| SEQ2829 | 0.587 |
| SEQ2858 | −0.457 |
| SEQ2900 | 0.470 |
| SEQ2907 | −0.481 |
| SEQ2996 | −0.514 |
| SEQ3054 | 0.455 |
| SEQ3166 | 0.551 |

[0252] Among these lncRNA, 4 lncRNA (SEQ0097, SEQ1947, SEQ1051 and SEQ2996) are differentially expressed between controls and AMI, and are correlated to LVEF value at D3.

### Example 7

### Analysis of Gencode lncRNAs from Serum RNA-Seq Data

[0253] Quantification of lncRNAs in body fluids including but not limited to whole blood, serum, plasma, urine, saliva is a non-invasive way to develop a diagnostic test to use in clinics. The expression of circulating lncRNA is studied in serum samples from patients with AMI and control subjects.

[0254] Serum samples collected at D0 and D3-D5 of patient with AMI from the MitoCare cohort and control subject of chronobiological study are used for lncRNA profiling. Mitocare demographics are presented in Table 3. Technical workflow is identical as described in Example 3 and sequencing data are aligned against Gencode database from LNCipedia 5.0. Cardiac enriched lncRNAs (SEQ0001 to SEQ3238) are removed from the analysis. A threshold of 10 CPM in half of samples in one group is applied to consider the lncRNA as positive. In this analysis, focus is done on circulating lncRNAs to be used as biomarkers for the prediction and monitoring of Left Ventricular Remodeling and development of heart failure.

[0255] Comparison Between Low LVEF (LVEF≤40%) and High LVEF (LVEF>40%) at D3-D5 Serum Samples

[0256] First, samples are classified into 2 group by a dichotomized variable: 1-month LVEF<40% considered as LV dysfunction (Ventricular remodeling) and 1-month LVEF>40% considered as preserved LV function.

[0257] 291 lncRNA are differentially expressed and among these, 82 lncRNA are differentially expressed and have a fold change>2 or <0.5 between the low LVEF (LVEF≤40%) and the high LVEF (LVEF>40%). The p-value and the fold-change of these lncRNA are listed in the Table 34. 468 lncRNAs which have a p<0.05 and/or an individual AUC>0.7 or <0.3 are listed in Table 35.

TABLE 34
List of 86 lncRNAs from Gencode database which are differentially
expressed (p < 0.05) and have a fold change > 2 or <0.5 between the low
LVEF group (LVEF ≤ 40%) and the high LVEF group (LVEF > 40%)

| lncRNA | P value | foldchange |
|---|---|---|
| ENST00000491676.1 | 0.002 | 0.461 |
| ENST00000512458.1 | 0.002 | 0.211 |
| ENST00000485020.1 | 0.002 | 3.802 |
| ENST00000487814.1 | 0.002 | 2.091 |
| ENST00000515306.1 | 0.003 | 3.302 |
| ENST00000426551.1 | 0.004 | 0.244 |
| ENST00000412944.1 | 0.004 | 8.646 |
| ENST00000553319.1 | 0.004 | 0.493 |
| ENST00000421563.1 | 0.005 | 0.435 |
| ENST00000427732.1 | 0.006 | 5.310 |
| ENST00000506068.1 | 0.006 | 5.486 |
| ENST00000417420.1 | 0.006 | 5.855 |
| ENST00000514942.2 | 0.007 | 2.865 |
| ENST00000461943.1 | 0.009 | 2.816 |
| ENST00000507932.1 | 0.009 | 0.238 |
| ENST00000456255.1 | 0.010 | 0.295 |
| ENST00000519929.1 | 0.011 | 0.357 |
| ENST00000466034.1 | 0.013 | 6.486 |
| ENST00000399152.2 | 0.013 | 3.882 |
| ENST00000422417.1 | 0.014 | 0.262 |
| ENST00000503037.1 | 0.015 | 0.430 |
| ENST00000515811.1 | 0.015 | 3.365 |
| ENST00000502861.1 | 0.016 | 2.281 |
| ENST00000455541.1 | 0.016 | 0.382 |
| ENST00000424592.1 | 0.016 | 2.843 |
| ENST00000431911.1 | 0.017 | 0.422 |
| ENST00000452618.1 | 0.017 | 2.526 |
| ENST00000437488.1 | 0.018 | 0.333 |
| ENST00000443066.2 | 0.018 | 3.846 |
| ENST00000457169.1 | 0.018 | 10.873 |
| ENST00000447761.1 | 0.019 | 2.455 |
| ENST00000527035.1 | 0.019 | 0.313 |
| ENST00000522525.1 | 0.021 | 2.384 |
| ENST00000602445.1 | 0.022 | 13.038 |
| ENST00000431569.1 | 0.022 | 4.473 |
| ENST00000609450.1 | 0.022 | 0.498 |
| ENST00000501965.2 | 0.022 | 2.161 |
| ENST00000441026.1 | 0.022 | 2.312 |
| ENST00000432125.2 | 0.022 | 2.253 |
| ENST00000609549.1 | 0.023 | 0.393 |
| ENST00000514526.1 | 0.023 | 0.286 |
| ENST00000510946.1 | 0.024 | 3.217 |
| ENST00000521819.1 | 0.025 | 0.140 |
| ENST00000608774.1 | 0.025 | 0.481 |
| ENST00000601586.1 | 0.026 | 0.399 |
| ENST00000508847.1 | 0.026 | 0.229 |
| ENST00000421696.2 | 0.026 | 2.796 |
| ENST00000601913.1 | 0.028 | 3.766 |
| ENST00000494900.1 | 0.029 | 2.198 |
| ENST00000434207.1 | 0.030 | 2.133 |
| ENST00000452809.1 | 0.031 | 2.428 |
| ENST00000498413.1 | 0.032 | 0.321 |
| ENST00000507957.1 | 0.034 | 2.706 |
| ENST00000443562.1 | 0.034 | 0.355 |
| ENST00000577528.1 | 0.034 | 0.218 |
| ENST00000439964.1 | 0.035 | 0.367 |
| ENST00000515184.1 | 0.035 | 0.469 |
| ENST00000452795.2 | 0.035 | 0.392 |
| ENST00000427213.1 | 0.036 | 2.863 |
| ENST00000416506.1 | 0.037 | 0.411 |
| ENST00000432038.1 | 0.037 | 0.488 |
| ENST00000521805.1 | 0.037 | 0.403 |
| ENST00000498480.1 | 0.038 | 0.492 |
| ENST00000455988.1 | 0.038 | 3.218 |
| ENST00000606056.1 | 0.038 | 0.331 |
| ENST00000509057.1 | 0.038 | 0.457 |
| ENST00000465215.1 | 0.039 | 0.122 |
| ENST00000514368.1 | 0.040 | 0.349 |
| ENST00000585826.1 | 0.040 | 3.226 |
| ENST00000472821.1 | 0.041 | 3.001 |
| ENST00000588108.1 | 0.041 | 0.386 |
| ENST00000421640.1 | 0.041 | 2.670 |
| ENST00000437290.2 | 0.042 | 0.193 |
| ENST00000415629.2 | 0.043 | 0.118 |
| ENST00000489690.1 | 0.043 | 0.481 |
| ENST00000513219.1 | 0.043 | 0.416 |
| ENST00000419614.1 | 0.043 | 2.574 |
| ENST00000604677.1 | 0.044 | 3.502 |
| ENST00000440574.1 | 0.048 | 2.392 |
| ENST00000435643.1 | 0.048 | 0.212 |
| ENST00000587568.1 | 0.050 | 3.194 |
| ENST00000413525.1 | 0.050 | 4.403 |

TABLE 35
List of 468 IncRNA from Gencode database which are
differentially expressed (p < 0.05) and/or
have an AUC >0.7 or <0.3 between the low
LVEF group (LVEF ≤ 40%) and the high LVEF group (LVEF > 40%)

| IncRNA | p Value | auc |
|---|---|---|
| ENST00000425754.1 | 00000 | 00850 |
| ENST00000609071.1 | 00000 | 00875 |
| ENST00000503929.1 | 00000 | 00825 |
| ENST00000562952.1 | 00001 | 00830 |
| ENST00000587099.1 | 00001 | 00860 |
| ENST00000424895.1 | 00001 | 00825 |
| ENST00000608537.1 | 00001 | 00810 |
| ENST00000414309.1 | 00002 | 00850 |
| ENST00000491676.1 | 00002 | 00160 |
| ENST00000412134.1 | 00002 | 00805 |
| ENST00000565538.1 | 00002 | 00810 |
| ENST00000508752.1 | 00002 | 00795 |
| ENST00000512458.1 | 00002 | 00123 |
| ENST00000485020.1 | 00002 | 00810 |
| ENST00000487814.1 | 00002 | 00820 |
| ENST00000598757.1 | 00002 | 00170 |
| ENST00000515306.1 | 00003 | 00790 |
| ENST00000443613.2 | 00003 | 00190 |
| ENST00000507344.1 | 00004 | 00815 |
| ENST00000426551.1 | 00004 | 00170 |
| ENST00000412944.1 | 00004 | 00720 |
| ENST00000513958.1 | 00004 | 00195 |
| ENST00000511064.1 | 00004 | 00790 |
| ENST00000448901.1 | 00004 | 00795 |
| ENST00000553319.1 | 00004 | 00150 |
| ENST00000421563.1 | 00005 | 00205 |
| ENST00000497573.1 | 00005 | 00140 |
| ENST00000456026.1 | 00005 | 00775 |
| ENST00000427732.1 | 00006 | 00745 |
| ENST00000506068.1 | 00006 | 00730 |
| ENST00000512712.2 | 00006 | 00200 |
| ENST00000417420.1 | 00006 | 00735 |
| ENST00000568686.1 | 00006 | 00245 |
| ENST00000543490.1 | 00006 | 00785 |
| ENST00000503815.1 | 00007 | 00185 |
| ENST00000565044.1 | 00007 | 00195 |
| ENST00000514942.2 | 00007 | 00735 |
| ENST00000607216.1 | 00007 | 00160 |
| ENST00000412294.1 | 00007 | 00785 |
| ENST00000430666.1 | 00007 | 00205 |
| ENST00000415330.2 | 00007 | 00200 |
| ENST00000429666.1 | 00008 | 00215 |
| ENST00000499713.2 | 00008 | 00220 |
| ENST00000608574.1 | 00008 | 00170 |
| ENST00000420365.1 | 00008 | 00220 |
| ENST00000421998.1 | 00008 | 00240 |
| ENST00000424244.1 | 00009 | 00265 |
| ENST00000552220.1 | 00009 | 00795 |
| ENST00000428156.1 | 00009 | 00770 |
| ENST00000429725.1 | 00009 | 00780 |
| ENST00000461943.1 | 00009 | 00715 |
| ENST00000508572.1 | 00009 | 00225 |
| ENST00000507932.1 | 00009 | 00205 |
| ENST00000418602.1 | 00010 | 00250 |
| ENST00000505680.1 | 00010 | 00755 |
| ENST00000419578.1 | 00010 | 00785 |
| ENST00000475939.1 | 00010 | 00195 |
| ENST00000456255.1 | 00010 | 00193 |
| ENST00000610058.1 | 00011 | 00775 |
| ENST00000607786.1 | 00011 | 00735 |
| ENST00000439898.1 | 00011 | 00255 |
| ENST00000519929.1 | 00011 | 00185 |
| ENST00000447181.1 | 00011 | 00275 |
| ENST00000504287.1 | 00012 | 00745 |
| ENST00000435552.1 | 00012 | 00260 |
| ENST00000366441.2 | 00012 | 00745 |
| ENST00000441790.1 | 00012 | 00780 |
| ENST00000505018.1 | 00012 | 00755 |
| ENST00000496733.2 | 00012 | 00730 |
| ENST00000440322.1 | 00012 | 00770 |
| ENST00000514600.1 | 00012 | 00725 |
| ENST00000441272.2 | 00013 | 00265 |
| ENST00000466034.1 | 00013 | 00525 |
| ENST00000587085.1 | 00013 | 00750 |
| ENST00000399543.1 | 00013 | 00230 |
| ENST00000595732.1 | 00013 | 00220 |
| ENST00000399152.2 | 00013 | 00705 |
| ENST00000414128.1 | 00014 | 00215 |
| ENST00000502934.1 | 00014 | 00765 |
| ENST00000441053.1 | 00014 | 00255 |
| ENST00000422417.1 | 00014 | 00253 |
| ENST00000422038.1 | 00014 | 00765 |
| ENST00000607723.1 | 00015 | 00750 |
| ENST00000503037.1 | 00015 | 00195 |
| ENST00000515811.1 | 00015 | 00815 |
| ENST00000424215.1 | 00015 | 00230 |
| ENST00000482381.1 | 00015 | 00240 |
| ENST00000410830.1 | 00015 | 00235 |
| ENST00000513572.1 | 00016 | 00760 |
| ENST00000594898.1 | 00016 | 00783 |
| ENST00000479610.1 | 00016 | 00255 |
| ENST00000502861.1 | 00016 | 00790 |
| ENST00000455541.1 | 00016 | 00205 |
| ENST00000459861.1 | 00016 | 00235 |
| ENST00000424592.1 | 00016 | 00720 |
| ENST00000424246.1 | 00017 | 00750 |
| ENST00000492209.1 | 00017 | 00265 |
| ENST00000448134.1 | 00017 | 00230 |
| ENST00000510853.2 | 00017 | 00240 |
| ENST00000431911.1 | 00017 | 00200 |
| ENST00000451711.1 | 00017 | 00215 |
| ENST00000452618.1 | 00017 | 00705 |
| ENST00000568928.1 | 00017 | 00765 |
| ENST00000563320.1 | 00018 | 00775 |
| ENST00000437488.1 | 00018 | 00240 |
| ENST00000443066.2 | 00018 | 00743 |
| ENST00000445791.1 | 00018 | 00745 |
| ENST00000457169.1 | 00018 | 00685 |
| ENST00000417260.1 | 00018 | 00765 |
| ENST00000448977.1 | 00018 | 00705 |
| ENST00000509745.1 | 00019 | 00230 |
| ENST00000420272.2 | 00019 | 00250 |
| ENST00000447761.1 | 00019 | 00720 |
| ENST00000449845.1 | 00019 | 00220 |
| ENST00000527035.1 | 00019 | 00215 |
| ENST00000484765.2 | 00020 | 00255 |
| ENST00000428891.1 | 00020 | 00240 |
| ENST00000450325.1 | 00021 | 00255 |
| ENST00000430542.1 | 00021 | 00785 |
| ENST00000522525.1 | 00021 | 00735 |
| ENST00000507582.1 | 00021 | 00240 |
| ENST00000505877.1 | 00021 | 00775 |
| ENST00000602445.1 | 00022 | 00525 |
| ENST00000431569.1 | 00022 | 00668 |
| ENST00000609450.1 | 00022 | 00225 |
| ENST00000501965.2 | 00022 | 00710 |
| ENST00000441026.1 | 00022 | 00725 |
| ENST00000431500.2 | 00022 | 00735 |
| ENST00000432125.2 | 00022 | 00765 |
| ENST00000505668.1 | 00023 | 00720 |
| ENST00000609549.1 | 00023 | 00250 |
| ENST00000505736.1 | 00023 | 00755 |
| ENST00000523648.1 | 00023 | 00255 |
| ENST00000458254.1 | 00023 | 00215 |
| ENST00000508719.1 | 00023 | 00750 |
| ENST00000514526.1 | 00023 | 00175 |
| ENST00000601486.1 | 00023 | 00225 |
| ENST00000461864.1 | 00023 | 00755 |
| ENST00000502100.2 | 00023 | 00210 |
| ENST00000510946.1 | 00024 | 00655 |
| ENST00000417481.1 | 00024 | 00255 |
| ENST00000504436.1 | 00024 | 00250 |
| ENST00000508352.1 | 00024 | 00235 |
| ENST00000509416.1 | 00024 | 00780 |
| ENST00000521819.1 | 00025 | 00245 |
| ENST00000455929.1 | 00025 | 00810 |
| ENST00000507361.1 | 00025 | 00250 |
| ENST00000460796.1 | 00025 | 00265 |
| ENST00000608774.1 | 00025 | 00243 |
| ENST00000449783.1 | 00025 | 00735 |
| ENST00000444037.1 | 00026 | 00250 |
| ENST00000601586.1 | 00026 | 00248 |
| ENST00000508847.1 | 00026 | 00255 |
| ENST00000421696.2 | 00026 | 00660 |
| ENST00000601500.1 | 00026 | 00710 |
| ENST00000432981.1 | 00027 | 00200 |
| ENST00000504046.1 | 00027 | 00800 |
| ENST00000607662.1 | 00027 | 00705 |
| ENST00000487624.1 | 00027 | 00720 |
| ENST00000340444.1 | 00027 | 00270 |
| ENST00000430048.1 | 00027 | 00740 |
| ENST00000453665.1 | 00028 | 00280 |
| ENST00000607797.1 | 00028 | 00735 |
| ENST00000446139.1 | 00028 | 00745 |
| ENST00000589496.2 | 00028 | 00745 |
| ENST00000601913.1 | 00028 | 00580 |
| ENST00000431557.1 | 00029 | 00245 |
| ENST00000439050.1 | 00029 | 00750 |
| ENST00000494900.1 | 00029 | 00680 |
| ENST00000456687.3 | 00029 | 00260 |
| ENST00000505162.1 | 00029 | 00725 |
| ENST00000597366.1 | 00030 | 00715 |
| ENST00000566366.1 | 00030 | 00290 |
| ENST00000434207.1 | 00030 | 00715 |
| ENST00000609168.1 | 00030 | 00715 |
| ENST00000436488.1 | 00030 | 00250 |
| ENST00000506852.1 | 00031 | 00700 |
| ENST00000452809.1 | 00031 | 00675 |
| ENST00000442410.2 | 00031 | 00305 |
| ENST00000609354.1 | 00031 | 00725 |
| ENST00000429315.3 | 00032 | 00285 |
| ENST00000496488.1 | 00032 | 00215 |
| ENST00000421157.1 | 00032 | 00735 |
| ENST00000498413.1 | 00032 | 00245 |
| ENST00000511693.1 | 00033 | 00160 |
| ENST00000602433.1 | 00033 | 00775 |
| ENST00000507957.1 | 00034 | 00690 |
| ENST00000443562.1 | 00034 | 00245 |
| ENST00000577528.1 | 00034 | 00250 |
| ENST00000415706.1 | 00034 | 00675 |
| ENST00000439964.1 | 00035 | 00260 |
| ENST00000503593.1 | 00035 | 00675 |
| ENST00000498457.1 | 00035 | 00285 |
| ENST00000451992.2 | 00035 | 00205 |
| ENST00000608465.1 | 00035 | 00740 |
| ENST00000244820.2 | 00035 | 00720 |
| ENST00000413304.2 | 00035 | 00275 |
| ENST00000515184.1 | 00035 | 00260 |
| ENST00000452795.2 | 00035 | 00243 |
| ENST00000427213.1 | 00036 | 00750 |
| ENST00000424451.1 | 00036 | 00665 |
| ENST00000503403.1 | 00036 | 00700 |
| ENST00000416506.1 | 00037 | 00240 |
| ENST00000432038.1 | 00037 | 00255 |
| ENST00000521805.1 | 00037 | 00255 |
| ENST00000425914.2 | 00037 | 00285 |
| ENST00000604716.1 | 00037 | 00260 |
| ENST00000507565.1 | 00037 | 00720 |
| ENST00000367716.3 | 00037 | 00255 |
| ENST00000514239.1 | 00037 | 00270 |
| ENST00000498480.1 | 00038 | 00270 |
| ENST00000512435.1 | 00038 | 00270 |
| ENST00000455988.1 | 00038 | 00660 |
| ENST00000606056.1 | 00038 | 00220 |
| ENST00000509057.1 | 00038 | 00240 |
| ENST00000608511.1 | 00038 | 00240 |
| ENST00000452212.1 | 00039 | 00315 |
| ENST00000510302.1 | 00039 | 00780 |
| ENST00000511602.1 | 00039 | 00695 |
| ENST00000515186.1 | 00039 | 00705 |
| ENST00000412092.2 | 00039 | 00330 |
| ENST00000413828.2 | 00039 | 00280 |
| ENST00000465215.1 | 00039 | 00375 |
| ENST00000606582.1 | 00040 | 00680 |
| ENST00000417786.1 | 00040 | 00275 |
| ENST00000514368.1 | 00040 | 00258 |
| ENST00000585826.1 | 00040 | 00680 |
| ENST00000441245.1 | 00041 | 00295 |
| ENST00000472821.1 | 00041 | 00595 |
| ENST00000427439.1 | 00041 | 00725 |
| ENST00000588108.1 | 00041 | 00210 |
| ENST00000441504.1 | 00041 | 00683 |
| ENST00000494582.1 | 00041 | 00675 |
| ENST00000506465.1 | 00041 | 00280 |
| ENST00000511385.1 | 00041 | 00320 |
| ENST00000421640.1 | 00041 | 00610 |
| ENST00000437290.2 | 00042 | 00255 |
| ENST00000602108.1 | 00042 | 00260 |
| ENST00000416349.1 | 00042 | 00705 |
| ENST00000445180.2 | 00042 | 00235 |
| ENST00000511592.1 | 00042 | 00675 |
| ENST00000477246.1 | 00042 | 00300 |
| ENST00000512155.1 | 00042 | 00310 |
| ENST00000608077.1 | 00042 | 00290 |
| ENST00000415629.2 | 00043 | 00275 |
| ENST00000424474.2 | 00043 | 00280 |
| ENST00000605740.1 | 00043 | 00730 |
| ENST00000489690.1 | 00043 | 00283 |
| ENST00000607950.1 | 00043 | 00285 |
| ENST00000513219.1 | 00043 | 00265 |
| ENST00000419614.1 | 00043 | 00675 |
| ENST00000413234.1 | 00043 | 00285 |
| ENST00000420549.1 | 00043 | 00720 |
| ENST00000458698.2 | 00043 | 00290 |
| ENST00000482019.1 | 00043 | 00310 |
| ENST00000509984.1 | 00044 | 00270 |
| ENST00000501927.2 | 00044 | 00285 |
| ENST00000439024.1 | 00044 | 00658 |
| ENST00000511993.1 | 00044 | 00215 |
| ENST00000515128.1 | 00044 | 00665 |
| ENST00000604677.1 | 00044 | 00665 |
| ENST00000606180.1 | 00045 | 00250 |
| ENST00000577914.1 | 00045 | 00290 |
| ENST00000440900.1 | 00045 | 00690 |
| ENST00000431311.1 | 00046 | 00295 |
| ENST00000484076.1 | 00047 | 00665 |
| ENST00000451101.1 | 00047 | 00265 |
| ENST00000381078.1 | 00047 | 00290 |
| ENST00000609423.1 | 00047 | 00250 |
| ENST00000513955.1 | 00048 | 00730 |
| ENST00000445070.1 | 00048 | 00720 |
| ENST00000440574.1 | 00048 | 00720 |
| ENST00000435643.1 | 00048 | 00260 |
| ENST00000609657.1 | 00048 | 00720 |
| ENST00000512464.1 | 00048 | 00725 |
| ENST00000411509.1 | 00048 | 00635 |
| ENST00000607412.1 | 00049 | 00675 |
| ENST00000430520.1 | 00049 | 00260 |
| ENST00000512882.2 | 00049 | 00665 |
| ENST00000511327.1 | 00049 | 00735 |
| ENST00000436885.1 | 00049 | 00275 |
| ENST00000604215.1 | 00049 | 00685 |
| ENST00000443205.1 | 00049 | 00610 |
| ENST00000504869.1 | 00049 | 00255 |
| ENST00000587568.1 | 00050 | 00690 |
| ENST00000608154.1 | 00050 | 00320 |
| ENST00000510570.1 | 00050 | 00698 |
| ENST00000451289.1 | 00050 | 00720 |
| ENST00000458155.1 | 00050 | 00710 |
| ENST00000606186.1 | 00050 | 00295 |
| ENST00000413525.1 | 00050 | 00650 |
| ENST00000438158.1 | 00050 | 00295 |
| ENST00000483840.1 | 00050 | 00760 |
| ENST00000604448.1 | 00051 | 00725 |
| ENST00000414086.1 | 00051 | 00250 |
| ENST00000457440.1 | 00052 | 00280 |
| ENST00000503998.1 | 00052 | 00720 |
| ENST00000603884.1 | 00052 | 00735 |
| ENST00000444649.1 | 00052 | 00280 |
| ENST00000504249.1 | 00052 | 00280 |
| ENST00000433876.2 | 00053 | 00270 |
| ENST00000607946.1 | 00053 | 00265 |
| ENST00000508696.1 | 00053 | 00708 |
| ENST00000503009.1 | 00054 | 00275 |
| ENST00000488287.1 | 00054 | 00705 |
| ENST00000504989.1 | 00055 | 00295 |
| ENST00000431999.1 | 00055 | 00250 |
| ENST00000513871.1 | 00055 | 00265 |
| ENST00000450709.1 | 00055 | 00255 |
| ENST00000416395.1 | 00056 | 00275 |
| ENST00000568817.1 | 00056 | 00700 |
| ENST00000437267.2 | 00056 | 00245 |
| ENST00000466225.2 | 00056 | 00255 |
| ENST00000510230.1 | 00057 | 00283 |
| ENST00000453039.1 | 00057 | 00780 |
| ENST00000500224.2 | 00057 | 00225 |
| ENST00000510198.1 | 00057 | 00275 |
| ENST00000515199.1 | 00058 | 00700 |
| ENST00000505626.1 | 00058 | 00725 |
| ENST00000522350.1 | 00058 | 00240 |
| ENST00000507236.1 | 00058 | 00265 |
| ENST00000417557.1 | 00058 | 00735 |
| ENST00000609881.1 | 00058 | 00295 |
| ENST00000458359.1 | 00059 | 00270 |
| ENST00000564748.1 | 00059 | 00710 |
| ENST00000427892.1 | 00059 | 00275 |
| ENST00000511634.1 | 00059 | 00285 |
| ENST00000606287.1 | 00061 | 00290 |
| ENST00000456469.1 | 00061 | 00270 |
| ENST00000418620.1 | 00062 | 00265 |
| ENST00000602484.1 | 00062 | 00735 |
| ENST00000473713.1 | 00063 | 00275 |
| ENST00000503321.1 | 00064 | 00290 |
| ENST00000432386.1 | 00065 | 00280 |
| ENST00000440358.1 | 00065 | 00275 |
| ENST00000440371.1 | 00066 | 00290 |
| ENST00000457364.2 | 00066 | 00300 |
| ENST00000510349.1 | 00066 | 00290 |
| ENST00000528692.1 | 00067 | 00295 |
| ENST00000606239.1 | 00067 | 00710 |
| ENST00000443928.2 | 00067 | 00295 |
| ENST00000453828.1 | 00067 | 00300 |
| ENST00000608123.1 | 00067 | 00295 |
| ENST00000602434.1 | 00067 | 00715 |
| ENST00000441870.1 | 00067 | 00295 |
| ENST00000449012.1 | 00068 | 00270 |
| ENST00000610235.1 | 00069 | 00285 |
| ENST00000427176.1 | 00070 | 00295 |
| ENST00000417324.1 | 00070 | 00300 |
| ENST00000610094.1 | 00071 | 00290 |
| ENST00000594608.1 | 00071 | 00300 |
| ENST00000607338.1 | 00071 | 00295 |
| ENST00000606696.1 | 00073 | 00700 |
| ENST00000513926.1 | 00073 | 00285 |
| ENST00000596887.1 | 00074 | 00705 |
| ENST00000433084.1 | 00074 | 00290 |
| ENST00000600928.1 | 00074 | 00240 |
| ENST00000606233.1 | 00075 | 00280 |
| ENST00000439795.1 | 00076 | 00280 |
| ENST00000310916.3 | 00076 | 00710 |
| ENST00000457079.1 | 00077 | 00295 |
| ENST00000443093.2 | 00078 | 00255 |
| ENST00000443237.1 | 00078 | 00300 |
| ENST00000424628.1 | 00079 | 00290 |
| ENST00000587162.1 | 00079 | 00300 |
| ENST00000609900.1 | 00080 | 00705 |
| ENST00000608069.1 | 00081 | 00775 |
| ENST00000600062.1 | 00081 | 00700 |
| ENST00000566840.1 | 00081 | 00295 |
| ENST00000507776.1 | 00082 | 00250 |
| ENST00000453732.1 | 00083 | 00290 |
| ENST00000452553.1 | 00083 | 00295 |
| ENST00000504250.1 | 00084 | 00285 |
| ENST00000417926.1 | 00084 | 00710 |
| ENST00000512035.1 | 00084 | 00285 |
| ENST00000515286.1 | 00084 | 00270 |
| ENST00000587306.1 | 00085 | 00280 |
| ENST00000557729.1 | 00086 | 00245 |
| ENST00000610091.1 | 00086 | 00715 |
| ENST00000602919.1 | 00086 | 00300 |
| ENST00000441773.1 | 00086 | 00295 |
| ENST00000589150.1 | 00087 | 00300 |
| ENST00000589487.1 | 00087 | 00258 |
| ENST00000503589.1 | 00087 | 00280 |
| ENST00000414765.1 | 00090 | 00295 |
| ENST00000433186.1 | 00090 | 00278 |
| ENST00000427804.1 | 00091 | 00295 |
| ENST00000439246.1 | 00091 | 00265 |
| ENST00000431268.1 | 00091 | 00260 |
| ENST00000510637.1 | 00091 | 00745 |
| ENST00000446029.1 | 00092 | 00288 |
| ENST00000503488.2 | 00092 | 00705 |
| ENST00000462835.1 | 00093 | 00285 |
| ENST00000435557.1 | 00093 | 00290 |
| ENST00000515405.1 | 00093 | 00240 |
| ENST00000423921.1 | 00093 | 00190 |
| ENST00000515842.1 | 00094 | 00295 |
| ENST00000599448.1 | 00094 | 00235 |
| ENST00000605698.1 | 00095 | 00300 |
| ENST00000510753.1 | 00095 | 00715 |
| ENST00000414634.1 | 00097 | 00293 |
| ENST00000517934.1 | 00098 | 00270 |
| ENST00000510850.1 | 00099 | 00700 |
| ENST00000414688.1 | 00099 | 00710 |
| ENST00000273083.3 | 00099 | 00290 |
| ENST00000552418.1 | 00099 | 00285 |
| ENST00000436248.3 | 00100 | 00275 |
| ENST00000439893.1 | 00102 | 00250 |
| ENST00000427354.1 | 00102 | 00235 |
| ENST00000517299.1 | 00103 | 00295 |
| ENST00000569711.1 | 00104 | 00280 |
| ENST00000453347.1 | 00106 | 00300 |
| ENST00000507373.1 | 00107 | 00295 |
| ENST00000453155.1 | 00108 | 00295 |
| ENST00000465946.1 | 00108 | 00300 |
| ENST00000515086.1 | 00109 | 00280 |
| ENST00000449086.1 | 00110 | 00745 |
| ENST00000540997.1 | 00111 | 00705 |
| ENST00000572124.1 | 00111 | 00705 |
| ENST00000508986.1 | 00120 | 00288 |
| ENST00000505028.1 | 00120 | 00295 |
| ENST00000426444.1 | 00122 | 00285 |
| ENST00000507916.2 | 00124 | 00700 |
| ENST00000514265.1 | 00126 | 00725 |
| ENST00000510632.1 | 00126 | 00295 |
| ENST00000597651.1 | 00127 | 00295 |
| ENST00000443800.1 | 00132 | 00300 |
| ENST00000508255.1 | 00134 | 00295 |
| ENST00000607847.1 | 00137 | 00705 |
| ENST00000430904.1 | 00140 | 00295 |
| ENST00000594622.1 | 00142 | 00700 |
| ENST00000436121.1 | 00144 | 00710 |
| ENST00000503757.1 | 00145 | 00280 |
| ENST00000507011.1 | 00146 | 00270 |
| ENST00000609270.1 | 00146 | 00735 |
| ENST00000500526.1 | 00147 | 00290 |
| ENST00000429230.1 | 00151 | 00300 |
| ENST00000601684.1 | 00155 | 00290 |
| ENST00000434306.1 | 00155 | 00705 |
| ENST00000602820.1 | 00164 | 00250 |
| ENST00000425449.1 | 00168 | 00730 |
| ENST00000433377.1 | 00169 | 00295 |
| ENST00000424528.2 | 00172 | 00710 |
| ENST00000597871.1 | 00176 | 00300 |
| ENST00000593876.1 | 00177 | 00760 |
| ENST00000412674.1 | 00184 | 00280 |
| ENST00000432658.1 | 00195 | 00718 |
| ENST00000588796.1 | 00207 | 00290 |
| ENST00000430540.1 | 00212 | 00300 |
| ENST00000565748.1 | 00215 | 00715 |
| ENST00000415543.1 | 00215 | 00275 |
| ENST00000485338.1 | 00216 | 00293 |
| ENST00000436706.1 | 00232 | 00300 |
| ENST00000431691.1 | 00235 | 00715 |
| ENST00000522762.1 | 00241 | 00290 |
| ENST00000506086.2 | 00254 | 00300 |
| ENST00000596220.1 | 00258 | 00278 |
| ENST00000468859.1 | 00262 | 00700 |
| ENST00000511241.1 | 00268 | 00290 |
| ENST00000457387.1 | 00276 | 00285 |
| ENST00000451707.1 | 00307 | 00715 |
| ENST00000524210.1 | 00317 | 00720 |
| ENST00000458182.1 | 00323 | 00280 |
| ENST00000447880.1 | 00324 | 00300 |
| ENST00000508000.1 | 00380 | 00720 |
| ENST00000432558.1 | 00463 | 00265 |
| ENST00000465347.1 | 00474 | 00300 |
| ENST00000514802.1 | 00571 | 00295 |

[0258] Comparison Between Low LVEF (LVEF≤45%) and High LVEF (LVEF>45%) at D3-D5 Serum Samples

[0259] First, samples are grouped into 2 group by a dichotomized variable: 1-month LVEF<45% and 1-month LVEF>45%.

[0260] 277 lncRNA are differentially expressed and among these, 70 lncRNA are differentially expressed and have a fold change>2 or <0.5 between the low LVEF (LVEF≤45%) and the high LVEF (LVEF>45%) groups. The p-value and the fold-change of these lncRNA are listed in the Table 36. 369 lncRNAs which have a p<0.05 and/or an individual AUC>0.7 or <0.3 are listed in Table 37.

TABLE 36
List of 70 lncRNA from Gencode database which are differentially
expressed (p < 0.05) and have a fold change > 2 or <0.5 between the low
LVEF group (LVEF ≤ 45%) and the high LVEF group (LVEF > 45%)

| | p Value | Fold change | lncRNA | p Value | Fold change |
|---|---|---|---|---|---|
| ENST00000437488.1 | 0.000 | 0.072 | ENST00000452809.1 | 0.024 | 2.386 |
| ENST00000507236.1 | 0.001 | 0.477 | ENST00000509999.1 | 0.025 | 2.321 |
| ENST00000505848.1 | 0.001 | 0.315 | ENST00000515184.1 | 0.026 | 0.456 |
| ENST00000509416.1 | 0.002 | 2.150 | ENST00000517934.1 | 0.027 | 0.288 |
| ENST00000451894.2 | 0.003 | 2.266 | ENST00000590186.1 | 0.028 | 0.248 |
| ENST00000477805.1 | 0.003 | 0.236 | ENST00000510632.1 | 0.028 | 0.389 |
| ENST00000562054.1 | 0.004 | 0.456 | ENST00000429352.1 | 0.028 | 0.497 |
| ENST00000502757.1 | 0.004 | 2.498 | ENST00000514368.1 | 0.029 | 0.335 |
| ENST00000609549.1 | 0.005 | 0.289 | ENST00000451607.1 | 0.029 | 0.252 |
| ENST00000519929.1 | 0.006 | 0.354 | ENST00000435580.1 | 0.030 | 0.343 |
| ENST00000515286.1 | 0.006 | 0.244 | ENST00000429230.1 | 0.030 | 0.213 |
| ENST00000427825.1 | 0.006 | 0.479 | ENST00000426716.1 | 0.031 | 3.178 |
| ENST00000457815.1 | 0.007 | 2.063 | ENST00000510261.1 | 0.031 | 4.086 |
| ENST00000512458.1 | 0.007 | 0.254 | ENST00000599448.1 | 0.032 | 0.324 |
| ENST00000514724.2 | 0.007 | 0.148 | ENST00000436121.1 | 0.033 | 2.086 |
| ENST00000513219.1 | 0.008 | 0.271 | ENST00000600693.1 | 0.036 | 0.359 |
| ENST00000456255.1 | 0.010 | 0.286 | ENST00000521819.1 | 0.036 | 0.195 |
| ENST00000503037.1 | 0.011 | 0.450 | ENST00000508968.1 | 0.036 | 0.314 |
| ENST00000427732.1 | 0.011 | 4.147 | ENST00000598349.1 | 0.037 | 2.579 |
| ENST00000506292.2 | 0.011 | 0.321 | ENST00000453568.1 | 0.037 | 0.410 |
| ENST00000357876.5 | 0.012 | 0.209 | ENST00000443800.1 | 0.037 | 0.396 |
| ENST00000588108.1 | 0.013 | 0.260 | ENST00000435023.1 | 0.037 | 0.487 |
| ENST00000514877.1 | 0.013 | 0.427 | ENST00000431569.1 | 0.038 | 3.721 |
| ENST00000426551.1 | 0.013 | 0.283 | ENST00000439893.1 | 0.038 | 0.390 |
| ENST00000440516.1 | 0.013 | 2.510 | ENST00000508847.1 | 0.038 | 0.256 |
| ENST00000422996.1 | 0.015 | 0.494 | ENST00000587568.1 | 0.040 | 3.573 |
| ENST00000587306.1 | 0.016 | 0.482 | ENST00000418620.1 | 0.041 | 0.248 |
| ENST00000439878.1 | 0.017 | 0.484 | ENST00000509497.1 | 0.041 | 0.337 |
| ENST00000506068.1 | 0.018 | 3.665 | ENST00000527035.1 | 0.042 | 0.369 |
| ENST00000431650.1 | 0.018 | 0.366 | ENST00000498480.1 | 0.042 | 0.447 |
| ENST00000421498.1 | 0.021 | 3.747 | ENST00000415629.2 | 0.043 | 0.145 |
| ENST00000507011.1 | 0.022 | 0.282 | ENST00000514661.1 | 0.044 | 2.482 |
| ENST00000507932.1 | 0.022 | 0.289 | ENST00000465215.1 | 0.046 | 0.179 |
| ENST00000515405.1 | 0.024 | 0.256 | ENST00000416453.2 | 0.048 | 2.769 |
| ENST00000432978.1 | 0.024 | 0.453 | ENST00000505339.1 | 0.048 | 3.529 |

TABLE 37
List of 369 IncRNA from Gencode database which are
differentially expressed (p < 0.05) and/or
have an AUC >0.7 or <0.3 between the low
LVEF group (LVEF ≤ 45%) and the high LVEF group (LVEF > 45%)

| IncRNA | p Value | auc |
|---|---|---|
| ENST00000437488.1 | 0.000 | 0.147 |
| ENST00000441790.1 | 0.000 | 0.862 |
| ENST00000587085.1 | 0.000 | 0.849 |
| ENST00000451711.1 | 0.001 | 0.156 |
| ENST00000507236.1 | 0.001 | 0.164 |
| ENST00000513955.1 | 0.001 | 0.849 |
| ENST00000505848.1 | 0.001 | 0.173 |
| ENST00000598757.1 | 0.001 | 0.191 |
| ENST00000417926.1 | 0.001 | 0.867 |
| ENST00000441053.1 | 0.001 | 0.209 |
| ENST00000444037.1 | 0.002 | 0.187 |
| ENST00000509416.1 | 0.002 | 0.844 |
| ENST00000435552.1 | 0.002 | 0.191 |
| ENST00000416930.2 | 0.002 | 0.213 |
| ENST00000438158.1 | 0.003 | 0.200 |
| ENST00000565044.1 | 0.003 | 0.196 |
| ENST00000451894.2 | 0.003 | 0.796 |
| ENST00000477805.1 | 0.003 | 0.222 |
| ENST00000450713.1 | 0.003 | 0.800 |
| ENST00000562054.1 | 0.004 | 0.191 |
| ENST00000412228.1 | 0.004 | 0.227 |
| ENST00000417324.1 | 0.004 | 0.209 |
| ENST00000513767.3 | 0.004 | 0.178 |
| ENST00000502757.1 | 0.004 | 0.804 |
| ENST00000608574.1 | 0.004 | 0.200 |
| ENST00000456026.1 | 0.005 | 0.756 |
| ENST00000609549.1 | 0.005 | 0.276 |
| ENST00000608077.1 | 0.005 | 0.253 |
| ENST00000589496.2 | 0.005 | 0.782 |
| ENST00000568384.1 | 0.005 | 0.213 |
| ENST00000440371.1 | 0.005 | 0.236 |
| ENST00000366187.2 | 0.005 | 0.791 |
| ENST00000607068.1 | 0.006 | 0.213 |
| ENST00000519929.1 | 0.006 | 0.213 |
| ENST00000504246.1 | 0.006 | 0.209 |
| ENST00000515286.1 | 0.006 | 0.218 |
| ENST00000427825.1 | 0.006 | 0.236 |
| ENST00000412294.1 | 0.006 | 0.778 |
| ENST00000512882.2 | 0.007 | 0.791 |
| ENST00000424246.1 | 0.007 | 0.769 |
| ENST00000457815.1 | 0.007 | 0.769 |
| ENST00000512458.1 | 0.007 | 0.251 |
| ENST00000510795.1 | 0.007 | 0.791 |
| ENST00000422038.1 | 0.007 | 0.756 |
| ENST00000428156.1 | 0.007 | 0.813 |
| ENST00000514724.2 | 0.007 | 0.267 |
| ENST00000418602.1 | 0.008 | 0.244 |
| ENST00000506892.1 | 0.008 | 0.258 |
| ENST00000513219.1 | 0.008 | 0.240 |
| ENST00000420365.1 | 0.008 | 0.249 |
| ENST00000602528.1 | 0.009 | 0.778 |
| ENST00000430666.1 | 0.009 | 0.218 |
| ENST00000508486.2 | 0.009 | 0.773 |
| ENST00000607216.1 | 0.010 | 0.227 |
| ENST00000456255.1 | 0.010 | 0.233 |
| ENST00000424895.1 | 0.011 | 0.747 |
| ENST00000565428.1 | 0.011 | 0.258 |
| ENST00000503037.1 | 0.011 | 0.240 |
| ENST00000503929.1 | 0.011 | 0.773 |
| ENST00000427732.1 | 0.011 | 0.769 |
| ENST00000427804.1 | 0.011 | 0.209 |
| ENST00000506292.2 | 0.011 | 0.244 |
| ENST00000452738.1 | 0.011 | 0.738 |
| ENST00000420549.1 | 0.012 | 0.804 |
| ENST00000445523.1 | 0.012 | 0.769 |
| ENST00000357876.5 | 0.012 | 0.249 |
| ENST00000513572.1 | 0.012 | 0.751 |
| ENST00000443613.2 | 0.012 | 0.240 |
| ENST00000600062.1 | 0.012 | 0.764 |
| ENST00000479610.1 | 0.012 | 0.267 |
| ENST00000588108.1 | 0.013 | 0.200 |
| ENST00000446139.1 | 0.013 | 0.791 |
| ENST00000510381.2 | 0.013 | 0.773 |
| ENST00000514877.1 | 0.013 | 0.233 |
| ENST00000426551.1 | 0.013 | 0.284 |
| ENST00000507361.1 | 0.013 | 0.244 |
| ENST00000504046.1 | 0.013 | 0.769 |
| ENST00000462431.1 | 0.013 | 0.787 |
| ENST00000491676.1 | 0.013 | 0.244 |
| ENST00000440516.1 | 0.013 | 0.764 |
| ENST00000609900.1 | 0.014 | 0.800 |
| ENST00000589150.1 | 0.014 | 0.258 |
| ENST00000596829.1 | 0.014 | 0.227 |
| ENST00000601955.1 | 0.014 | 0.271 |
| ENST00000608482.1 | 0.015 | 0.244 |
| ENST00000457489.1 | 0.015 | 0.747 |
| ENST00000422996.1 | 0.015 | 0.249 |
| ENST00000495228.1 | 0.015 | 0.253 |
| ENST00000477539.2 | 0.016 | 0.756 |
| ENST00000503616.1 | 0.016 | 0.262 |
| ENST00000587306.1 | 0.016 | 0.244 |
| ENST00000608123.1 | 0.016 | 0.267 |
| ENST00000439878.1 | 0.017 | 0.238 |
| ENST00000607002.1 | 0.017 | 0.249 |
| ENST00000466291.1 | 0.017 | 0.747 |
| ENST00000424244.1 | 0.018 | 0.253 |
| ENST00000455929.1 | 0.018 | 0.796 |
| ENST00000512417.1 | 0.018 | 0.284 |
| ENST00000506068.1 | 0.018 | 0.769 |
| ENST00000431650.1 | 0.018 | 0.276 |
| ENST00000607723.1 | 0.018 | 0.773 |
| ENST00000417765.1 | 0.019 | 0.742 |
| ENST00000607540.1 | 0.019 | 0.747 |
| ENST00000502467.1 | 0.019 | 0.693 |
| ENST00000589024.1 | 0.019 | 0.738 |
| ENST00000433219.1 | 0.019 | 0.276 |
| ENST00000426881.2 | 0.019 | 0.258 |
| ENST00000443928.2 | 0.019 | 0.244 |
| ENST00000567904.1 | 0.020 | 0.258 |
| ENST00000439479.1 | 0.020 | 0.276 |
| ENST00000473001.1 | 0.020 | 0.276 |
| ENST00000429666.1 | 0.020 | 0.247 |
| ENST00000421498.1 | 0.021 | 0.676 |
| ENST00000455038.1 | 0.021 | 0.280 |
| ENST00000433175.2 | 0.022 | 0.267 |
| ENST00000451101.1 | 0.022 | 0.267 |
| ENST00000608777.1 | 0.022 | 0.267 |
| ENST00000602919.1 | 0.022 | 0.253 |
| ENST00000507011.1 | 0.022 | 0.242 |
| ENST00000360083.3 | 0.022 | 0.760 |
| ENST00000420272.2 | 0.022 | 0.280 |
| ENST00000507932.1 | 0.022 | 0.298 |
| ENST00000417644.1 | 0.023 | 0.258 |
| ENST00000450746.1 | 0.023 | 0.707 |
| ENST00000456687.3 | 0.023 | 0.267 |
| ENST00000609354.1 | 0.024 | 0.716 |
| ENST00000515405.1 | 0.024 | 0.249 |
| ENST00000432978.1 | 0.024 | 0.258 |
| ENST00000452809.1 | 0.024 | 0.698 |
| ENST00000417795.1 | 0.025 | 0.284 |
| ENST00000509999.1 | 0.025 | 0.713 |
| ENST00000553319.1 | 0.025 | 0.276 |
| ENST00000441272.2 | 0.025 | 0.271 |
| ENST00000445180.2 | 0.026 | 0.284 |
| ENST00000452840.1 | 0.026 | 0.724 |
| ENST00000515153.1 | 0.026 | 0.244 |
| ENST00000606696.1 | 0.026 | 0.733 |
| ENST00000515184.1 | 0.026 | 0.280 |
| ENST00000596887.1 | 0.027 | 0.769 |
| ENST00000450944.1 | 0.027 | 0.271 |
| ENST00000510935.1 | 0.027 | 0.284 |
| ENST00000565538.1 | 0.027 | 0.800 |
| ENST00000517934.1 | 0.027 | 0.284 |
| ENST00000569860.1 | 0.027 | 0.742 |
| ENST00000415628.1 | 0.027 | 0.293 |
| ENST00000607831.1 | 0.027 | 0.258 |
| ENST00000594798.1 | 0.027 | 0.271 |
| ENST00000497573.1 | 0.028 | 0.253 |
| ENST00000416689.1 | 0.028 | 0.249 |
| ENST00000507424.1 | 0.028 | 0.293 |
| ENST00000566527.1 | 0.028 | 0.720 |
| ENST00000590186.1 | 0.028 | 0.236 |
| ENST00000510632.1 | 0.028 | 0.298 |
| ENST00000429352.1 | 0.028 | 0.280 |
| ENST00000510175.1 | 0.029 | 0.738 |
| ENST00000514368.1 | 0.029 | 0.304 |
| ENST00000451607.1 | 0.029 | 0.244 |
| ENST00000448786.1 | 0.030 | 0.700 |
| ENST00000435580.1 | 0.030 | 0.320 |
| ENST00000429230.1 | 0.030 | 0.236 |
| ENST00000508752.1 | 0.030 | 0.707 |
| ENST00000426716.1 | 0.031 | 0.713 |
| ENST00000423600.1 | 0.031 | 0.271 |
| ENST00000417976.1 | 0.031 | 0.707 |
| ENST00000510261.1 | 0.031 | 0.711 |
| ENST00000442864.1 | 0.031 | 0.698 |
| ENST00000442956.1 | 0.031 | 0.276 |
| ENST00000458698.2 | 0.031 | 0.284 |
| ENST00000506305.1 | 0.032 | 0.280 |
| ENST00000599448.1 | 0.032 | 0.258 |
| ENST00000505347.1 | 0.032 | 0.293 |
| ENST00000436121.1 | 0.033 | 0.760 |
| ENST00000606217.1 | 0.033 | 0.284 |
| ENST00000608360.1 | 0.033 | 0.298 |
| ENST00000439024.1 | 0.033 | 0.667 |
| ENST00000414030.1 | 0.033 | 0.276 |
| ENST00000437798.1 | 0.034 | 0.329 |
| ENST00000449845.1 | 0.034 | 0.284 |
| ENST00000566840.1 | 0.034 | 0.262 |
| ENST00000460574.1 | 0.034 | 0.280 |
| ENST00000438553.1 | 0.034 | 0.729 |
| ENST00000605571.1 | 0.034 | 0.267 |
| ENST00000439186.1 | 0.034 | 0.727 |
| ENST00000412369.1 | 0.034 | 0.298 |
| ENST00000412483.1 | 0.035 | 0.262 |
| ENST00000607830.1 | 0.035 | 0.284 |
| ENST00000505348.1 | 0.035 | 0.729 |
| ENST00000600693.1 | 0.036 | 0.267 |
| ENST00000438002.1 | 0.036 | 0.293 |
| ENST00000431435.1 | 0.036 | 0.716 |
| ENST00000521819.1 | 0.036 | 0.331 |
| ENST00000569502.1 | 0.036 | 0.293 |
| ENST00000508968.1 | 0.036 | 0.287 |
| ENST00000413304.2 | 0.037 | 0.320 |
| ENST00000562952.1 | 0.037 | 0.724 |
| ENST00000598349.1 | 0.037 | 0.649 |
| ENST00000453568.1 | 0.037 | 0.280 |
| ENST00000482019.1 | 0.037 | 0.324 |
| ENST00000418244.1 | 0.037 | 0.269 |
| ENST00000443800.1 | 0.037 | 0.271 |
| ENST00000435023.1 | 0.037 | 0.307 |
| ENST00000440545.1 | 0.037 | 0.724 |
| ENST00000452509.1 | 0.037 | 0.724 |
| ENST00000431569.1 | 0.038 | 0.611 |
| ENST00000439893.1 | 0.038 | 0.187 |
| ENST00000508847.1 | 0.038 | 0.311 |
| ENST00000453128.1 | 0.039 | 0.267 |
| ENST00000458254.1 | 0.039 | 0.267 |
| ENST00000594189.1 | 0.039 | 0.253 |
| ENST00000502934.1 | 0.040 | 0.711 |
| ENST00000587568.1 | 0.040 | 0.720 |
| ENST00000431985.1 | 0.040 | 0.302 |
| ENST00000507344.1 | 0.040 | 0.738 |
| ENST00000471990.2 | 0.041 | 0.702 |
| ENST00000597543.1 | 0.041 | 0.702 |
| ENST00000418620.1 | 0.041 | 0.302 |
| ENST00000443205.1 | 0.041 | 0.684 |
| ENST00000483840.1 | 0.041 | 0.716 |
| ENST00000509497.1 | 0.041 | 0.302 |
| ENST00000412134.1 | 0.042 | 0.742 |
| ENST00000511517.1 | 0.042 | 0.311 |
| ENST00000503267.1 | 0.042 | 0.311 |
| ENST00000607662.1 | 0.042 | 0.724 |
| ENST00000507517.1 | 0.042 | 0.307 |
| ENST00000527035.1 | 0.042 | 0.282 |
| ENST00000498480.1 | 0.042 | 0.276 |
| ENST00000507251.1 | 0.042 | 0.711 |
| ENST00000417651.1 | 0.042 | 0.280 |
| ENST00000415629.2 | 0.043 | 0.333 |
| ENST00000417805.1 | 0.043 | 0.711 |
| ENST00000606069.1 | 0.043 | 0.298 |
| ENST00000431362.1 | 0.043 | 0.253 |
| ENST00000610091.1 | 0.043 | 0.729 |
| ENST00000515422.1 | 0.044 | 0.698 |
| ENST00000514661.1 | 0.044 | 0.644 |
| ENST00000608605.1 | 0.044 | 0.311 |
| ENST00000414625.2 | 0.044 | 0.316 |
| ENST00000514600.1 | 0.044 | 0.787 |
| ENST00000416209.2 | 0.044 | 0.293 |
| ENST00000597366.1 | 0.044 | 0.707 |
| ENST00000417695.1 | 0.044 | 0.293 |
| ENST00000448901.1 | 0.044 | 0.760 |
| ENST00000424612.1 | 0.045 | 0.311 |
| ENST00000606287.1 | 0.045 | 0.289 |
| ENST00000607594.1 | 0.045 | 0.689 |
| ENST00000367716.3 | 0.045 | 0.293 |
| ENST00000607541.1 | 0.045 | 0.293 |
| ENST00000432386.1 | 0.045 | 0.298 |
| ENST00000508799.1 | 0.045 | 0.284 |
| ENST00000605698.1 | 0.045 | 0.311 |
| ENST00000399543.1 | 0.045 | 0.262 |
| ENST00000513540.1 | 0.045 | 0.733 |
| ENST00000427819.1 | 0.046 | 0.716 |
| ENST00000509548.2 | 0.046 | 0.676 |
| ENST00000424689.1 | 0.046 | 0.298 |
| ENST00000465215.1 | 0.046 | 0.458 |
| ENST00000512637.1 | 0.046 | 0.311 |
| ENST00000436207.2 | 0.046 | 0.771 |
| ENST00000508696.1 | 0.046 | 0.711 |
| ENST00000609881.1 | 0.046 | 0.298 |
| ENST00000515243.1 | 0.046 | 0.276 |
| ENST00000438414.1 | 0.047 | 0.338 |
| ENST00000458007.2 | 0.047 | 0.271 |
| ENST00000424748.1 | 0.047 | 0.293 |
| ENST00000508959.1 | 0.047 | 0.302 |
| ENST00000596329.1 | 0.047 | 0.364 |
| ENST00000446521.1 | 0.048 | 0.284 |
| ENST00000512965.1 | 0.048 | 0.704 |
| ENST00000416453.2 | 0.048 | 0.658 |
| ENST00000505339.1 | 0.048 | 0.578 |
| ENST00000417563.1 | 0.049 | 0.713 |
| ENST00000440322.1 | 0.049 | 0.716 |
| ENST00000596632.1 | 0.049 | 0.298 |
| ENST00000451289.1 | 0.049 | 0.716 |
| ENST00000437267.2 | 0.049 | 0.276 |
| ENST00000520443.1 | 0.049 | 0.671 |
| ENST00000523648.1 | 0.049 | 0.316 |
| ENST00000449140.2 | 0.049 | 0.284 |
| ENST00000594351.1 | 0.051 | 0.293 |
| ENST00000506660.1 | 0.051 | 0.293 |
| ENST00000608881.1 | 0.051 | 0.711 |
| ENST00000463978.1 | 0.051 | 0.720 |
| ENST00000507782.1 | 0.051 | 0.293 |
| ENST00000436475.2 | 0.051 | 0.720 |
| ENST00000512464.1 | 0.052 | 0.720 |
| ENST00000599387.1 | 0.052 | 0.702 |
| ENST00000441587.2 | 0.052 | 0.716 |
| ENST00000504765.1 | 0.052 | 0.716 |
| ENST00000430542.1 | 0.053 | 0.720 |
| ENST00000549744.1 | 0.053 | 0.284 |
| ENST00000441459.1 | 0.053 | 0.298 |
| ENST00000453988.1 | 0.055 | 0.249 |
| ENST00000414634.1 | 0.056 | 0.278 |
| ENST00000515842.1 | 0.056 | 0.289 |
| ENST00000456897.1 | 0.057 | 0.284 |
| ENST00000449673.1 | 0.057 | 0.276 |
| ENST00000511091.1 | 0.057 | 0.702 |
| ENST00000449783.1 | 0.057 | 0.733 |
| ENST00000414938.1 | 0.058 | 0.253 |
| ENST00000515811.1 | 0.058 | 0.716 |
| ENST00000589853.1 | 0.060 | 0.711 |
| ENST00000476125.1 | 0.061 | 0.707 |
| ENST00000451992.2 | 0.062 | 0.262 |
| ENST00000562191.1 | 0.062 | 0.724 |
| ENST00000505572.1 | 0.062 | 0.716 |
| ENST00000434572.1 | 0.062 | 0.262 |
| ENST00000454348.1 | 0.064 | 0.271 |
| ENST00000482609.1 | 0.064 | 0.262 |
| ENST00000511241.1 | 0.064 | 0.213 |
| ENST00000504263.1 | 0.070 | 0.716 |
| ENST00000418925.1 | 0.071 | 0.298 |
| ENST00000417482.1 | 0.071 | 0.271 |
| ENST00000514265.1 | 0.072 | 0.742 |
| ENST00000467438.1 | 0.072 | 0.244 |
| ENST00000608069.1 | 0.073 | 0.711 |
| ENST00000587696.1 | 0.076 | 0.293 |
| ENST00000609583.1 | 0.076 | 0.300 |
| ENST00000446411.1 | 0.076 | 0.738 |
| ENST00000443093.2 | 0.077 | 0.253 |
| ENST00000431759.1 | 0.077 | 0.289 |
| ENST00000418387.1 | 0.078 | 0.733 |
| ENST00000419609.1 | 0.079 | 0.716 |
| ENST00000466225.2 | 0.079 | 0.280 |
| ENST00000513926.1 | 0.081 | 0.298 |
| ENST00000437631.1 | 0.082 | 0.760 |
| ENST00000430520.1 | 0.082 | 0.296 |
| ENST00000506852.1 | 0.084 | 0.751 |
| ENST00000510753.1 | 0.085 | 0.707 |
| ENST00000447389.1 | 0.089 | 0.716 |
| ENST00000436262.1 | 0.091 | 0.271 |
| ENST00000496242.1 | 0.091 | 0.280 |
| ENST00000453324.1 | 0.092 | 0.280 |
| ENST00000602108.1 | 0.096 | 0.267 |
| ENST00000505538.1 | 0.099 | 0.298 |
| ENST00000606056.1 | 0.101 | 0.280 |
| ENST00000508719.1 | 0.102 | 0.702 |
| ENST00000512370.1 | 0.107 | 0.271 |
| ENST00000427421.1 | 0.107 | 0.293 |
| ENST00000609097.1 | 0.108 | 0.711 |
| ENST00000602433.1 | 0.116 | 0.720 |
| ENST00000512090.1 | 0.117 | 0.298 |
| ENST00000588944.1 | 0.118 | 0.702 |
| ENST00000426519.1 | 0.119 | 0.716 |
| ENST00000506454.1 | 0.121 | 0.720 |
| ENST00000515337.1 | 0.126 | 0.271 |
| ENST00000505371.2 | 0.127 | 0.296 |
| ENST00000503685.1 | 0.131 | 0.289 |
| ENST00000503163.1 | 0.132 | 0.271 |
| ENST00000504829.1 | 0.136 | 0.707 |
| ENST00000431856.1 | 0.136 | 0.716 |
| ENST00000607164.1 | 0.138 | 0.738 |
| ENST00000503113.1 | 0.141 | 0.293 |
| ENST00000503320.1 | 0.150 | 0.298 |
| ENST00000356684.3 | 0.156 | 0.702 |
| ENST00000565748.1 | 0.156 | 0.702 |
| ENST00000423921.1 | 0.158 | 0.276 |
| ENST00000462835.1 | 0.158 | 0.289 |
| ENST00000512185.1 | 0.158 | 0.298 |
| ENST00000513591.1 | 0.162 | 0.298 |
| ENST00000366278.2 | 0.165 | 0.711 |
| ENST00000505018.1 | 0.166 | 0.760 |
| ENST00000453370.1 | 0.166 | 0.716 |
| ENST00000502100.2 | 0.178 | 0.289 |
| ENST00000416221.1 | 0.190 | 0.720 |
| ENST00000596220.1 | 0.195 | 0.267 |
| ENST00000593876.1 | 0.291 | 0.742 |
| ENST00000602972.1 | 0.335 | 0.284 |
| ENST00000456146.1 | 0.346 | 0.718 |
| ENST00000607769.1 | 0.539 | 0.293 |

[0261] Comparison Between Low LVEF (LVEF≤40%) and High LVEF (LVEF>40%) at D0 in Serum Samples of AMI Patients

[0262] First, samples are grouped into 2 groups by a dichotomized variable: 1-month LVEF<40% and 1-month LVEF>40%.

[0263] 273 lncRNA are differentially expressed and among these, 83 lncRNA are differentially expressed and have a fold change>2 or <0.5 between the low LVEF (LVEF≤40%) and the high LVEF (LVEF>40%). 3 lncRNAs are common to D3 samples (ENST00000421563.1, ENST00000443562.1, ENST00000455988.1). The p-value and the fold-change of these lncRNA are listed in the Table 38. In Table 39, 235 lncRNAs which have a p<0.05 and an individual AUC>0.7 or <0.3 are listed in Table 39.

TABLE 38
List of 83 lncRNA from Gencode database which are differentially
expressed (p < 0.05) and have a fold change > 2 or <0.5 between the low
LVEF group (LVEF ≤ 40%) and the high LVEF group (LVEF > 40%)

| lncRNA | p Value | fold change |
|---|---|---|
| ENST00000510165.1 | 0.000 | 0.454 |
| ENST00000449154.1 | 0.001 | 3.668 |
| ENST00000523354.1 | 0.001 | 2.383 |
| ENST00000598798.1 | 0.001 | 3.678 |
| ENST00000421563.1 | 0.001 | 2.688 |
| ENST00000513851.1 | 0.002 | 2.445 |
| ENST00000515842.1 | 0.002 | 0.453 |
| ENST00000508845.1 | 0.004 | 2.084 |
| ENST00000506338.1 | 0.004 | 3.476 |
| ENST00000453015.1 | 0.006 | 0.491 |
| ENST00000505997.1 | 0.006 | 12.552 |
| ENST00000507435.1 | 0.007 | 4.142 |
| ENST00000504368.1 | 0.007 | 2.362 |
| ENST00000420672.1 | 0.008 | 7.02E+28 |
| ENST00000504165.1 | 0.008 | 2.796 |
| ENST00000412311.1 | 0.009 | 6.569 |
| ENST00000454183.1 | 0.009 | 4.501 |
| ENST00000422253.1 | 0.010 | 3.571 |
| ENST00000490497.1 | 0.011 | 6.17E+13 |
| ENST00000402410.2 | 0.011 | 9.911 |
| ENST00000513660.2 | 0.012 | 3.751 |
| ENST00000511222.1 | 0.012 | 2.305 |
| ENST00000439239.2 | 0.013 | 2.069 |
| ENST00000549878.1 | 0.013 | 2.466 |
| ENST00000444217.1 | 0.013 | 2.075 |
| ENST00000435548.1 | 0.014 | 5.647 |
| ENST00000607026.1 | 0.014 | 0.480 |
| ENST00000515111.1 | 0.048 | 2.667 |
| ENST00000503093.1 | 0.014 | 4.916 |
| ENST00000443670.1 | 0.014 | 2.095 |
| ENST00000429608.1 | 0.015 | 2.188 |
| ENST00000518276.1 | 0.016 | 2.734 |
| ENST00000420418.1 | 0.016 | 4.067 |
| ENST00000511419.1 | 0.017 | 3.308 |
| ENST00000431130.2 | 0.017 | 2.765 |
| ENST00000412171.2 | 0.020 | 988.115 |
| ENST00000419531.2 | 0.021 | 0.003 |
| ENST00000442384.1 | 0.022 | 2.042 |
| ENST00000446102.1 | 0.022 | 0.481 |
| ENST00000414102.1 | 0.022 | 0.365 |
| ENST00000507963.1 | 0.022 | 4.620 |
| ENST00000609843.1 | 0.024 | 2.273 |
| ENST00000449124.1 | 0.025 | 3.322 |
| ENST00000425192.1 | 0.025 | 2.64E+12 |
| ENST00000514377.1 | 0.025 | 4.851 |
| ENST00000515680.2 | 0.027 | 2.330 |
| ENST00000423168.1 | 0.028 | 4.270 |
| ENST00000429230.1 | 0.028 | 3.757 |
| ENST00000604660.1 | 0.029 | 2.349 |
| ENST00000421298.1 | 0.029 | 3.474 |
| ENST00000492209.1 | 0.030 | 2.082 |
| ENST00000523311.1 | 0.031 | 2.078 |
| ENST00000434796.1 | 0.031 | 2.290 |
| ENST00000447876.1 | 0.031 | 0.287 |
| ENST00000576302.1 | 0.032 | 3.094 |
| ENST00000457686.1 | 0.049 | 0.231 |
| ENST00000588145.1 | 0.032 | 13.047 |
| ENST00000602470.1 | 0.032 | 2.968 |
| ENST00000497379.2 | 0.033 | 0.330 |
| ENST00000506100.1 | 0.033 | 2.451 |
| ENST00000609352.1 | 0.034 | 2.228 |
| ENST00000507476.1 | 0.034 | 3.547 |
| ENST00000415202.1 | 0.035 | 6.887 |
| ENST00000599781.1 | 0.036 | 0.075 |
| ENST00000497551.2 | 0.037 | 2.235 |
| ENST00000597654.1 | 0.037 | 0.037 |
| ENST00000439606.1 | 0.038 | 7.846 |
| ENST00000455988.1 | 0.038 | 2.302 |
| ENST00000597904.1 | 0.039 | 2.634 |
| ENST00000505972.2 | 0.039 | 0.466 |
| ENST00000609140.1 | 0.040 | 68.930 |
| ENST00000443284.1 | 0.041 | 2.225 |
| ENST00000502812.2 | 0.042 | 0.359 |
| ENST00000552026.1 | 0.043 | 2.692 |
| ENST00000522300.1 | 0.043 | 0.468 |
| ENST00000440038.2 | 0.044 | 7.706 |
| ENST00000413841.1 | 0.044 | 2.153 |
| ENST00000443562.1 | 0.044 | 2.013 |
| ENST00000457941.1 | 0.045 | 17.472 |
| ENST00000605147.1 | 0.046 | 0.409 |
| ENST00000456803.1 | 0.047 | 0.465 |
| ENST00000578974.2 | 0.048 | 0.387 |
| ENST00000509212.1 | 0.048 | 0.492 |

TABLE 39
List of 235 IncRNA from Gencode database, which
are differentially expressed (p < 0.05) and
have an AUC >0.7 or <0.3 between the low
LVEF group (LVEF ≤ 40%) and the high LVEF group (LVEF > 40%)

| IncRNA | p Value | auc |
|---|---|---|
| ENST00000510165.1 | 0.000 | 0.034 |
| ENST00000431244.1 | 0.001 | 0.085 |
| ENST00000449154.1 | 0.001 | 0.868 |
| ENST00000414199.1 | 0.001 | 0.880 |
| ENST00000523354.1 | 0.001 | 0.829 |
| ENST00000454595.1 | 0.001 | 0.863 |
| ENST00000598798.1 | 0.001 | 0.859 |
| ENST00000421563.1 | 0.001 | 0.872 |
| ENST00000417926.1 | 0.001 | 0.863 |
| ENST00000513851.1 | 0.002 | 0.863 |
| ENST00000515842.1 | 0.002 | 0.094 |
| ENST00000444672.1 | 0.002 | 0.880 |
| ENST00000420071.1 | 0.002 | 0.880 |
| ENST00000420350.1 | 0.002 | 0.128 |
| ENST00000512417.1 | 0.003 | 0.855 |
| ENST00000608111.1 | 0.004 | 0.846 |
| ENST00000508845.1 | 0.004 | 0.829 |
| ENST00000506338.1 | 0.004 | 0.803 |
| ENST00000430897.1 | 0.004 | 0.162 |
| ENST00000601136.1 | 0.005 | 0.872 |
| ENST00000430520.1 | 0.005 | 0.137 |
| ENST00000522312.1 | 0.005 | 0.137 |
| ENST00000451396.2 | 0.005 | 0.838 |
| ENST00000453015.1 | 0.006 | 0.179 |
| ENST00000397645.2 | 0.006 | 0.838 |
| ENST00000449586.1 | 0.006 | 0.821 |
| ENST00000356684.3 | 0.006 | 0.162 |
| ENST00000505997.1 | 0.006 | 0.761 |
| ENST00000508619.1 | 0.007 | 0.829 |
| ENST00000507435.1 | 0.007 | 0.786 |
| ENST00000510254.1 | 0.007 | 0.197 |
| ENST00000440104.1 | 0.007 | 0.829 |
| ENST00000504368.1 | 0.007 | 0.786 |
| ENST00000438506.1 | 0.008 | 0.829 |
| ENST00000420672.1 | 0.008 | 0.859 |
| ENST00000412313.1 | 0.008 | 0.128 |
| ENST00000504165.1 | 0.008 | 0.803 |
| ENST00000511234.1 | 0.008 | 0.179 |
| ENST00000510879.1 | 0.009 | 0.872 |
| ENST00000412311.1 | 0.009 | 0.722 |
| ENST00000439795.1 | 0.009 | 0.222 |
| ENST00000434094.1 | 0.009 | 0.179 |
| ENST00000454183.1 | 0.009 | 0.774 |
| ENST00000504207.1 | 0.009 | 0.179 |
| ENST00000504297.1 | 0.010 | 0.846 |
| ENST00000503568.1 | 0.010 | 0.821 |
| ENST00000412357.1 | 0.010 | 0.803 |
| ENST00000460597.1 | 0.010 | 0.821 |
| ENST00000422253.1 | 0.010 | 0.803 |
| ENST00000506655.1 | 0.011 | 0.812 |
| ENST00000526176.1 | 0.011 | 0.821 |
| ENST00000402410.2 | 0.011 | 0.761 |
| ENST00000455121.3 | 0.012 | 0.162 |
| ENST00000513660.2 | 0.012 | 0.769 |
| ENST00000602411.1 | 0.012 | 0.778 |
| ENST00000511222.1 | 0.012 | 0.752 |
| ENST00000607594.1 | 0.013 | 0.812 |
| ENST00000450500.1 | 0.013 | 0.786 |
| ENST00000439239.2 | 0.013 | 0.795 |
| ENST00000549878.1 | 0.013 | 0.761 |
| ENST00000418015.1 | 0.013 | 0.821 |
| ENST00000444217.1 | 0.013 | 0.786 |
| ENST00000435548.1 | 0.014 | 0.795 |
| ENST00000607026.1 | 0.014 | 0.188 |
| ENST00000503093.1 | 0.014 | 0.739 |
| ENST00000509184.1 | 0.014 | 0.821 |
| ENST00000443670.1 | 0.014 | 0.769 |
| ENST00000486767.1 | 0.015 | 0.786 |
| ENST00000457402.1 | 0.015 | 0.188 |
| ENST00000515789.1 | 0.015 | 0.197 |
| ENST00000429608.1 | 0.015 | 0.782 |
| ENST00000592182.1 | 0.016 | 0.786 |
| ENST00000422259.1 | 0.016 | 0.231 |
| ENST00000442200.1 | 0.016 | 0.786 |
| ENST00000432733.1 | 0.016 | 0.214 |
| ENST00000518276.1 | 0.016 | 0.744 |
| ENST00000420418.1 | 0.016 | 0.761 |
| ENST00000297163.3 | 0.016 | 0.744 |
| ENST00000453155.1 | 0.016 | 0.821 |
| ENST00000496154.2 | 0.017 | 0.179 |
| ENST00000511419.1 | 0.017 | 0.761 |
| ENST00000431130.2 | 0.017 | 0.765 |
| ENST00000487657.2 | 0.017 | 0.786 |
| ENST00000514241.1 | 0.017 | 0.214 |
| ENST00000604571.1 | 0.017 | 0.162 |
| ENST00000428624.1 | 0.018 | 0.162 |
| ENST00000592948.1 | 0.018 | 0.222 |
| ENST00000418335.1 | 0.018 | 0.171 |
| ENST00000435895.1 | 0.018 | 0.171 |
| ENST00000322353.3 | 0.019 | 0.744 |
| ENST00000512464.1 | 0.019 | 0.803 |
| ENST00000448713.1 | 0.019 | 0.778 |
| ENST00000467240.1 | 0.019 | 0.786 |
| ENST00000444647.1 | 0.019 | 0.239 |
| ENST00000425974.1 | 0.020 | 0.769 |
| ENST00000452176.1 | 0.020 | 0.778 |
| ENST00000510416.1 | 0.020 | 0.761 |
| ENST00000503188.1 | 0.020 | 0.197 |
| ENST00000509559.1 | 0.021 | 0.188 |
| ENST00000508255.1 | 0.021 | 0.214 |
| ENST00000419531.2 | 0.021 | 0.128 |
| ENST00000430471.1 | 0.021 | 0.786 |
| ENST00000442384.1 | 0.022 | 0.761 |
| ENST00000446102.1 | 0.022 | 0.188 |
| ENST00000414102.1 | 0.022 | 0.179 |
| ENST00000428651.1 | 0.022 | 0.231 |
| ENST00000507963.1 | 0.022 | 0.726 |
| ENST00000473595.1 | 0.023 | 0.761 |
| ENST00000326734.1 | 0.023 | 0.256 |
| ENST00000435692.2 | 0.023 | 0.863 |
| ENST00000513812.1 | 0.023 | 0.726 |
| ENST00000609843.1 | 0.024 | 0.752 |
| ENST00000449124.1 | 0.025 | 0.795 |
| ENST00000433108.1 | 0.025 | 0.778 |
| ENST00000425192.1 | 0.025 | 0.726 |
| ENST00000514377.1 | 0.025 | 0.752 |
| ENST00000444346.1 | 0.025 | 0.239 |
| ENST00000513770.1 | 0.026 | 0.778 |
| ENST00000448431.1 | 0.026 | 0.214 |
| ENST00000440404.1 | 0.026 | 0.197 |
| ENST00000560688.1 | 0.026 | 0.248 |
| ENST00000428176.1 | 0.026 | 0.248 |
| ENST00000515680.2 | 0.027 | 0.765 |
| ENST00000446136.1 | 0.027 | 0.769 |
| ENST00000511279.1 | 0.028 | 0.752 |
| ENST00000423168.1 | 0.028 | 0.838 |
| ENST00000429230.1 | 0.028 | 0.744 |
| ENST00000421437.1 | 0.029 | 0.265 |
| ENST00000504728.1 | 0.029 | 0.752 |
| ENST00000569928.1 | 0.029 | 0.239 |
| ENST00000421298.1 | 0.029 | 0.778 |
| ENST00000445565.1 | 0.030 | 0.769 |
| ENST00000598710.1 | 0.030 | 0.231 |
| ENST00000492209.1 | 0.030 | 0.786 |
| ENST00000492300.1 | 0.030 | 0.735 |
| ENST00000508484.1 | 0.030 | 0.248 |
| ENST00000415174.1 | 0.030 | 0.188 |
| ENST00000432505.1 | 0.031 | 0.761 |
| ENST00000523311.1 | 0.031 | 0.756 |
| ENST00000434796.1 | 0.031 | 0.735 |
| ENST00000440266.2 | 0.031 | 0.778 |
| ENST00000447876.1 | 0.031 | 0.239 |
| ENST00000506070.1 | 0.031 | 0.274 |
| ENST00000426083.1 | 0.032 | 0.248 |
| ENST00000576302.1 | 0.032 | 0.761 |
| ENST00000607950.1 | 0.032 | 0.778 |
| ENST00000588145.1 | 0.032 | 0.701 |
| ENST00000503259.1 | 0.032 | 0.761 |
| ENST00000454380.1 | 0.032 | 0.205 |
| ENST00000608925.1 | 0.032 | 0.239 |
| ENST00000608442.1 | 0.032 | 0.214 |
| ENST00000602470.1 | 0.032 | 0.739 |
| ENST00000514011.1 | 0.033 | 0.239 |
| ENST00000605589.1 | 0.033 | 0.735 |
| ENST00000497379.2 | 0.033 | 0.171 |
| ENST00000609352.1 | 0.034 | 0.752 |
| ENST00000507476.1 | 0.034 | 0.726 |
| ENST00000608777.1 | 0.035 | 0.231 |
| ENST00000499292.2 | 0.035 | 0.162 |
| ENST00000415202.1 | 0.035 | 0.821 |
| ENST00000610144.1 | 0.035 | 0.231 |
| ENST00000515188.1 | 0.035 | 0.778 |
| ENST00000599781.1 | 0.036 | 0.111 |
| ENST00000497551.2 | 0.037 | 0.726 |
| ENST00000597654.1 | 0.037 | 0.188 |
| ENST00000505364.1 | 0.037 | 0.744 |
| ENST00000514427.1 | 0.038 | 0.265 |
| ENST00000604680.1 | 0.038 | 0.752 |
| ENST00000512546.1 | 0.038 | 0.239 |
| ENST00000455988.1 | 0.038 | 0.786 |
| ENST00000597904.1 | 0.039 | 0.752 |
| ENST00000505972.2 | 0.039 | 0.248 |
| ENST00000512873.1 | 0.039 | 0.761 |
| ENST00000607459.1 | 0.039 | 0.231 |
| ENST00000584829.1 | 0.039 | 0.744 |
| ENST00000471626.1 | 0.039 | 0.718 |
| ENST00000514265.1 | 0.039 | 0.231 |
| ENST00000451362.1 | 0.039 | 0.265 |
| ENST00000595232.1 | 0.039 | 0.214 |
| ENST00000473798.1 | 0.039 | 0.769 |
| ENST00000427748.1 | 0.040 | 0.239 |
| ENST00000607389.1 | 0.040 | 0.769 |
| ENST00000602316.1 | 0.040 | 0.197 |
| ENST00000439601.1 | 0.040 | 0.205 |
| ENST00000462176.2 | 0.040 | 0.248 |
| ENST00000512519.1 | 0.040 | 0.197 |
| ENST00000609140.1 | 0.040 | 0.752 |
| ENST00000512527.1 | 0.041 | 0.239 |
| ENST00000514010.1 | 0.041 | 0.726 |
| ENST00000444043.2 | 0.041 | 0.726 |
| ENST00000429871.1 | 0.041 | 0.291 |
| ENST00000443284.1 | 0.041 | 0.795 |
| ENST00000461448.1 | 0.041 | 0.231 |
| ENST00000609969.1 | 0.041 | 0.769 |
| ENST00000458097.1 | 0.041 | 0.222 |
| ENST00000446073.1 | 0.042 | 0.769 |
| ENST00000431691.1 | 0.042 | 0.752 |
| ENST00000502812.2 | 0.042 | 0.239 |
| ENST00000508470.1 | 0.043 | 0.761 |
| ENST00000552026.1 | 0.043 | 0.735 |
| ENST00000458007.2 | 0.043 | 0.256 |
| ENST00000522300.1 | 0.043 | 0.248 |
| ENST00000366441.2 | 0.043 | 0.795 |
| ENST00000429269.1 | 0.043 | 0.778 |
| ENST00000595268.1 | 0.044 | 0.744 |
| ENST00000440038.2 | 0.044 | 0.778 |
| ENST00000413841.1 | 0.044 | 0.752 |
| ENST00000489011.1 | 0.044 | 0.735 |
| ENST00000443562.1 | 0.044 | 0.795 |
| ENST00000512349.1 | 0.045 | 0.231 |
| ENST00000505736.1 | 0.045 | 0.231 |
| ENST00000442020.1 | 0.045 | 0.761 |
| ENST00000440862.1 | 0.045 | 0.205 |
| ENST00000464242.1 | 0.045 | 0.718 |
| ENST00000499900.2 | 0.045 | 0.231 |
| ENST00000457941.1 | 0.045 | 0.718 |
| ENST00000470263.1 | 0.045 | 0.761 |
| ENST00000512581.1 | 0.045 | 0.735 |
| ENST00000464428.2 | 0.045 | 0.752 |
| ENST00000523745.1 | 0.046 | 0.222 |
| ENST00000522173.1 | 0.046 | 0.214 |
| ENST00000585718.1 | 0.046 | 0.248 |
| ENST00000605147.1 | 0.046 | 0.188 |
| ENST00000509496.1 | 0.047 | 0.735 |
| ENST00000449298.1 | 0.047 | 0.769 |
| ENST00000456803.1 | 0.047 | 0.226 |
| ENST00000509212.1 | 0.048 | 0.256 |
| ENST00000442036.1 | 0.048 | 0.735 |
| ENST00000564300.1 | 0.048 | 0.239 |
| ENST00000426504.1 | 0.048 | 0.231 |
| ENST00000457686.1 | 0.049 | 0.205 |
| ENST00000515542.1 | 0.049 | 0.735 |
| ENST00000429469.1 | 0.050 | 0.701 |
| ENST00000443008.1 | 0.050 | 0.265 |
| ENST00000427524.1 | 0.034 | 0.778 |

[0264] Comparison Between Low LVEF (LVEF≤45%) and High LVEF (LVEF>45%) at D0 in Serum Samples of AMI Patients

[0265] First, samples are grouped into 2 groups by a dichotomized variable: 1-month LVEF<45% and 1-month LVEF>45%.

[0266] 243 lncRNA are differentially expressed and among these, 69 lncRNA are differentially expressed and have a fold change>2 or <0.5 between the low LVEF (LVEF≤45%) and the high LVEF (LVEF>45%). 2 lncRNAs are common to D3 samples (ENST00000429230.1, ENST00000599448.1). The p-value and the fold-change of these lncRNA are listed in the Table 40. 211 lncRNAs which have a p<0.05 and an individual AUC>0.7 or <0.3 are listed in Table 41.

TABLE 40
List of 76 lncRNA from Gencode database which are differentially
expressed (p < 0.05) and have a fold change > 2 or <0.5 between the low
LVEF group (LVEF ≤ 45%) and the high LVEF group (LVEF > 45%)

| lncRNA | p Value | foldchange |
|---|---|---|
| ENST00000449154.1 | 0.000 | 3.558 |
| ENST00000523354.1 | 0.000 | 2.334 |
| ENST00000453015.1 | 0.000 | 0.356 |
| ENST00000435895.1 | 0.000 | 0.486 |
| ENST00000552026.1 | 0.001 | 3.770 |
| ENST00000415543.1 | 0.001 | 0.237 |
| ENST00000436488.1 | 0.001 | 0.431 |
| ENST00000599448.1 | 0.003 | 0.203 |
| ENST00000441345.2 | 0.005 | 0.117 |
| ENST00000430555.1 | 0.005 | 2.363 |
| ENST00000608111.1 | 0.006 | 17.287 |
| ENST00000607026.1 | 0.006 | 0.439 |
| ENST00000435643.1 | 0.006 | 0.249 |
| ENST00000597904.1 | 0.006 | 3.537 |
| ENST00000496733.2 | 0.007 | 0.488 |
| ENST00000607985.1 | 0.007 | 0.109 |
| ENST00000465283.1 | 0.007 | 0.082 |
| ENST00000429230.1 | 0.008 | 4.740 |
| ENST00000443562.1 | 0.008 | 2.248 |
| ENST00000461448.1 | 0.010 | 0.467 |
| ENST00000507698.1 | 0.010 | 2.574 |
| ENST00000594976.1 | 0.011 | 0.206 |
| ENST00000606468.1 | 0.011 | 2.875 |
| ENST00000431130.2 | 0.011 | 2.733 |
| ENST00000605147.1 | 0.012 | 0.351 |
| ENST00000469289.1 | 0.013 | 5.727 |
| ENST00000427042.1 | 0.013 | 2.802 |
| ENST00000413525.1 | 0.013 | 0.248 |
| ENST00000461864.1 | 0.014 | 0.440 |
| ENST00000439745.1 | 0.016 | 0.470 |
| ENST00000402410.2 | 0.017 | 6.982 |
| ENST00000507476.1 | 0.017 | 4.500 |
| ENST00000421563.1 | 0.018 | 2.113 |
| ENST00000515263.1 | 0.019 | 0.304 |
| ENST00000433475.1 | 0.019 | 9.721 |
| ENST00000436293.2 | 0.021 | 4.454 |
| ENST00000509057.1 | 0.022 | 2.111 |
| ENST00000457686.1 | 0.023 | 0.198 |
| ENST00000523895.1 | 0.024 | 0.435 |
| ENST00000419531.2 | 0.025 | 0.000 |
| ENST00000444361.1 | 0.025 | 0.254 |
| ENST00000601854.1 | 0.026 | 5.663 |
| ENST00000441036.1 | 0.026 | 2.509 |
| ENST00000505149.1 | 0.027 | 0.448 |
| ENST00000435492.1 | 0.030 | 0.316 |
| ENST00000512401.1 | 0.031 | 0.057 |
| ENST00000507842.1 | 0.032 | 2.843 |
| ENST00000510648.1 | 0.032 | 3.873 |
| ENST00000606314.1 | 0.033 | 3.833 |
| ENST00000474250.1 | 0.034 | 4.009 |
| ENST00000509105.1 | 0.034 | 8.823 |
| ENST00000588145.1 | 0.035 | 13.232 |
| ENST00000470860.1 | 0.035 | 0.238 |
| ENST00000485020.1 | 0.037 | 0.412 |
| ENST00000447876.1 | 0.037 | 0.323 |
| ENST00000426892.1 | 0.037 | 2.191 |
| ENST00000512603.1 | 0.039 | 0.433 |
| ENST00000602528.1 | 0.040 | 0.441 |
| ENST00000424788.1 | 0.040 | 0.169 |
| ENST00000424084.1 | 0.044 | 6.957 |
| ENST00000507639.1 | 0.044 | 3.312 |
| ENST00000426178.1 | 0.044 | 0.170 |
| ENST00000417516.1 | 0.044 | 2.784 |
| ENST00000416279.1 | 0.044 | 2.637 |
| ENST00000443270.1 | 0.044 | 3.375 |
| ENST00000469846.2 | 0.045 | 0.256 |
| ENST00000508998.1 | 0.047 | 3.937 |
| ENST00000598740.1 | 0.047 | 2.006 |
| ENST00000597654.1 | 0.047 | 0.068 |

TABLE 41
List of 211 IncRNA from Gencode database, which
are differentially expressed (p < 0.05) and
have an AUC >0.7 or <0.3 between the low
LVEF group (LVEF ≤ 45%) and the high LVEF group (LVEF > 45%)

| IncRNA | p Value | auc |
|---|---|---|
| ENST00000449154.1 | 0.000 | 0.923 |
| ENST00000523354.1 | 0.000 | 0.897 |
| ENST00000453015.1 | 0.000 | 0.068 |
| ENST00000435895.1 | 0.000 | 0.068 |
| ENST00000552026.1 | 0.001 | 0.889 |
| ENST00000415543.1 | 0.001 | 0.128 |
| ENST00000436488.1 | 0.001 | 0.103 |
| ENST00000492300.1 | 0.002 | 0.872 |
| ENST00000506655.1 | 0.002 | 0.872 |
| ENST00000588227.1 | 0.002 | 0.838 |
| ENST00000432210.1 | 0.002 | 0.889 |
| ENST00000442020.1 | 0.002 | 0.872 |
| ENST00000414065.1 | 0.002 | 0.829 |
| ENST00000599448.1 | 0.003 | 0.188 |
| ENST00000496154.2 | 0.004 | 0.137 |
| ENST00000444672.1 | 0.004 | 0.872 |
| ENST00000440786.1 | 0.005 | 0.829 |
| ENST00000356133.3 | 0.005 | 0.855 |
| ENST00000514010.1 | 0.005 | 0.855 |
| ENST00000441345.2 | 0.005 | 0.111 |
| ENST00000603264.1 | 0.005 | 0.162 |
| ENST00000602433.1 | 0.005 | 0.205 |
| ENST00000430555.1 | 0.005 | 0.846 |
| ENST00000428083.1 | 0.006 | 0.838 |
| ENST00000608111.1 | 0.006 | 0.915 |
| ENST00000607026.1 | 0.006 | 0.248 |
| ENST00000435643.1 | 0.006 | 0.188 |
| ENST00000597904.1 | 0.006 | 0.880 |
| ENST00000496733.2 | 0.007 | 0.188 |
| ENST00000446520.1 | 0.007 | 0.188 |
| ENST00000607985.1 | 0.007 | 0.235 |
| ENST00000465283.1 | 0.007 | 0.261 |
| ENST00000421933.1 | 0.007 | 0.162 |
| ENST00000499346.2 | 0.007 | 0.812 |
| ENST00000429230.1 | 0.008 | 0.786 |
| ENST00000443562.1 | 0.008 | 0.846 |
| ENST00000435692.2 | 0.009 | 0.846 |
| ENST00000461448.1 | 0.010 | 0.179 |
| ENST00000522312.1 | 0.010 | 0.197 |
| ENST00000425776.1 | 0.010 | 0.872 |
| ENST00000512349.1 | 0.010 | 0.162 |
| ENST00000507698.1 | 0.010 | 0.816 |
| ENST00000425896.1 | 0.010 | 0.769 |
| ENST00000594976.1 | 0.011 | 0.299 |
| ENST00000606468.1 | 0.011 | 0.812 |
| ENST00000517595.1 | 0.011 | 0.205 |
| ENST00000431130.2 | 0.011 | 0.821 |
| ENST00000507627.1 | 0.011 | 0.812 |
| ENST00000515842.1 | 0.012 | 0.179 |
| ENST00000435880.2 | 0.012 | 0.197 |
| ENST00000432267.2 | 0.012 | 0.812 |
| ENST00000528818.1 | 0.012 | 0.205 |
| ENST00000512417.1 | 0.012 | 0.812 |
| ENST00000605147.1 | 0.012 | 0.171 |
| ENST00000469289.1 | 0.013 | 0.855 |
| ENST00000444721.1 | 0.013 | 0.812 |
| ENST00000507653.1 | 0.013 | 0.179 |
| ENST00000427042.1 | 0.013 | 0.829 |
| ENST00000584829.1 | 0.013 | 0.803 |
| ENST00000454595.1 | 0.013 | 0.821 |
| ENST00000413525.1 | 0.013 | 0.218 |
| ENST00000418050.1 | 0.014 | 0.821 |
| ENST00000453569.1 | 0.014 | 0.222 |
| ENST00000461864.1 | 0.014 | 0.162 |
| ENST00000608056.1 | 0.015 | 0.171 |
| ENST00000439745.1 | 0.016 | 0.226 |
| ENST00000470739.1 | 0.016 | 0.197 |
| ENST00000569694.1 | 0.016 | 0.162 |
| ENST00000314957.3 | 0.016 | 0.752 |
| ENST00000513304.1 | 0.016 | 0.179 |
| ENST00000452176.1 | 0.034 | 0.786 |
| ENST00000424748.1 | 0.016 | 0.803 |
| ENST00000514201.1 | 0.016 | 0.769 |
| ENST00000592948.1 | 0.017 | 0.214 |
| ENST00000450500.1 | 0.017 | 0.795 |
| ENST00000402410.2 | 0.017 | 0.821 |
| ENST00000417926.1 | 0.017 | 0.778 |
| ENST00000564407.1 | 0.017 | 0.222 |
| ENST00000507476.1 | 0.017 | 0.821 |
| ENST00000432711.1 | 0.018 | 0.795 |
| ENST00000421563.1 | 0.018 | 0.812 |
| ENST00000415342.1 | 0.019 | 0.222 |
| ENST00000430471.1 | 0.019 | 0.786 |
| ENST00000515263.1 | 0.019 | 0.205 |
| ENST00000433475.1 | 0.019 | 0.872 |
| ENST00000507056.1 | 0.019 | 0.248 |
| ENST00000428647.1 | 0.019 | 0.786 |
| ENST00000492307.1 | 0.020 | 0.803 |
| ENST00000507781.1 | 0.020 | 0.291 |
| ENST00000522173.1 | 0.020 | 0.205 |
| ENST00000521803.1 | 0.020 | 0.795 |
| ENST00000448129.1 | 0.021 | 0.197 |
| ENST00000436293.2 | 0.021 | 0.855 |
| ENST00000506425.1 | 0.021 | 0.214 |
| ENST00000422841.1 | 0.021 | 0.222 |
| ENST00000431244.1 | 0.022 | 0.222 |
| ENST00000509057.1 | 0.022 | 0.786 |
| ENST00000430520.1 | 0.023 | 0.222 |
| ENST00000457686.1 | 0.023 | 0.282 |
| ENST00000429315.3 | 0.023 | 0.744 |
| ENST00000523895.1 | 0.024 | 0.222 |
| ENST00000504728.1 | 0.024 | 0.752 |
| ENST00000607148.1 | 0.025 | 0.214 |
| ENST00000326734.1 | 0.025 | 0.248 |
| ENST00000428624.1 | 0.025 | 0.222 |
| ENST00000419531.2 | 0.025 | 0.214 |
| ENST00000564261.1 | 0.026 | 0.769 |
| ENST00000601854.1 | 0.026 | 0.735 |
| ENST00000566904.1 | 0.026 | 0.812 |
| ENST00000441036.1 | 0.026 | 0.812 |
| ENST00000442036.1 | 0.026 | 0.786 |
| ENST00000594101.1 | 0.026 | 0.239 |
| ENST00000335577.4 | 0.026 | 0.786 |
| ENST00000607594.1 | 0.027 | 0.778 |
| ENST00000510165.1 | 0.027 | 0.214 |
| ENST00000505149.1 | 0.027 | 0.282 |
| ENST00000507681.1 | 0.027 | 0.222 |
| ENST00000417636.1 | 0.027 | 0.795 |
| ENST00000605082.1 | 0.028 | 0.752 |
| ENST00000438623.1 | 0.028 | 0.222 |
| ENST00000470263.1 | 0.028 | 0.778 |
| ENST00000509641.2 | 0.029 | 0.752 |
| ENST00000607804.1 | 0.029 | 0.786 |
| ENST00000435492.1 | 0.030 | 0.226 |
| ENST00000431139.2 | 0.030 | 0.769 |
| ENST00000425275.1 | 0.030 | 0.214 |
| ENST00000428176.1 | 0.030 | 0.265 |
| ENST00000505109.1 | 0.031 | 0.769 |
| ENST00000504207.1 | 0.031 | 0.231 |
| ENST00000512401.1 | 0.031 | 0.226 |
| ENST00000517916.1 | 0.031 | 0.752 |
| ENST00000511213.1 | 0.031 | 0.778 |
| ENST00000567486.2 | 0.031 | 0.761 |
| ENST00000507842.1 | 0.032 | 0.769 |
| ENST00000510648.1 | 0.032 | 0.786 |
| ENST00000513851.1 | 0.032 | 0.752 |
| ENST00000430677.1 | 0.032 | 0.256 |
| ENST00000452283.1 | 0.032 | 0.726 |
| ENST00000606314.1 | 0.033 | 0.803 |
| ENST00000426702.1 | 0.033 | 0.256 |
| ENST00000451396.2 | 0.033 | 0.735 |
| ENST00000471248.1 | 0.034 | 0.239 |
| ENST00000448379.1 | 0.034 | 0.735 |
| ENST00000543656.1 | 0.034 | 0.761 |
| ENST00000416080.1 | 0.034 | 0.752 |
| ENST00000474250.1 | 0.034 | 0.744 |
| ENST00000509105.1 | 0.034 | 0.744 |
| ENST00000608740.1 | 0.035 | 0.769 |
| ENST00000456327.1 | 0.035 | 0.744 |
| ENST00000588145.1 | 0.035 | 0.803 |
| ENST00000452901.1 | 0.035 | 0.786 |
| ENST00000499583.1 | 0.036 | 0.248 |
| ENST00000509559.1 | 0.036 | 0.256 |
| ENST00000514608.1 | 0.036 | 0.214 |
| ENST00000485020.1 | 0.037 | 0.291 |
| ENST00000447876.1 | 0.037 | 0.282 |
| ENST00000608851.1 | 0.037 | 0.265 |
| ENST00000426892.1 | 0.037 | 0.752 |
| ENST00000606200.1 | 0.037 | 0.752 |
| ENST00000425176.1 | 0.037 | 0.295 |
| ENST00000601136.1 | 0.037 | 0.829 |
| ENST00000438978.1 | 0.038 | 0.761 |
| ENST00000510254.1 | 0.038 | 0.214 |
| ENST00000423410.1 | 0.038 | 0.752 |
| ENST00000512603.1 | 0.039 | 0.265 |
| ENST00000414120.1 | 0.040 | 0.282 |
| ENST00000602528.1 | 0.040 | 0.265 |
| ENST00000414625.2 | 0.040 | 0.239 |
| ENST00000502410.1 | 0.040 | 0.778 |
| ENST00000601940.1 | 0.041 | 0.239 |
| ENST00000505162.1 | 0.041 | 0.744 |
| ENST00000492209.1 | 0.041 | 0.786 |
| ENST00000427748.1 | 0.042 | 0.239 |
| ENST00000522975.1 | 0.042 | 0.726 |
| ENST00000606855.1 | 0.042 | 0.744 |
| ENST00000508031.1 | 0.043 | 0.744 |
| ENST00000609032.1 | 0.043 | 0.231 |
| ENST00000446073.1 | 0.043 | 0.761 |
| ENST00000424084.1 | 0.044 | 0.778 |
| ENST00000507639.1 | 0.044 | 0.718 |
| ENST00000413531.1 | 0.044 | 0.274 |
| ENST00000434346.1 | 0.044 | 0.299 |
| ENST00000417516.1 | 0.044 | 0.803 |
| ENST00000416279.1 | 0.044 | 0.795 |
| ENST00000443270.1 | 0.044 | 0.795 |
| ENST00000436262.1 | 0.045 | 0.222 |
| ENST00000503179.1 | 0.046 | 0.231 |
| ENST00000510240.1 | 0.046 | 0.256 |
| ENST00000607744.1 | 0.046 | 0.231 |
| ENST00000512428.1 | 0.046 | 0.274 |
| ENST00000511390.1 | 0.046 | 0.774 |
| ENST00000456519.1 | 0.046 | 0.274 |
| ENST00000506950.1 | 0.047 | 0.265 |
| ENST00000598740.1 | 0.047 | 0.744 |
| ENST00000520041.1 | 0.047 | 0.752 |
| ENST00000417927.1 | 0.047 | 0.282 |
| ENST00000523311.1 | 0.047 | 0.756 |
| ENST00000432395.1 | 0.047 | 0.214 |
| ENST00000502467.1 | 0.047 | 0.248 |
| ENST00000609166.1 | 0.047 | 0.744 |
| ENST00000609005.1 | 0.047 | 0.761 |
| ENST00000444042.2 | 0.047 | 0.795 |
| ENST00000511616.1 | 0.048 | 0.282 |
| ENST00000426539.1 | 0.048 | 0.299 |
| ENST00000412204.2 | 0.048 | 0.735 |
| ENST00000436950.1 | 0.048 | 0.761 |
| ENST00000496220.1 | 0.048 | 0.726 |
| ENST00000569928.1 | 0.049 | 0.239 |
| ENST00000433108.1 | 0.049 | 0.752 |
| ENST00000507398.1 | 0.049 | 0.274 |
| ENST00000414199.1 | 0.049 | 0.769 |

[0267] The lncRNAs listed can be used as biomarkers for the prediction of Left Ventricular Remodeling and as therapeutics targets to prevent development of Heart Failure.

1. A Method of diagnosing or monitoring or treating primary and secondary cardiac diseases or disorders in a subject, the method comprising
a.) obtaining a sample from said subject;
b.) detecting the level of expression of one or more lncRNAs (e.g., having a sequence selected from the group consisting of SEQ ID NO1 to SEQ ID NO 3238, isoforms thereof, fragment thereof and variant sharing at least 80% nucleotide sequence homology); and
c.) diagnosing the subject with one or more cardiac diseases or disorders based upon the level of expression of one or more lncRNAs compared to a control,
with the proviso that the one or more lncRNAs are not selected from the group consisting of lncRNAs of Table 1, fragments thereof, isoforms thereof and variants sharing at least 80% nucleotide sequence identity thereto.

2. The method of claim 1, wherein the level of expression of one or more said lncRNAs indicates that the subject has developed or is at risk of developing a cardiac disorder.

3. The method of claim 1, wherein cardiac disorder is selected from the group consisting of: pathologies or abnormalities with Interventricular Septal Thickness (IVS), heart failures (e.g., left and right ventricle dilatation/dysfunction), EF, LVID, MI, HFrEF, HFpEF, myocardial infarction, myocarditis (e.g., viral myocarditis), cardiac toxicity, brachycardia, arrhythmia, congenital heart defects, hypertension, diabetic cardiomyopathy, idiopathic and dilated cardiomyopathy, pathologies characterized by malformation, pathologies characterized by tissue remodeling, pathologies characterized by affected function, pathologies characterized by disorders of the right heart, pathologies characterized by arrhythmias, pathologies characterized by intoxication, pathologies characterized by cancer, pathologies characterized by neurologic disorders, pathologies characterized by trauma, pathologies characterized by a change in hemodynamic, pathologies characterized by vascular disorders altering cardiac functions such as Coronary artery disease (CAD), and pathologies resulted from cardiac dysfunction/disorders inducing ischemic (embolic/thrombotic) stroke.

4. The method claim 1, wherein the diagnosis step includes predicting the development of heart failure in a subject having suffered AMI, and wherein the level of expression of one or more said lncRNAs predicts the risk for the subject to develop HF.

5. The method of claim 1, wherein the method further comprises the step of administering at least one pharmaceutical to the subject in order to treat one or more cardiovascular diseases or disorders.

6. The method of claim 1, wherein the biological sample is selected from the group consisting of: whole blood, serum, plasma, semen, saliva, tears, urine, fecal material, sweat, buccal smears, skin, cardiac tissue, liver, brain tissue, amniotic fluid, nerve tissue and hair (e.g, wherein the sample is preferably plasma or cardiac tissue).

7. The method of claim 1, wherein the lncRNA expression levels are detected in a sample (e.g., biological sample) using a technique selected from the group consisting of: Si nuclease protection assay, microarray analysis, polymerase chain reaction (PCR), hybridization technologies, reverse transcriptase polymerase chain reaction (RT-PCR), Northern blot, serial analysis of gene expression (SAGE), immunoassay, and mass spectrometry.

8. The method of claim 1, wherein the lncRNA expression level of lncRNA in sample (e.g., biological sample) is detected using a singleplexed or multiplexed method selected from a group consisting of: fluorescence, luminescence, radio-marking, next generation sequencing and/or coded microdisks.

9. The method of claim 1, wherein the expression level of the lncRNAs of the invention are detected by measuring the levels of cDNAs, amplified RNAs or DNAs or quantities of DNA probes, or other molecules, in a sample (e.g., biological sample) that are indicative of the expression level of the lncRNA.

10. The method of claim 1, wherein the lncRNA which is detected is selected from any of SEQ ID NO: 1-SEQ ID NO: 3238.

11. The method of claim 10, wherein the lncRNA which is detected is selected from the group consisting of:
(i) 15 lncRNAs of SEQ ID 1204, SEQ ID 1736, SEQ ID 0544, SEQ ID 0915, SEQ ID2368, SEQ ID 1595, SEQ ID 2382, SEQ ID 0859, SEQ ID 3112, SEQ ID 1869, SEQ ID 1406, SEQ ID 0043, SEQ ID 0363, SEQ ID 0069 and SEQ ID 1947;
(ii) 11 lncRNAs of SEQ ID 2373, SEQ ID 1748, SEQ ID 3112, SEQ ID 1231, SEQ ID 0664, SEQ ID 1686, SEQ ID 0791, SEQ ID 2126, SEQ ID 2750, SEQ ID 3010, and SEQ ID 2241;
(iii) 14 lncRNAs of SEQ ID 2150, SEQ ID 1534, SEQ ID 0311, SEQ ID 2952, SEQ ID 2838, SEQ ID 1437, SEQ ID 1297, SEQ ID 1059, SEQ ID 1465, SEQ ID 2826, SEQ ID 0180, SEQ ID 0538, SEQ ID 0258, and SEQ ID 2273;
(iv) 20 lncRNAs of SEQ ID 0190, SEQ ID 0359, SEQ ID 0776, SEQ ID 1421, SEQ ID 1795, SEQ ID 0477, SEQ ID 1511, SEQ ID 0435, SEQ ID 1418, SEQ ID 1025, SEQ ID 0265, SEQ ID 1311, SEQ ID 2540, SEQ ID 2323, SEQ ID 3011, SEQ ID 2447, SEQ ID 2863, SEQ ID 2697, SEQ ID 3128, and SEQ ID 2265;
(v) 11 lncRNAs of SEQ ID 2540, SEQ ID 0545, SEQ ID 1766, SEQ ID 3011, SEQ ID 0968, SEQ ID 2371, SEQ ID 1533, SEQ ID 0749, SEQ ID 0609, SEQ ID 1446, and SEQ ID 2986;
(vi) 8 lncRNAs of SEQ1204, SEQ2454, SEQ0334, SEQ1403, SEQ1089, SEQ2692, SEQ2273, SEQ0502;
(vii) 4 lncRNAs of SEQ0097, SEQ1947, SEQ1051 and SEQ2996; and
(viii) lncRNAs in Table 4, Table 5, Table 8, Table 9, Table 12, Table 15, Table 18, Table 19, Table 20, Table 21, Table 22, Table 24, Table 25, Table 28, Table 29, Table 32, Table 33, Table 34, Table 35, Table 36, Table 37, Table 38, Table 39, Table 40, and/or Table 41.

12. A method for monitoring treatment efficacy in a subject suffering from a primary and secondary cardiac disease or disorder and receiving a pharmaceutical cardiac therapy, the method comprising
a.) administering a pharmaceutical to a subject suffering from cardiac injury;
b.) obtaining a sample (e.g., a biological sample) from the subject;
c.) detecting the level of expression of one or more lncRNAs (e.g., having a sequence selected from the group consisting of SEQ ID NO1 to SEQ ID NO 3238, isoforms thereof, fragment thereof and variant sharing at least 80% nucleotide sequence homology) in the sample, wherein the expression level of lncRNA is compared to a control; and
d.) determining the level of expression of one or more lncRNAs, wherein the level of expression of said one or more lncRNAs indicates the efficacy, non-efficacy or toxicity of the treatment,
with the proviso that the one or more lncRNAs are not selected from the group consisting of lncRNAs of Table 1, fragments thereof, isoforms thereof and variants sharing at least 80% nucleotide sequence identity thereto.

13. A method for diagnosing drug-induced cardiac toxicity in a subject receiving a pharmaceutical composition, wherein the method comprises
a.) obtaining a sample from the subject;
b.) measuring the level of expression, (e.g., in a biological sample derived from said subject) of one or more lncRNAs of the invention from the sample
c.) diagnosing the subject as having a cardiac toxicity from the pharmaceutical composition depending upon the level of expression of one or more said lncRNAs,
with the proviso that the one or more lncRNAs are not selected from the group consisting of lncRNAs of Table 1, fragments thereof, isoforms thereof and variants sharing at least 80% nucleotide sequence identity thereto.

14. (canceled)

15. (canceled)

16. (canceled)

17. (canceled)

18. (canceled)

19. (canceled)

20. A diagnostic/prognostic/disease activity/theranostic kit for carrying out the method of claim 1.

21. The kit of claim 20, wherein the kit comprises:
(i) one or more oligonucleotide probes comprising a sequence complementary to a region of one or more lncRNAs selected from the group consisting of SEQ ID NO 1 to SEQ ID NO 3238, isoforms thereof, fragment thereof and variant sharing at least 80% nucleotide sequence homology and
(ii) a reagent for purifying the probe-target nucleic acid complexes.

22. The kit of claim 21, wherein the oligonucleotide probes are biotinylated and the reagent for purifying the probe-target complexes is a streptavidin-coated substrate, e.g, a streptavidin-coated magnetic particle.

23. The kit of claim 21, wherein the one or more lncRNAs are selected from the group consisting of:
(i) 15 lncRNAs of SEQ ID 1204, SEQ ID 1736, SEQ ID 0544, SEQ ID 0915, SEQ ID2368, SEQ ID 1595, SEQ ID 2382, SEQ ID 0859, SEQ ID 3112, SEQ ID 1869, SEQ ID 1406, SEQ ID 0043, SEQ ID 0363, SEQ ID 0069 and SEQ ID 1947;
(ii) 11 lncRNAs of SEQ ID 2373, SEQ ID 1748, SEQ ID 3112, SEQ ID 1231, SEQ ID 0664, SEQ ID 1686, SEQ ID 0791, SEQ ID 2126, SEQ ID 2750, SEQ ID 3010, and SEQ ID 2241;
(iii) 14 lncRNAs of SEQ ID 2150, SEQ ID 1534, SEQ ID 0311, SEQ ID 2952, SEQ ID 2838, SEQ ID 1437, SEQ ID 1297, SEQ ID 1059, SEQ ID 1465, SEQ ID 2826, SEQ ID 0180, SEQ ID 0538, SEQ ID 0258, and SEQ ID 2273;
(iv) 20 lncRNAs of SEQ ID 0190, SEQ ID 0359, SEQ ID 0776, SEQ ID 1421, SEQ ID 1795, SEQ ID 0477, SEQ ID 1511, SEQ ID 0435, SEQ ID 1418, SEQ ID 1025, SEQ ID 0265, SEQ ID 1311, SEQ ID 2540, SEQ ID 2323, SEQ ID 3011, SEQ ID 2447, SEQ ID 2863, SEQ ID 2697, SEQ ID 3128, and SEQ ID 2265;
(v) 11 lncRNAs of SEQ ID 2540, SEQ ID 0545, SEQ ID 1766, SEQ ID 3011, SEQ ID 0968, SEQ ID 2371, SEQ ID 1533, SEQ ID 0749, SEQ ID 0609, SEQ ID 1446, and SEQ ID 2986;
(vi) 8 lncRNAs of SEQ1204, SEQ2454, SEQ0334, SEQ1403, SEQ1089, SEQ2692, SEQ2273, SEQ0502;
(vii) 4 lncRNAs of SEQ0097, SEQ1947, SEQ1051 and SEQ2996; and
(viii) lncRNAs in Table 4, Table 5, Table 8, Table 9, Table 12, Table 15, Table 18, Table 19, Table 20, Table 21, Table 22, Table 24, Table 25, Table 28, Table 29, Table 32, Table 33, Table 34, Table 35, Table 36, Table 37, Table 38, Table 39, Table 40, and/or Table 41.

The application's sequence listing, which the Patent Office published only in electronic form, follows.

SEQUENCE LISTING (3238 sequences)

SEQ ID NO: 1 - DNA, 557 bp, Homo sapiens
tgggctcaggcccagagtgccagctttgccctatcccatagcctggagccaccacaggaggggcactccactctcttgggctcctggagcctcagaggcagagccagccgggagtgcaggagggagaactttcctgtggacgtcctgtgttctccagacgcagagaaccctcatcaaccgagggggaggtcacttccgaatccacagatggcgtgtgagtgcatggcgagcgcctccaggacacacttactgttcccttgctctggccagacgccagccggaccctgtgtgtgcgcgccgtgctgctctttgcagctgcctgcaaggggttcctgcgaagaccagcaccttggggaagagcctgcggctgaacttgaactcgcagctacctgagtcagacctgtgctttttcacctctacggaagatgtcagagcgtttccctagcaatgttttagaagttacttctgtctggaaaaaaatggaaaaaatggcaaattatgttatgtataatttgataattttaaagaattaatgatgtaattattactcaaaccca

SEQ ID NO: 2 - DNA, 1001 bp, Homo sapiens
ctactcccttcctagcagaaccttgattaggtcgaggtttaaacagcaatgtgtcaaggcaggtggaccaggaggatcctaagggagggaacttgattgatctgggccaatcgtaacactcttgaacatcccttggtcagcaattggcttagaggtgggcatcctaaacttggcatatgagaaagacagtaggaatttgctgggcgctcttgggaaatattgcataaaacaattcatcaaaattggcctttcctttttgccttgacttgccatgtaagaagtaatgcctaatgctgcgacagacaaattgcaaccatcagggaaagccaggagactctgagagagaccaattattgagctgatgaatgaacccttcctgaagccacctacttcctcacttattggtgtgtccttactgtgtaaaccccttttaactgggtgttttgtttcttgcagccaaaaacaatccattgatacacttggtgacattaattgagaaaaaaacaatatggtctggccatggaggcatggtatccgtaacatcccccaaaggagctaaagaagaaatccacaatttaccatgagcatttctcgtctgaagattgccaagcgattcctccaggacattcctcaagatcaatttctgttcatccaccttgtcctgggagggacatcaatgggtttccatgtcctttggcttctggttgagttcactcagtggagaaccctggcaagaggcaggaaaaggggaggaagcctgaccggtttgaatttcaccttctgttcaccttggatgagagcagtaatcatcacgatcccagggaacagccaaaggaagagaaaaggcaaaagatttggacaagactcatgaagactaacagctcttggataattgagagaaggcagctgcgtgaacagttttgatgcaatcatgaaggcagggcccagtgcctgtggcatctgcctttttctggaaccaatccatatttccttgtggtttt

SEQ ID NO: 3 - DNA, 790 bp, Homo sapiens
ctcggcacgacccaggttccatgctacaggcctctacttgtccagacctgagggtcagattcagatggtgcaaatgtttaagacctgggtcttcaacgagatgaattatcagctatttcatagctgcagtgttggatatgccgagacgataaaagcaacagcaatcagaatcaacagttgaaacgacatggcagacgctgtgaatgctatgaactgctgtgctgagcagcaggattcctgtgtcctggcgcaatgcccatggggattcatgctttcagagggtcacgcctcaggaacacgtagaagggcaagcatttcatctggcagggcactgatttaatctgcacgcatgtttggctgtaaaactagctcctcccccttaccatttttgagtcgctgccggactcaaattccacagattctggaaggtgtccaggaactcgttgatttgtcaaacttatggctacacacagctggaatggagacggactccactgaggagactcatacaggacaggagggaattttaagaggataaccctgagattgaaaacatcaaaccaaacctgaagcactgagaggttgggtaaccagctctggtcactgagttggtgagggatggattcagaagaggtctccaattgtgacaccgcagaggacctgctcttggccactacactctaccagctctgcaagaagcgcttccacacttttcatctcagacccacagagccagtgtgtgcggctgaggtgctcagactggcaggtgaaatgacttcattagtgccct

SEQ ID NO: 4 - DNA, 768 bp, Homo sapiens
aaaatgcaatttgcagtggttagaaatgacaaaggatgggtggtaggatccagagaaaaaacagtgaaacccgatggaccttaaatagatctgagggcactgatttgattattttgggtgaaatcttttaagaaaatcttgtcagattcttcacagaaaatttggtaaagcctatatttcatcgccagcctagcaaaggcaagctggcaaacagggaaacaaggagaactgtgtgctcagccctccagagtggcacggattatgaggaggtgatggtccttccccgccaagatcctgagacactgtcactccggaatccaaaaagagattcagataccatgaaaggatttgagcgtttttttatgtgaatccaaagatgacatttacaaaaggtggagaagcagttccctactgagggacgtggatacaaaaagcagatgacacaacacatcccatagagttcccagggaagaatgaacccagattcttgacctgcagaggtggcgtactggctggagaaatctctggctggcgaccgtgctattctgtctgtccacctaactgtgggctcccagatcaccactgccatgggcagggggccgtggggtgggcctgcttggggtgacaggctagctgtgctcccatagcagaggtgggagaagggaatcacatctggtgagcagctatgtcgtgccaggcactgtgctgtgtattgcacacatctcaaaccttgtgacaaatgtgtaagatattttttatgtattacaa

SEQ ID NO: 5 - DNA, 4997 bp, Homo sapiens
ctgggaaactctcgggttccacaccctccgatcctatccttgctccgatggtgcccctgagccctgctcatgctgcttggagcacaatggctgtcctttgggtcagcccttctcaccaggcctgcccagggcctgcagccttctctacttgggccgtttgttgtggcatcatgacccaaccagaaacagactgctcaatcatagacttgttgtttgggattcccttttgggtcacgcactgagttcctagctagagtttcaggaatgcctccagctgtcagctccctagaggaatagagatgtctgtcacccttgagtccgggcacaccccaagccctcttcaggggtacctatccttgtctatgggcctgtattctctgaaatggctcaccccagaggtgaccattcactcacctagaatccatcagtaccctgttctcaccaaagacagagaggttagtggccagaacagaactgagcctttgagccctttggtatcttttccacaacaggctgcaagagctctcacacttttttttccttggcgtcacccctccacattgtccagatgcctgacagtcttccattcctccccgttcctttctctgcactgcttaggaaggtcaggttggtcccagcaggagggagagaagaaaacttccagtacccgtggaaccccagggtgctaatgaaagtcttcttttgggtacttgttacttacttaggtttcagtcctaaaaatgaagaggcagtttgataacctggcagctactctggtttttctcctggggcccttaacccactttgggaccatcgcctccctcctacatctgaatctcaactctgccactttctggcagtgtgactctcagaaacttcttagtctatgtgacccattatttcctcttgtcttatcattgctgttgcggagtttaaatgagatactgtgtatggtgcctggttcatggtgggtgctccatcaatgtcatttatcttccctgtcccttaccccgtccccttcctccaaacacagtggcaagaaaacaggctctgtctccactggggatcagtacatcaattcaaacaaccaggggacctcgcggtccctgccaccactcccagcccctaccatccactgcttatctgtgttctgaaaatagatcctctccaccctacccccaatccactcgagagaacatgagtcctttcccctcttggccacagccaaagttcattgttgtaatttcctggcctaattcctgacccctcctcaggtccttttgtcccatctctctcgctgagatgggtggatgggacaccttcctgatccagtatcatctgcaaagttaattaatgtgtcatcgggctgttgcctgcttcctgatccttatcatggatttaaataaaacgcagcagccccagttctgccccgtccatctctttcccttcatcttagtcatcagtccttgacctcagccttctggctagctcttagcttccagctgcagggctggtggccctgcttctgcccaggcctggtctgggggcagaggtggcatgcagggctttaatggaatgcagggctttaattctgcgagagaatcatggacatcaggcccttacctcaaggtcccacttccttcagggattctccctaaattttagccataagggactttaagatgccatttagtccaacatgctctttttcagataaggaaacagaggcctaaaggggttcgtgacttgtccaaactcacacatctaggaagggcagaggtgagaattcagatcctgacaatcagtggaaggtcccacagaaaggttaattgctttgtttatttatttaaatgtgtgtcaagggcctgccatgtgcaacacattcttctaggcaccggggttatagcagtgaacaaaaaggcctgcattgtcacagcttaccttctccagggcagaaacaggtaaaaaacaaacaagcaaatatgtgttgtgtccgattgtgatgtgtgttatggagaaaaatacagcagaggaaggagaacggctagcactgggagaaggggattacaatcacatacgagtgatctgggacggcttcacagggaggcgtctttcagcacaggcccaggaagtgacaggatggaccacgtggccatctgaggaagaactgtctgggtgcaaaagtcctcaggagagcatggtattcttggaagttcgaagagtaacatggaggcagagtggctggaaaggaagggaggtgacaataggagatgaagtcggagagatagtatgggaccaggtcacgggagcgctttaaaggaaatgaatgtgtccaaaagaagcaaaaaatgctgaaggctaatagtgagggaaaggccccacgacccctgagcagagccccgacctgtactaactggactgccaggccagccctgggctgcaggtaccatgtcctttcagccctcaacgcccccattcctctgctcggctctgtcatcccctgactgcagtctccttagtctttctttcacatctgagatgtcaaagaccaccaatgattcctaaactccagcctggccaaggagagacagaagtgcctccttcaagaaccataaccaagagccttctctcttcctgttgacacttgccttcgtgccaagttcctaatgagatgaatgactcttcctgctggccagcctaggagtgggaatctcccttggcctcatctctcagaaatcgctccagcaaagccagctccctcttttgtctgtggctagattgaccatgttctctcccttggcaaaaagctggtggatggtcaggttcttccaatatggtcacattctcacccatatcccgggccctgagcccaaaaatcacttgatccgcaataccgcttgccacatcctctctatttccctggattctggcaaatctccgtctagtaacatcatttctatggcctagcctaggcagtttcatgcctgagaaaaaaacatttcttcctccctctccccaccttttttggtcttccatttcatgcctcccaaaagttcccctcagttcttggctttcccttgcaacttggcatcatccggagcttcttcacatttcattcattcatccatgaatttagcaaaactactaagccaggtacagtgttcagcatgggggtggggtggtcacacagtccaaagatgaacaacacacagtccttgaagatcttacgctctgtcggggaagcagacacataaacagatgatttcaatacactgggactggtgtcatgataatggttcactctgataggaaggcacctaaatcagagtttgggggtaagtgggaaggatggggtggtgtagggaagcttcccggaggatctcagtcttctttcaggtcccacatcaataacaaaaccactaagctgctgaggactttctatgcgccaagtgctgtgctaaaggctggacatgtattatcccgttggactctaggtagagtagaactaacccagggtgctcaccagttagcctgtggggctgttcactctttgtccttttcctggaggagaaagagaaaatcccagtggcccacaggccccaggaaacaacagagcagcttggcatctctggagtatgcccagctggcttagtggaagttgtccaacccagatgacatgtccctgtgttacattctggttgcttctccttgctacagagcagagttttctggggtttggggagggatacggggagcctccatctttggattcttttggtacaggaacaacatccctccaggtgacctccacctaccatggctctgtagacgccagctcctcagcacaggacctgaggtggtgagctgggaggaaacccaccagacgtgctcttcttcctgaggtgcttagagtcaggttccacagtttcaagcatggccaacctccaccttcccctctctcagcccatccacctgattctcctttgctgttggttgaagagctcagacaaaagaccaaggctgtggctccagttccagcactgcctctccctgtgcattagaccctaagtgaatttcttaacttggctgagcctctattttcccatctgtacagtggggataatacccttctccacagagttgttgagaggatccactcgaatgtaaattatgaaaaagagctgtcctttccaaaaagccaaaagaagactgttggaggaggaggtgggcgatactcttctccttcgacaggtgaatatattatggggagacgtttctaggtggagctggaagcccggtctgaactcagtcactattcttattagatcaggtgagaagatcacacaggattcagatggctccgaggtgacaagctcaggaataatcccagcttcactgttagaaactgcattttctgggtcttaagacatggaaatctccatccaatgaggatgtagatcattgaacagatgtacaccctctgtactgcactgcatcaggagtcaggagacctggcttctagtcctggctttaacatgaggacaaagctctataacatctgcaaagtcacagcccttctctgggtcttgaagtccctgttagaaaatcaagtggtcccactagagaatccatacgatatcttcagccctaaagtgcagaagtcccaagactgtcactctgtgcaagacccacccccatctcacagctggggactgagccagggctcagcaatgctggcatgagactcaaatgcaaagatcctgcttcccgttgcctcaaagcaccagctctctcgctccatcctcccaagagcctccaaggcgccattggcttcctgggactctgagtctgccggcctcttttcctgactccagtttcttctggcctgagccaatggggcatgttctgtgactgcatttgcatctcggattgtgtttttaaacccattttctcccatatttgcctgaaaaatatatagaaactgatatacaatccaa

SEQ ID NO: 6 - DNA, 622 bp, Homo sapiens
catcagacctgaggacagaagggttcgggctgcaaggaatcctattgtgtgagagccatgacacagtgagtgggagttttgatcttgacctcctggagcattttcatggaaaaggcagttccaggattctttgtggcctcttccacaggagaaagtaaaggagctagaggcctctaaaaatttagttattgaagaactgaagttattcacagcaacctggcagaagagaatgtgaaatacgtgggtctcaggtaataggtaatatccctaattccacggtgatgctgagaagcagagggcgccctcagaagtagtttctcttaaggaatttgcagctggcctacaagaacaggaccacagaatcaggtcctgtaaaagggtatgtaaaagttgtattttttgcacatctgtcttgtattctgagtcacactcctctcattgattatccttcacaatagccgttgttttaacagcgttatggagataaagttgagatggcatataattcacccatttaaagtataagattcaatggcttttagtatattcacagagttgtacaagtgttaccacaatcaattaaaaaatgttttggttactgtagccttgtagtatagtttga

SEQ ID NO: 7 - DNA, 3979 bp, Homo sapiens
gagcggggagcaaggcctgcggggaggcgcaggatggacgcgttggctgtcatgatgtaggacctcctgacctagaaccatgcccggcgcagggagaacaacgagcttacggaccgggtgcgggggctgctgtgcgagaaagcctacctgctggcccgggagcgttcgccggcccacctggtggctttccctggacgtttaacggcgactccgcccggcctcccgactttttgatgcaggcgttctcttacatgactttcttcgaggctagattctcgaaagacatcctgaaggtggctttcttaattagctgcctcaccggctggcggagcagttcgtagtcgcctacatcgagagggagagccccgtcctggctcagtactggggcttcgtggacgcgctgtagcgggtcttcgccgtcgtgggtaggaaacagtcgggccggatccccggtgtctggggagcggctgccggccgggcccgcgcgagccgcttcactcctacaagcccggctcactagttccaagctgctggactttgaccctcgctgggaagcttgatcgccgcctgttctcgccaatctctatgcctttgcactgcccagcaacccggtcactgcccaggacctgttaaaagttgaatggacctcccagaatcacgccgctgccaccgccgtttctagagacggcttttggccacctttgagaatcagggtcaaacttggaagggcctgcatttgtcacacttcctcggacactaatttggatagttcaggcccagagacggcttcccgggttagtgtgcctgacaacactgaagaaaaattgtgacattttccttccccagaattacttcgttttatacatttcacttctcttctgaaatcacagcaatgccagtttgcgccttttggtctgaggaacgcaggccctggccactaccaggaaaaaatcctttgcacatggcctgctatcaacaatcctctacaatgattctcagcatcacctagggagcttatgtaaaatctcaaattcctgggccctatccccagagtttcttatcaatttccttgatggagaactatcaaagcagtcaaagctatcaaaataaaaaagaattctgattgggtgcagtggctcacacctgtcattccagcactttgagaggccaaggtgggcagatcacatgaggccaggagttcaagaccagcctggccaacatggcagaaaccccatctctactaaaaataccaaaattagccgggcatggtggaacacacctgcaatcccagctactcgggaggctgaggcaagagaatcgcttgaacctgggaggcagaagttgcagtgaaacaagttggtgccaatgcattccagcctggatgatggagcgagactctgtctcaagaaaaaaaaaacaaaaacaaaaacagaactctgcctcatagcgtcttttaagttatacactggacctatcctttcctcactgacagacattttaaaaattttttggtaaggcctagttcatataaaatgtaatccaagccaaaagttaacaagaataaggggaggaaaggggactccaatagcagagaaaggtatttacctgggatatacactgcaagaaaatcaaagctataagaaacgtccatgaatagtagccataaggcatcagagtgataaaattcctgtccctaggagggaatattggagtttgccagagaaacagaatgagagagacagagaggtttattgtaggaattggctcatatgattacggaggctgagaagacccacgatctgccatctgcaagctggagaatcaggaaagctggaggtgtaattcagtcaagtccaatggccagagaagcaagtgtactgatatccaagagcaggagaaaatagatgtcccagaacaagcagagaggctgattttgtccttcctctgcctttttgtttcatatggggcactgaatggactgatgcccatccacattagtgagggtggatcttctttactcagtctaccagtagaaatgtcaatgacttccagaaacaccctcaccaacacacgtggaaataatgttttaccaggtatctgggcatcccttggttcactcaagttgacacaaaattaaccatcacagaaggagactggccttactctgaaattaggaaactaaagaagtgaccagaatggagactaggtagagacaactagttctctaccaaacatgtacagttattcgttggtatctgaaggggattggttccaggaactctcagggataccaaaatctgcaggtgctcaagtcatttatataaaatattacagtatttgcatataacctttgcacatcttccatatactttaaatcatctctacattacttataataatgaatgtgtaaatgctatgaaaatagttactacactattgtttatttgtatttttattgaattgttttggggtggggggcagctgtatctttcttagtaatagaacccctggttttagctgggcacatgactgccctcaataaagattaaagtaccccagccttccttgagattgtggccatgtgactgaactttagacagtgagatataagcagatatcttctgtggcagtgttaggaaactattaaagacagtaagaacattgccctttgccttctttttcctttcttcatttttctgcctggaatgcaaatgtgatggctaacaccctagcagccattttagattatgaagatgagagtcactccccaggaagggtggacctgaaagctggattctagatgtggaatgacaataccagccctggactacctacctgtaggctgtgtgtgtgtgtgtgtgattgacagagagagagagagatagataccacaagtaacacaaagcatcatacctgggactgggaaggttaatgtttaaacattttaaatgtggcattggtttgttgaagacagtcaagcagtaggtgctgcaggctttgttgaggctagaaagctgttggtctttattaggtgatggcaaaacaatggatcacattttcatgtgctgtgtcttgggaggcaaatgatgagaatgtaggattggggaaaatggtaaggaaaatccaaaatgttcatgttttctaaccccttcttgccaatcttaaaagaaggacaaacaggctagattaagcaagtctacagttacaattggaaggaaacacagccgtactaaggaagtactctgtctgtggcctgcagtctagtttgactaggtcctgtatttgagctttgaaagagtaaagaatacaagtgctcgtatacccctgaagtagttaccagcagtgactgcaaggaggtaatcttatgggatgaaactataactctgtattaaccatcatatatagcatatatgtgtatatgtatgtgtgtgtgtgtatatgtgtatataaatatatgtgtgtgtatatacacacatgtacacaccctacaacccagtgatttcaaaaaattaaacatttgtttagctcatgaatctgtgggttgggtgaacatttctattggtcttggctgggctcacctgtacccagtcagctgcagggtctagctcttcttatcttggctgggatctcacacatgtctaggatcagctgctttactagtctaggattgtcttggctgagacaggtggactactcagttctcctccactgccttatccttcagctggccagcccagaaatgttgccatgtttacagcataagagcaagcaagaaagaataatatgcaaccacttttccaagcctaaggtgaaagggcgggcagaacctgtggtgttaggaggcaactcataccagcccatgggtctaccgtttaattttcagaaatttggcaagctgattgttaacacagctgttgtttaatttatgtacttgtaattaaataatttacattaaaacaaagataataggtactcaaaa

SEQ ID NO: 8 - DNA, 2099 bp, Homo sapiens
ggcagcgggggcgggcgagaccacaggacggagggcgcgggggagcgcgccggaaacgcgcggctgcggcccgggagaaacccccccactcggcggcgggcctcgcggcgcgggcccgaagccacgcccccttccggccgaggcgcggaccgcgcggagctaagtggaatcccggttggcttggggcgcaggcttccaacttcgtactctggcctctggcgtctcggctcgtcggttgggtacccgaacccagctactgctgcttgaagagaagatggatggggactcctcgccgtcgctgcgccgccggccttccctgggcggacgtacacctttgcgaagcgtcagtgaggacccagggcccctccttggaatagctcttatttctcaagcgctgcagcgtgaagctcgctctgcgggtccgagaggcctgcgatctgaagactgaaaactgggaagagacgctctaccctgtgctcctcgccggcttcgataggagccgcaggtgcctgggattttctcaaactttgtcccaaacttcagctgtgggagtggaggaacaaacaggcctctcccagaattgtgaaagagatcgccctggtggatgaaacaaaaacaaatgcacttgacttccaccgcctgcctggcgtgtcacgcgggtttaatgtatgtgtcacatttaaattcaaagtattttcttctaagggcctggacacatttcttttctccctgtatcgtgaattggaaaataccttaggatattaaaagttatctaagataaccccctttcttctgtaagttaaatactaaacggcttaagacgaaattttggaatatagagatgatgatgcagactgcagtgaattatcaaatatgcatctcactgttctccacattaaacatatttttgttgcgtaaattcatgttaagacgtctataacaattacactttggtaaaattgttggatgttaacatctctgatagctcccaatagaaatctctgatgtactaaccagactggtaaaccattatcatgcactttgaaaatataataaaatattataattaaagctgccattaatgaaataggctgagcaacaataaatttacaaaggaaaataaaagtggatagccttgggagttctcacataaaatatggagatttcaaagttaaacttgattaattatgttagggtaaaaagtgaattaaagcaacaggactatttataaaataattagatttagaaagcagtcgtagaaatataagcctggagttgcctctgaattacatatttaacaaacctagaagctaaatcagtttgtcttttatcaaaactgcaactcctctaagttgaaagcacagtgacaagagaaagcattacaaattcttgagaaataatagaaattaaagctcttttcaaacctgtgaacaagtatagtaccagaagtataagattcagataggcccaagttgtagttcttgttatgagtcttacaaccctatggactttggacaaattacttctctgcgtctgtttcctcatctgtaaaatgaaaataatttctgtttcatacaggtatagtctaaatagggataattacacctacttcaaagttgtaaaatacacaattacaactagataggaggtataagttctagtgttctgtagcactgtaggatgactatagttaacaatattgtatagtttcaaatagctagaagaaggatattgcatgttcccaaaacaaagacataagtttttgagatgatagatatgctaattaccctaatcactatatgttatatgtattgcaacatcactatgtacccccataaatatgtacagttattgtgtattaaaatttttttaaactaaaattataagacattaaaaaaaggtatcacatgtaaagtacctgatacatagtggttactcaagtattagttgtcggccattgacagtccttgcctatggtcttttctgctttccctgagctaagggatcaagacttaatatatgtattcttacctttgttctaattctgactcttcaaaaactgtccttcaaatatacaattgtacatattttttcaaaaa

SEQ ID NO: 9 - DNA, 1684 bp, Homo sapiens
agaagcaggaataaaatgatcttttctatttccatgattttttatgtttctgtttaaatggttaaatacccaattaggttagatgctaattaaatgtaaaattactgggctgttccaatatgcatgttaaagttgtacttcttggttgtttgtaatttacctaactcttgagagatcatcagagcagcccagctgagtttaaagaaggcttccaactgcccaggatatgcatcagttcctgaacaaaaaaagaacaccccaggatcaacagaagctactatcaaatccttcaaacactacatgcaccacatgctcacatttgtcctatttttgctactatttatccacaaaaaagccaagcctgaactccttcttgaggccaaaacttaaaaatataccaaatgaatcagttcaaaattttacaaatttggtttggcttaatcataactgattcttcatactattgacaccgttgattcttcacactatagataccactcactaaaattacaactcagtcacctcttcccatataccatatttcattaaaatcaatgtaagataagaaatggttaccagatgccatcgtttcagaccaaaccatatgtcaaattttgaataaacctaacaacatctgattggttaagtagcatacctagatttattaaaatcactacactcctttaatgtctgtaggagaacatgcatgcacaagcacacacacgttgtgtgtgcatttatatatatatatatatatatatatatatatatatatgtatatgctactgcaaaattgaagagactttaccaagttctgtcattgacagggacattatatataaagaatatacatactgtaattcacctcatcaagagttaattttatggccgggcacagtggctcacacctgtaatcctaacacttcgggaggcagatcactttgagctcaggagatttgagaccagcctgggcaacgtggcaaaaacccatctctacagaaaaatacaaaaatgagctgggcgtggtgactcccgcctgtagtcccagctgtatacatgggaggctgaggctggaggattgcttgagccaggtagcagaggttgcagtgagccaagattgtaccagtgcactccgccctgggtgacagagcaagaccttgtttcaaaaaaaaaaaaaagagttaattgtaccaggaacatgtggtgtcaaaatttaaaatatgtgaactctttgacccagcaatgctattttcagggatatatcctaagatcatcaccagcaaagtatataaggatgtgcatgcaaaaatattcatcatggctttctttatacaatgaaaaattggaaataaacttctcattaatgggatgctggttaaagaaaatcattactgtaatatgcagccatctaaaagggtaatttatatgtatatatatttacataagaaaaccctcatgtcatattgctgagtaaaaagaaagatgtcaatgagtattcatgatgtgattctatttatccttgcaaatggtggaaattcaattatatggtattttctctcttttctgtttgtttttcatatatgtatatatttcctttgaaatcagaaaaaaatcaagctattttcatcagaggaaaaaaatcattactctgtatttcagtcacactaaaatagtcacccaagaa

SEQ ID NO: 10 - DNA, 543 bp, Homo sapiens
cctggccagggtcctggtcccatcccagtgggcttcctgcctgccagcctgggggagtggcgtgggctgaccccgaccagactgaccgggcctcaacatcacctgggaatcctggaaggaaacaggttcctgggccttgctccaacctaaggaacccgaatctgcatagctcacatggcgccgtatttccaacgttcagagcacattggaaagttgggaggaaggatgaggcttgtgttttcactcacaaactccctccagaagatgataatgaaagtgtctgacgcataaggaaataaataagatggttatgtgcccagctcaagggctaaggtgttggtcaagaccacacccgaggggctgccagtcacagggtggggtccaagctcctcaccagacccaacctcccctgctctgcaacctcatccttcccctgtctttcctgggttaaattttacacttagtaacactgaaaccaggcagtttcacacctccgagcctgcatctatgctcatctctttacctgaaacgtcttctctcacc

SEQ ID NO: 11 - DNA, 3889 bp, Homo sapiens
actataccattacacaagaaggacaagcctcaattcgccttctctgtgccttctattaatcagagagagcctgtctcttgtgatcaatgaaaagttttattaccccaggcatgctcaacagtcctacgttatgtcagcattttgtaggaaaagcattgaaggagcctcggaatatgttttccaccacctacatcattcattatatggataatattgttttggccactcctacagatcaagtattataccagttattcagagaaataaaatgggctttaactaaatggaatctcaaaatagctcctgaaaaggtacaaacaacctcctcataccaatacttagatactactgttactgaaaaaagtattcagcctcagaaagtagctcttcgtaagaacaaattacaaactctgaataacttaggggatattaattggctgcgcccaatgctaggtattgcttcttatcaactcactcatgtttatcaaaccctccaaggagattcttcattagattcccctcggcaacttactaaggaggcagaagctgaattacagcttgtagaaagatgcttcagcaacgacatgcctcctggctacaaccacaaaagtctttggttttgtttattcttcctaccccccattctccatcaggacttttagctcaattcatagacaaaactataatggtaatagaatggctttttttatccagtcaaacagtaaaatctttgcaagtttatcttgctttagtcacacaacttataacaataggcaggcatagatcaaaaatgcttacaggatatgatcctgataaaattattgttaccttggattcccaacaacaggctgcggcctgggagatgtccactgcatggcaaatcactttcgcagattttgtagaaataatagataaccattatccatcagacaaaattttgcagttttataaaattcacccttttattccccctgtgattgctcatcacaaacccatttcaggtggacagacctattttaccgatggctcttccaaaagccacacagccatttatggacctaaatatacttaaataataaagacccctagagtttcagctcaacactctgaattaatggcagttattcaagttttaaagctcacagctttatttcctattaatattgtctgtaattcagcctatgtcgtaaatgtagctagttgcattaaaactgccactatcaagagtgtacggaccagccccacagggtcggtgggtctctccctgtgtgcggcgacgagagagtgtagaaataaagacacaagacaaagagataaaaggcagctgggcctgggggaccactaccaccaatgcgcggagaccggtagtggccccgaatgtctggctgcgctcttatttattggatacaaagcaaaaggggcagggtaaagagtgtgagtcatctccaatgataggtaaggtcacgtgggtcatgtgtccactggtcagggggcccttccctgcctggcagccgaggcagagagggagaggagacagagagaaagacagcttacgccattatttctgcatatcagggactattagtactttcactaatttactactgctatctagaaggcagagccaggtgtacaggatggaacatgaaggcggactaggagcgtgaccactgaagcacagaatcacagggagacggttaggcctccggataactgtgggcgagcctgactaatgtcaggccctccacaagaggtggaggagcagagtcttctctaacctcccccagggaaagggagaccgccccccaccctttcccggtctgctaagtagcgggtgttgttccttgacacttttcgctaccgctagaccacggtcttcccaaacgctggcgtcaccactagaccaaggagccctctggtggccctgtctgggcataacagaaggctcgcactcttgtcttctggtcacacctcactatgtcccctcagctcctatctctgtatggcctggtttttcctaggctatgattatagagcaaggattattgtaatattggaataaaaagtaattgctacaaactaatgattaatgatattcatatataatcatatctaagatctatatctggtataactattcttgttttatattttattatactggaacagcccgtgtcctctgtctcttgcttcggcgcctggatggcttgccgcccacacaagagcaccttaaaaccagaactgcttaacctatttctgagactccaaaaagctgttcgctctcatgctgccccttttcatatttctcatatccgatctcacacacaacttcctggggccactatctctaggtaatgatagagcagataaattcatcagttctatatttcaacaagcccaagcttcccatgctttactgcatcagaacaacttgcccttactcgtatgtttcatctgcctcgcagccaggcttgagttattgtgcaagcctgccccacttgccagcatgtccctggtgttgcacctgtggaaggatgcaacccacgaggcttggctccaaatgaaatctggcagatggatgttacatatatatagcagcctttggctaactccgctatgttcatgtaatatagacacttactcccatatgttacatgccacatgccaaactggggaaacagctggtcatgtctgacgatactgtctgtcgtcatttgcccatatgggggtccctaaacaatttaaaactgacagtggactcgcttatgttagtcatgctttcccaattttttacaattgtgggcaatcaatcataaaacaggaattccatacaatccctgagggccaggcattattgagcgggtacatcaaacactacaacgcatgctgaaaaaacaaaaagggagaataggggaccaattaccacttcaaacaaaattacatttagccttgtttactttaaattgtttgactcctggtacggatggcaagaccccagcagaacgacactggcaactgctagaggaaaagaggcaagtttatccaaaagtgttatggaaatccccagaagaaggacaatggaaaggtccggtggatttgctgacgtggggacgagggtatgcttgtgtttttacaggagatggacaaaccgtgtgggtgccctccaggtgtgtgtgaccatggaacgggagaccggagggatccatggtattcaaccgtgggcctgttacctccagtacgagccatgagccagcggaatctgaatgcaaagacagaacaagggccgaccggagtcacaatgacatccaaccccataacatggggacagatcaagaaaacgacacaagaagctgagaaactactggagcgccagggtcaggcaaaaacccctgactccatgttcttggccatgctagctgtagtgtcctgtgcgtctataggatcgggtgaaccaccaaccggcaattgaaagctgcacagcctgaaattacctttattcaattaatgcaaaaacaaaaggggagatgttggaggccgaaggaatgagggtcgtgaccaactcagtataccactggaggctctgtgagcaaacagcaaactgttctcatgaaagcaggatgttggcgaactgacaaactctgtctgccgccagaaggaatgctgggggcagtcatgtcccaggtcccgtgctccttgaggttatccacaggaacatccagaacctgttgaacaaagaaaggaatcatgtgggcctgtgttaaatcaaatagctgaccgacagttatcccttcctccctattcactctacctaataaatatgaagggctgtaaaagctcaggtccctgttccctaatatcaaggagccccctgaccccttctttcaaacag

SEQ ID NO: 12 - DNA, 858 bp, Homo sapiens
agggctgggagataatacagcaaaaagcctgccatgtcctggtgacaggagcccatttcagcggccaaaaaatctttccaacagcttctgttttgctggtaaatgtctgtgtttgtgttggttgtaggaggaaacctgggaaaacaagttgggttctggatgagaaaatgggtgactttgttataggatggagcaaagagaatcacaagaaagctcaatggcatttgaccccaaatggaaaacccaaaatgacacttccattaggatattcctttgttttggaagaacagggtgagaagaagaaagacaggggcaaactttaccagacatgcccttcaccagccaggattagtaactgaagaggaaggagagaatgctgggtgcactccagctgctgggacccttctctttccatctcactgtacctttgcttctggaggaaggaaaatacattcaagtcctaggaagattctgaaggtcaaatgagggaaaggagccctgcccagcaagatgtatcatgtcaagccacctgcttctatcagtcccaaatccaccatcaccttagttcctgactgcaattagcacaactgtgttatcacctgctctaactttagagagagactgcatttaacatcaagaatgagggtgcttttgggaaaatgaaaaaaaaaaaaacaaacaaaaaacagatgaacatcatttcagaaaggaagaggaaaaatgatgatgattctccttgatatgaaataatgaacttcaagctctaaaacagaacattgcatagaacaagaggaggacagaggcagaaaaacttgcctgtgaattgaaagatatgagatagtctggtaccacaatgaa

SEQ ID NO: 13 - DNA, 751 bp, Homo sapiens
cagtttactccagagaagaaactgtgtctcataatttcttttgcatcatctggtcctccaccaaggctatgagaacagaaataaaattaagcacagtagataccagatgctcagagcagagcagccatggagctgctgggaccaaaccttgcctgacctagccaccaccacaccccagacatataaatttaaattttactgatataaagaatgcaaaacacaaaatttacaaagatcataaaacatacaatgttgtgtattgtaaattagtcacctgattctcacagaaaacttgttaatttctgctgtacgccaaagccactaatggatgaaacttacgattagttccaacatgaatattggttgacatttttgtttatgttaaagtcaaagctgaaagtgatacaatggagacttcagaacttcacttgtcagttatttgtgtaggtttctttcccaggagactgcaaactcctttgaaggcaagatcagtgctggattatccaaaaggcattctaagcttgtgcttggggaaccagagaagcaaaagcaccaaaacacgtttctgaaaagcatttaatattttcaagcatgcgtcaacatagtctgcatgagaaacatcaaagctccatggcattttcttacacttatgttgtagtttatttcaatactgttttcatttgaattgtacttgagatgggagttggagtggagaatcataatcattttgtaaataaaatgttttaatcca

SEQ ID NO: 14 - DNA, 636 bp, Homo sapiens
acaggaagcgtgtaggaagcgtggcgcctcagccacaatcgtaatcacctttaatctcttgctcaaaataacccaaagtcaagctgaccctcggtctatcttgaggccctcggctgcccccgacttgaagattctcccccgttgcgtctaagtggctgctccaagttcccgtccccgctggcatctccctgcctcaccatccgccacattcctacaccaaaagttgacgccgcattctggactcctctctttcctccccccacacctggtccaactccagcagcatctaatccacctgcagaagcatctggaatcactccactcccaccacgaccgcccaaacccacctccagcggggacgacgcccaaggtaccacctggtctcctggcacccacaatccattctccctccacagccagagggagcctcgctaaccaccaaggcggtcctgcggccccgcgcagccctgagggcgtccagtcctccacgcgtggaggagaatccggcctccagacacaatctccagggcccactggatgggcctccgctccttctcactcccagtcctctggtgcatgcccccttcctggctgaagaacctgcaccagccgcccctccgcctgggaagctccctc

SEQ ID NO: 15 - DNA, 2368 bp, Homo sapiens
agccgccacactttcccaagcccgcaggcgccccccccaacaccagcgctgcacccccgacccattccccgcggccccctccaggagaaaaaatgaaaccagactggccgaggaggggggcggcagggaccagggtgcggagcagaggtgagggagacgggacttactttgcgaggcgcggtgcagggcgccgccgacgagaaataaaggccccgatacgggctgcctggagccccccgagcgcagcaatgtcagggctccagtccgggcggcgttggcggccgcaggggacggggacgggcgcgcgtgcggcgggcgctctcgctgcgctccggctcgggccccggctccgcgcggctccgctcctggctcccctctggctcctggcaccaactccgggcagtcacatgacgccggcgccgctcgctctgcgagcctcccggggctggcgggagaataacttgtctgactaccagtattcttggatgcagaagtgctgaagatgagcacacacacgtacggagaatttctggagaattcagctgctcagaacaagaactgagatccagagagatgatgactttgcccatagaccaaacaaagaaatacatgtttcagtcctgtgtcctcctgctatgtgtgtccggaattggtgggttcttggtctcactgacttcaagaatgaagctgcggaccctcgcggaccgtgtgtgaatgcctgctctgtgagccctcagaatctactggctgaatgagtgcgtggaggaaatgtgctcagagctgctgtgtgtcatcctgtgtttgaagtgctcctgcagctatcattcatccagttaagaatttgaagaagtgtgtgcacaaagacggagtctcactctgttgcccaggctggagtgcagtggcacaatctcggctcactgcaacctctacctcctggattcaagcggttttcctgcctcagcctccagagtaacagggattacaggcatactccaccttgccctgctgattttgtatttttagtagagacaagagtttcaccatgttggccaggctggtcttgaactcctgacctcaagtgatccactgcctcagcctcccaaagtgctgggattataggcgtgagccactgcgcctggccaaatgctctactttttaatcaatgttttccaaaatagggatttttgctatgtgctttagaaattagagaacaaacggtgataatatatgctaaacttaaaattagtatgcctccttttatagacaacaagaactttgtcacttcccagtttgtcttgtcattcaggaggctcagagctacgatctgtgcccactcgtgctgcctcttcttaactttgatttcctgaagcagcgatttcatctccgtttcccctcatcacctgttcttttaactgtttaaaaacagcattacatgttgttgcaagtggcctcaaattctttttggtagaagggaaattgtaatccatgagaagaaaaaaattttcctaactattctcaggtgtgtttaagggctgcattccatgatgctatcagtgccttctttcagctcacaggatatcggccatgttaatgagtctgatgttgctagtatcacaggcaccggaaaatatgcacattatgctggagcattagaatgcaacagaaagagccctgggcttggagtatgcagaactggttcttgttacaactcctcttactagtgggctctggaagaaaacacattgaattcatgatcatggttaacctttggagagagagaggagaccaggatgaaggagccagtcgaagatcctgttcaagtgtacactgagccagcaggttcaccagaaagctattgagcgtttgctggaacacattatgcagggtgaatttcttctggaatgttgccaaggattttttatgcttctgtggcaggcatttcttgaacattgtcatttagccaagcaaagaagattttcttaaaggatagaaaatgtttaaaaatttttgtttgtttgaagataggttaaatggctatatgatctcaggataagacagagaaaatcacttatttctctaagtgatctgattaggttagtgatgttttgcctttaaacagattcatcattattcctaaagtattgctgtattaatactgtcttctagaaagtatccaccagtgcctacttttcttcgatatcattagctgtttttcgaaactgaatttgctcttcagagatttctcatatgtttgcgtataaggaactactggtaatagccaagaaaatttggaggtgcagagaacatgctgaaacagaatttttcactttcaattctagaactatgccataaaaaaaaaggaaaatgt

SEQ ID NO: 16 - DNA, 2171 bp, Homo sapiens
gtgaccctgccgtgatgggcggggcggcaggggaggaaccagactgcgagcggagaagcggagtttgcagcctcggaattggctagagcgccagagccgagtcagccataaagctacgcgctaggctcttggccctgacgtgaggcgcgcagagatggcgtaacgggaatagttttcaacgtctatttcattccctgcttcagaggacctctttaatctttgattttggtccctgtttctaagaaaagcaactgaaaaggtcgtaataccgcccctgagaaaaaaggagcagcgctaaataatcgagaaaatgcctcctcttgaaacggatatagagatggaaacaagatataagaaggattgagaatcatataatacaggagcttaaacacctatgcgcgatgataaagagggtactattagagcgcttggaaaataccaggaagttgagagagttaacagaagggcgcacgctggattggccacaaaatcgaattactgaagtaagtgcaaaacgacaaattgtcacagaatacagagaaaaggggaaaagaaattaagaggagaaaaagagagatctagagggccggtccaggagatacaatctatgcataataggaatacctgaaactgaggacagagcaagtggagctgaaacaataaaggatctacttgaaaaaattttccagaattgaagaacgaactagatctacaaatggaaaaggctcataggatacctttaaagtttaatgaaaagaaagcagcatctagacatatccgggtgacgtttttgaatttcaaagacgaaacattttacaagcatccagtcagagaaagcaggttacttacaaaggggcaaaagtcaggctgacctcagatttttctcctgcaattctaaatgccagaagacagtggaacaatatctagagtgttaagggaaaataattttgagccaagaattatatactctgccaagttatcatttctttacaaaggaaactggaagacattcttagatatacaggggttaggaaagtatatcaaccaagaactttccctgaaaattttgctgaaggatttactgcagctaacagagaacctgaattaaaataagaatagggaggcaattgtatgaaagaactgatggtatgcattaaaactagttaaggagcattaagtttaaattgttatgtatagggcattaaaactaaatacaaaaatagaaacataagctgggtgtaaaatttcagtttacgtttaaactggaagggcataccacatgttcaatatattggacaaatactgttttatttttagcatgtagtattgtagatacaaatacgcatgttcttaagctaaacctaagtaaaagggctttgtcactgtagatttgacaaataacattctaaatgtcaaatctgacaattggaaaacagtacagttttatttcccttatttttaagtatagcaggaaaaaaataacaagtttgtccatgttactactgatactgtaaagaaacttccaaatcactggtttgggagggggtggatacatcctcattttctgtacatgatgcatggggaaaaacagtagttactgcatcatatagttccaagtaaatcatatagttccaagtaaatttgacatggaaataagtgttaactacaaaaatagaatatatacattccaatgtttggaaaagaagtggtaaaaagaaaaatagcaaaaagacactaaaattagcaaaaagtagattgacagtacagatgacctataaactggttaaatagccctattacaattgaaattgggtcaaaaatcaatctctaacctgagatacatttgtataaaacaaatgatcaaagagtttaaagataatggaaactataaatcatagaaatggcaacatttttcttaaaatctaaacataagacattttatgtaaaacatacaatataggatgtaacatttaacaaactatatggtaaataatatgacattaatatataaaatatatgttccagatcttgatgtgggtgatagttttacttatgtacatcgatatacatctatttaaaaacatgtacatttaaattgttgcattttatgtatttaaaatttattgagtaatccttctgtatgtattattaaagagaatatagcaaaaaaa

SEQ ID NO: 17 - DNA, 879 bp, Homo sapiens
cgcacataaggtgtgaccttttcattcccgttgttatggagggccacatctgccagagcctggagtctgcgaaggccgggacccggttccccggcccacagtgggggtgttgcaaattcgtgaagaatcagcatcatgtttggcagctgagtattggagccaggagcctgccatgaggttttgagaacagagtgctgttttagagctggcagcagcatctcagcccaagagaaggttatattcccagaggatgtcagtcccaaggaccagtagctgccatcagtttggattctgaaaactaactggcatcaacactgggtgtagaaacatgcttgccttatgtatcagaggacatgctcagcagatccaagagatatatttggcaactttttctagaaaaggcacattgggtatcattcattacattcttgagtttttttgggtttttttttttttttttgagacagtcttgctgtattgcccaggctggagtgtggtggcacaatcacagctcattgcatcctcaatcacccaggcctaagcaatcctcccaccttgtagctgggactacagctcacagcacacctggctaaaattttttttttgttgagacggattctctatgttgcccaggctggtctcaggctcctgggctcagatggtcctcctgcctcagcttccaaaggcacaggccaagttgtagctttgtcccttgccatcatgcccaacaagaggttctataccttttaatgaattgactttcataaattggttatgttggtgggcaaagttctttaagctggaaattgtaaattcctcctgaaatgttttttcatgcagttaccatgaactaatactacaataaaggatggtcttggg

SEQ ID NO: 18 - DNA, 1571 bp, Homo sapiens
gactacccggcagaagggacgtccccaaatgacactcggaggccgcctccctgggctccggtgctcggtgccgggaggagcggcacggctttctaccccgcctcaggtgcgccagcacgttttctgggcagcatctgtgtgttaggcgaccggagaggtgggttccttatagggaataagaaaactgaaactgacttccaactgcaggcagaaggaagcagtggtcattgctggaggttaaaactgttctgaccgggcgcagtggctcacgcctgtattcccagcactttgggaggctgaggcgagcagatcacgaagtcaggagatcaagaccatcctggccaacaaggtgaaaccccggctctactaaaaatacaaaaattagctgggcgtggtggcgcgcgccggaagtcccagctacttgggaggatgaggcagaagaatcgcttgaacccgggaggcggaggttgcggtgagccgagatcgcgccattgcactccagcctggcgactcagcgatactccgtccccctctccccgccccaagaaaaatctgttcagtggggagcgacaaggaaggagctttcagcccgactggggtcgcagggaagaattcaagatggcgtgtttaggagctctagctccttgacaaattagtaaaatgttagtcttaggagaagaacgaaaaggctctcctaggctaagaaacagcatacacagtgagaaacctcagaagaaataaaattcaaggaagatagcaacaacgaaaacatcagaaggaacactaaagtagtcaaatcagcctagcagaaacaaagtacgttaaccaatggaaaactgacggagagaaataaactgtttttgcacagctaaatggaaatgacttttgaattatctgctttggaagattatccatgacactgttctgccctgctctgctctaacaacatttgtaagtcactcaacagttaataataaaagtcagttttgaatattgcaggttttagacacagaacaaatgtaatgtgacactgtaggaagaatgaattctccttagtcccaaattccttttttttttcttagattcgggaataagtaaagatacaagatcctcttaaccagtatcagtataattgttccctttagatttattgctgtcaccccaatgctcttctttctttctagaggaaaggaaaagaaggaggtaataggaaaagtaatgggttgtcctgatgttactgtgtctaggatgtcattgccactggtctcctcagatcaatcattctgcctaataaacagaaaaataacatgggcagcctcacatgcaagcctttacacacactgctaaagagacctcgcttcctctgagaagtgaggatgtgagaatgaaggattgattttacagaactggatgacaggttaaattgggcatctggaggtttatattcccatctccactcaccaagtttcatcctccatttatgaccaaggataggtataacatctgatcttgatggttactgtttcaaaaaacaatctgatcttttttataaagttaaacatttacttaat

SEQ ID NO: 19 - DNA, 580 bp, Homo sapiens
ttccggaggcggtggctggtctgaggacgacgcggaggacgtcactgcgggtcggtgcttccttacaggtgccttctggaccggggtccttggcacctcccctgctcctgccctcggtgccggaccctgtgccctgggagcccgactacctcggtgtcccagccgtcccgggcttgaggcgctgagagggctgcgcggcttccagcccggaaggcagcggtcccgcgggctgcgcgcggccaagggcgactccggtgtgggaatccggcggaagggaagcacccgcagggagggctggaccccggaggctgcagagcgtcagaagcgactctagggaactagggggtggggtagggaggcggggacgtggaataaagaaagctcctgggtgccggctatgagaagtcaggtgtgcgtaggcgtggacagagtgccgatgtgggagtctggacacctggattttctggtcggggctctgtgtccttgggctaaacattcgcggttccactggctccctaacacttgaaatgatgtttgaagttgcctggaagaagtctcttccttttttctctcagaggtg

SEQ ID NO: 20 - DNA, 843 bp, Homo sapiens
ccggcgggatctggatgtggctcatgccggcggcggccgaagggatagacgggttgggccgccggcggccactgtctccgcgctcactcacgccggcctttcgctccgcgcccgcgaggtctcttcgcgcacggccccggctcacgtcgcgccgctctttggccggctctgcgtttccgggccgcgcaaccctacgctaccacggccgacctggcaccgccgccgctgtcactgggcagccgccgccgccgcggggaccgacgggcaggcgagctggacgggcggggcaggcgtcctggttgtgacgcacgccaccgcgggcgtgcgcgtccccgcttagcaccggccctcagtgcgcttgcgccactagatgacccgccccctcgggctgtcggggggtcgagacagtggagtgttcctgatgccagctcacggagggaatccagggaattagctgatgccaagagcctctttttggccagcacttactaagcaccagagacacagcgagaagcagaagcatacgagcacatcagtgtgattctgctgtgatgaagggcaagagagggctcactttccggcgtgacattcaagctagccccgaggcctgagcaggacccgcccaggggaagatctggaggaaagccatctgaacatacaacaagagcaaaggcctggtggagtcaagaccaccttggctgccaggtggaatggtggaataactcaggagtctgtcaggtctctgagatgtcaaacgggtaaggccttgtaggaagtaggcgtttgaatgagatcataatttgagagccacagacagaaaaataaatttgaaagagttcactc

SEQ ID NO: 21 - DNA, 544 bp, Homo sapiens
gtagtcctgcagccttgtggccgaagggctgggactggccatgagattacatgtcctagcatgctcagccaggcgcgcgcagctctgccccttcctccagtgatgcgcacagtccctgatccctgtgcacgctgggattgtagtcctgcagccctgcgatcacttgcaggtaacaagaaatttcagcttccggcatgatgggcgaaggcccccaccttcagcctcgctcctccatgccttcagagctgttccgccatgcagacggggagcctgcctgttctttaacctctcctacctgatgggagaggacaagctaccaggacagcttgtctcaccaagaaattgtgataccgcatcccccaacgtgctggcttcctgacttccaaagttgcgggaccattgcaatttagagacgtggccatagaattctctctggaggagtggcattgcctggacactgcacagtggaatttatatagggatgtgatgttagagaactacagacacctggtcttccttgacctttggccagagcagagcataa

SEQ ID NO: 22 - DNA, 2846 bp, Homo sapiens
ctcgcaagacctggttgtttaaaagtgggcggcaccttccccttcgctcttcctcctgctcctgccctgatgtgtctggatggtgacagatgggaatcttctccagtgaccagaatccatgccttaccttgggagcccaagctgacttctcaagctctggggatgcctcagtgatctctgatgtggaattagtggaggctggccgttgctcacctctacacagcctgctggtcgttagcgagcaggagttctgatgttcctctcatcttggatgtctttcctaggagaatatttctcacgtgtttgacagaaaacattatctgtccatcatttccatggattcctgggtctcacgggcagaaggacaaggcagatatgaggcggatctggtaaaaccataaacaccatgagatcagagcatccatctgtagactcacagagcaagaagcgtgactgccccaatcttgaatggatgagtaagatgaaaatcaatttataaacatcttgtgacaagctggaattcagttatagatcaattacagattgctcactggacaatcaaggacattattagaaaacggtttccaccactagaaattcatctacattgacatccacctaaatatccagaaggtcatccccactttcgtcgctctccacagtcagctgccgggtccaccacttcttaacttcagaaccgcaggaagccgcgtcagtcatggggttcattttgcacacgacagatttcatggttgtccttcctccaaaccgaggaacctagatcttctctgatctctgaaaaataagttcctggatatgaaaggggatactttccttggtggtagtcccagtgaagacccactgaacatcgtcagcctcaaaatgtaagctgtgctgtcatctgctttgtggaacacatatgctacacatcttctcctttcaattgggctgaagttggggcacagttaaagagcattataaagctcctgctttagcatgaacttagttatctatagaaaaaaacatgtacaaggacactgggctgtggggagcattgctctccctccattcctgagtgctcttaatgggattatcctggctttccaaaaccctatagagaagaagctcatagaagaaaattctcttactgaatcagtaaaatatggaaaataatgggactgtttattaaaggattgaatgagagaacacaagtaatgcacttagaagagtgactggcatacagtgagtactacgtgctggcttctcaaccatgatagcctgaaatgtacccggaaaatgggggctaatgtaagtcatatttagagaagttattttgggggacaatgtttttgacaagactacatttttcattatgttgctgtctgtaaacaactgtagatgcagacttgcattttgaaaggcaagacccaaaacacacaaacagagtaaatacctttaaaatgcctcgatcgctggagaaatgcctggatggacctacctgagggcagacgccactgcccaaatttcctctggggtttccctgcgtcggctgcatcttgccgacttcctcctcgatccgacagcgtggggctcaggagctgctgctggctgcttgtctgcatgggaggagaagcacacagttaccgtctttttaaccctgcgctctcctccttttactataagaaaggaaaacacatggcaggaggacaagtgggaagaacaacatggactcagagtgtccacaatggggaaaagtgaaaatgggtataaagggtcacagaagaaaaagagccaccactgcacgccctgctgaaggagacaccactcttcctgggacatcttgtcctgggtaacccccactgcttcgttcccctccatgcctgagaatgtcattgtttcccttcatatcttcgctggcaaaccagggggtaaggaaggggaactgcaggaaggaaggtggggcagtggggacgggctgggcgggggcagtctactgtcaccagcctggagatccacacttagagcttcagggaaagagttctctgcaggcaaagctgtatgatgggccctggtggaggatggagctgataacaatctaagctacagtgaaagaaagagagatgccaagacttcccacacatttcacctgttctcaggttcacctgtcacctctccctttcctaacaaaagccttggtcttcacatctctttagtatccttttttttttttttttgtcacctctttctttcttaggctttttcatctaaaaacagagggctctgaaatcatcactttccccaacctcattagccctgtctcactgtctgtcctgacttcagcctgcctccctctcccatgcgagacattgccaaccatcttcagggtgaccagtggcaaggccactgcagatgcctccccttgccccttggttgactaactccgcagaagtccctgcagtcggtggcagatgatttctaaaggctggggagcccaaaacatgagatctactgaaaactgagctatggcaccagtgggcctcctggagcaccctgctgggccgtggagccttaggcttccaaaggtactctggcccctggctgcgttgctgcacaccatggagcctggtgctgctgggggctctgcacagagcacgggatcagctccacgttgttaacctcaaatcgtaattgctgcctcataaaggggcaggtcctcccagccagctgcttctcacagcacaggactctccaggacgctgataactccttgtacttttttatatagacacatacatagagtttgaaaatgaaaatatgctgtgacttaataaatagaaactcctcaa

SEQ ID NO: 23 - DNA, 700 bp, Homo sapiens
aagcatcttgttgacacatcttcatcactttggaatttgagcaacaacatttaccccttctgaaactcacccagaggaagcggattttctgacgcatatgaagagtgagaactgtctacatctaagtcttctttgagaacaataccagctgagcggctatttacattccagcttcttttgagaatctctgaagatgattaagtcattgtcagctggcccagaaccatatcctgctccacaagcctcgtccttggcaagaagttgcacctgcccagagagaaaaccttttgaaactggcacaaaggcactggagagactggcagggccccctacttgacgatctggctcatccatctgcacactgaccacgctaagagctgtctgcagtgatggaaaccttctctagctgtgctgtcctctatagtggcaccagctgcctgtggctactgagcacttcaactgtggctgcagagactatgttaaattgtatttaatcataattaatttaattgtaaacaactacatgtggctagtggtttctgtactgggcactgcaggtgcacatttcctgctggccatggacagtaagctccataagagactaattgtgcctggtttgcttataggcttatcctcagcacctgcaccagcctagaatatgattggcactctattaattaaaagttcccaggtaaatgaa

SEQ ID NO: 24 - DNA, 2456 bp, Homo sapiens
tgtttgcaaataaaccattctgataaattatttttgttgcttaaaataagaggaggaaccgctgtgtgttagcaagaatgtccatacctgatatgaaagagtcatgttggcttcagttcctactgccctgtggacttcccattccctccttacttgagtcaaccatccactcagtactttccacaaatctaataatgaggtgctctctgtaggtaaatcctttcactatggcttgtcctcaaacctcccaagaaaaggttcaactgctcaatctcttaacctttttaattccattcccttgcaggtatcccggccctgcataacaagatgatcccaactcaaggaaaggggtttagcagtgttggatcttggcgtatgtgggatttaaccaggcagaaaggcagacaagagtaagattctaggcagagagagcaaatgcgtcgagcatgggtatgaacatgtgagggatagagaataattctgcaggaagtttgctggatggaagggccttatagggttagaaaagctggtgtcagattgtcaaggactttgaatgtcatggggcttctcttccaggaacacatgggatcaggcttagattaacccaaatgtaattgtcagagcccagagatatttcatggtccagtcctagcactgtgcagctgccaaaagtcaaagccattcaaatctgtactgaaaactgtggaaaagcaaaggagcacttaagtctctttccccatgtcttgcattctcactctcttttgcttcaaagatctgtctttacctgcccctgtccccagtcctaacaaaaagcactcccctaaatcaactcttaagttcctctcccttctcactcctttcttagtctcctctttctgtaagaagttcttgctcctgttgttaatggaagttaattaaagtagtatttcaccttgtaaggctgtaattcttggcacttgttatcctcattttctacatccaaagaccatggaccagaatatctcttaggaggtaagggagagtgaggctatcagccaaagaaaaagtctccagggggaaggggagaatcacttataatttaatactttgtggaaaaaacatctctgccacctatggccctccaataacaatggaagacagaatcaacaggtgagaaccttgggacaaaaataagttacaaagctgttgtaatccaggtaagagctattaagtttccaaacgaaggctgactgtgaggataagtgatactgatttcagaaatctttaaaaagtagaaccaacaagccttgaggtctaactctgttcaacattaaagggaagagtgagtctaagaagacttcaggtttctagcttggccaaaccaattgagctttaagtgaaatgtgcgatatggtaacagagaaggaaaaagacataacgatagatttgagctgctggtgggaaattctggtttagtgcccagctggctgtacaggctggttggactttaggagggaggtttgagctggaaaataaagatggagagttgtctttcagttttagatcatcagtgaggtcataagggtagatggagtttacctgggaaaattaagtagctattcgatttggcttattattatgttaaaataatacttctctagtgaagtacttaatatgccagatactgtgccaagcattttatatacatcctctcttttactaagccctcatagggcaggtattttgattccaatcatactgattggaactcctaagaaggtatcttgcttaaggtcccacaacgaataggtggcagatccagggtaattcaggtctgtcagaacagtgattcttaattttttccctcctcagactccaggagtcacatgaagttatgcatcctgtctgaccgaggcacaggcacaccacatttttatattccgcttccaggatatcacaaacctgaagcccatcctccatggcccagagagaaaacccaggacaaaaccttggagaagactattttcatgaagacaaatggagaaggagcagtagagtaaaaagagagcaaatccagctgcctgtacaatccatgccaccgaatgccgtaagtgagacgtaaaagttacgatactgaagagacgtaacctgaccaaggccacagagctggaaaaagaagcaaagccaagccgtttttctcatgcactgctcacaacaagcccctccttccactgactcatgaaaaacacactcataatgcccagcccgcaccctaatgaacagccctcttaagagtggtcatcagacttcaatttcacagactagaattgagaaatggaacaaaaccttgggataccagccttccattttggtagggatcatttaaaaaatggtagggatcatttaaaaaatgtgttggtgtctgaaacttactttgaagtggttaaaaaacataaaatgtatagattgtaacaagc

SEQ ID NO: 25 - DNA, 662 bp, Homo sapiens
ggaggacaggctggcagaggagggaggagggtttctagctgagagagactgcggctgtgggcctgcagcctacccctcttcaagctctccggagccgttcctgcgaaaccagcccccacaaataaggaagctgggattcagagaaattaagggacttggtgaagcagagaatgccaagggaattgattcagtagtggacggggagtccctgaagactgttgagcagtgaagagacctgatcgcatactaaaaaagtacatgcaatggcaagaagatcaactaagagattcttcttatgttgctattttaaactcctgaactcaagtgatcctcctgccttggcctcccaaagtgctgggattacaggtgtgagacactgcaccctgcccaagcacctctgctccgtgccatgctcttggctaattggagttgtgaaaggcatgaggattctggtcatggactcagctctcccatagggttctgacaccaaagcaatggtcacaacagtgaaaggaagaatccatctggccaggctcaggtggttcaaggccttcagaatctgccttgagactctcactggctttagactgaaaaccatcttggccccgtccatccgtgtaagcaatttaacgacagcttgcaaagcaccgagctttaacaga

SEQ ID NO: 26 - DNA, 771 bp, Homo sapiens
tctgtccctgaaaggccagaacaaactgcctcctagggtaacactaagtgctactgccatttgagacagacgtgtgcacagacagccctagctcacaggattgtaggtccccagcggatgaatgaactggctgtttgctgggtgccgggaagatgctttggagccacccatagatggacctgcatggggacttgcttttccaggagagatgattgattcaccatgctgacctgaccactctcccacgtggtcttcctagtgatcagatggggtatctgaaggttcagaaacagatcaaagaaaacgctgtgcacatggagtgaatgtgcggtggctcagacctgtaatcccagcactttgggaggccaaggcaagaggattacttgagctcaggagtttgagaccagcctgggggaggaaaaaagactcagagaggttaagtatccgacccaaggcacacagctgtttctcaggggagcccggattcaaacccagggactcggatcctagagcctgtgctttcacccgctgcgctgcaccatatgtgtaccaggatggtagaatcagaggtctggattccagcatttccctgccagaggctatggtgggtgtgccgagcaccaccctgagggggaagcagtatctcagcaactacacccccgaggaagaggcagtccccaatcagcgggagcaatgggacctgctgatgacaaaataagccacagaatgaatggctctgctccactggccttctctcctccctgccccctt

SEQ ID NO: 27 - DNA, 362 bp, Homo sapiens
tcaggtgtcctaggaagccgattccgagttggagatttgcatgcaaggaggttgaaatgatattcccaacacctgtggaagagtgaaagcaataggattgggcggagcaggaagtcggctggaatgcaatcactatcatggccgcagtccactctacagggatcttggtagagcaacactctggagaccttcttttgaggcatttcaccaccagagaatgatgttggaaccaatgttggtaattttgaaagtcatggagaggatttcagatgatagaagtcgggcaaatatcccaggtttaataaataagcaaatgatctccaaggttatagagggattggacatttgtgtcttcaattggc

SEQ ID NO: 28 - DNA, 2330 bp, Homo sapiens
cataagcttttttttgtttgtttttaattttattagaagtgggatctcattttgttgcccatgctggtctcaaacacctgtcttcaagtgatcctcctgcctcagcagcatcagtttaatatctagataaaatctgatgtatgtaattttacttttaagggtttttttccaaacagacgtcctgacaatgttgtttcctattccttgaacattcacctgacgcttatatactgtcattacttttatctgtcaactgatgtcagctactcaatttacacattacttttgtgcatttcatcctgtttctcagtttgacattgtcattcaaattcagagtttgacactgaaaccctgggcatggtggctcacacctgtaatcccagcacttcgggagactgcggtaagcagatcatttgaacccaggagtttgagactagccttggcaacatggtgaaaccccatctctaccaaaaaaaaaaaaaaaaaaaaagcaaaaacaaaaattaactgggcatagttgcacacacctgtagtcccagctactcaggaggctgaagtgggacgatcgcttgagcccagaaggcagaggttacggtgagtagagattgtgccactgcactccagcctggacgacagggcaagacgctgtctcaaaaataaaatattagtaaagaagagtacaatcagaatatgaaaatgtgtaaatgtgcatattctctttttttctaatttggtagcattaaaaatacttaagcatcaaagtttggctttatgaagaaggagtctgagacacctcaggtttcagcccttactaatagcgtggctcaaagagcgttaacttgcctgtgcttctgtttccttatctgtaaaatggggatgatgctgtaacatcaaagagcttataatactttccagagctggcagtactaaataagaccattcctctaaagtgccagcattttgaaaagcatcaacccatcaaccttgtgctttaaatctggcattcttaaagctatacctgtaggcagtatagagtgtttttttttatttgtttttttgttgttgtcttttgagtctcactctgtctcccaggctgtagtgcagtggcacgtcttggttcgccgcaacctccgcctcccaggttcaagcgattctcgtgcctcagccccccgcatagctggcattacaggcacacaccaccacgcccagctaatttttgtagttttagtagtatctactaaaataaacagggtttcaccatgttggccaggctggtctcaaactcctgacctcaagtgatctgcctgcctcggcctcccaaagtgctgggattacaggcgtgagtcaccatgcccggccggcagtgtatatcttctaaagttgcaatttttgttcactccagaatcacttttcaaaaagcatgcagatttaatgccaccagtttgtgttatgtatctatcccgcaaaacagctctaaaggtgatttactaaaagattaacagcatttatctctggtgggataatttttctttgcttgtttacctgtgtcttgcagattttacacagtgaacaatgactgtataattttaaaatacagatatgcacaattgtgtaatgtaaatatgctcagcttcaatacatttaagaacacatttttaacttttcgtaaggagtcttcagtttaaaagtacagtgtcattacagagtgcttattctgttacaaaattagtaaagctgattctgcctctaaatctgaagtaattcccactttttttcatgcttgagtttagttgataaatagcattttagatactaaaaatgattggatgagtatttctacattaataagttgctaattaggcaccagggtagcagatagaatgcctttctgtgtgctaggtttaaacattttacacacagtcttatttaaaacagccttgcagtttatagatgaactgattgttaggctaaccagaggtgttactataccctccaggataacccagctagtaagggcagagccaggatgattcagacccagaccagagccgggtgttttgtccacagtactgctgctgcttataccgtaacgggaaaagtacacaacagtgtcttaatatttcattcttccatgaaaaacacttttaaaatattgaaacattataggagcagaagtacatctctaaatatacttttaggtcacattgaaaacatttccaaaggatttgacctgaagttaatgttgctacattatgctcaatacagcaggctgttctgctagggaaattgttaatattttaaaaatattttcctaagctttagctttacca

SEQ ID NO: 29 - DNA, 401 bp, Homo sapiens
cctctcctccagcatggctgattctggttgctaagactctatcatccagggcagagatgaagcttcactcttgccagagggactattggctctgaaagacctctagtacaggggaaaaatagatgactaacaccttcaccatgaggaaagagtgggtggtgtgtctaccctttgtctaaactatgcattttgtccagggtcaggaaaaggttaagtcttaggattaaatacaggatattttttttcttgctgagaacagtgagagaagaccgggatagggatggggcagaactagtgtttttgttttcacattcagttctcctgaagcggtgtttggctgaaatggaacaacttctcaaagaaacagggttagattaaaagcagcctgttcctctgccaaa

SEQ ID NO: 30 - DNA, 530 bp, Homo sapiens
ctttgtggaactcttttcagaagaaaaaaagagagaaagtgggggccatacttggcactagtaacgatgcatatgcacttctgaaaagaggtgtcaatggaatttggctcagctgatgtttactggatgggctctctcctccttccttccttagcccttctggtgggatcttgacatgttacagaggaaatgctaattgaagccccagccacaaccacttctgtgctctgcttctgcctgaaggaatgaataaatagaaaaacgggaatgttattttccagtaattttttaaatggatctcagtggcgaaaagtacgttaagttagcaaacgtgcctcacatactgtggatgcctgtaagactcttacattcgtctgcctagatgtatttcagaagccaataaaagataatctgtgtttgttgaatgaatgaagaaacccagtctaccgtgggtttaccatgtgccaaatgcagagctacaaaaggaaaaatgaaaaagaaaagacctagagaatctcaagtccagtggc

SEQ ID NO: 31 - DNA, 380 bp, Homo sapiens
gagccacgttgttacggaagggctgggacccagacacagggtccagagtgtcctcgaggtatcagaagaactcctggagagcaagctgagggctgtgtcgtcgccacaccctccgtgggtccctgctcctgagttaggctgtgcccagccgcccagtgactcagaagctgtgcacacaagggtcctgctgaaggacagcggcttctgcttcctctgatcctggcagcctggaacttcctgagaggactgggcatgtggatagccatggggggggacgtcctttaaactggggaatgggctcccctagacacagtcgcttccacaggaatcttctagagcctcacccagggcagagcagacacccgcagcagcctggagtt

SEQ ID NO: 32 - DNA, 445 bp, Homo sapiens
ttggaagtaccccaaaggaatatctatctacccatctgtcctgccacaaaacagatcattctcaacagcagtggaaatagaatcagctccattgcctgggaatcattcttgtcaggagtgctttcgttctaacctaggtaaagcacaacatttacccacaattgacactagaaagtgtttgttgaattgaattgctgtgcaaagaagtacttcctttaaaagacgtaaaagaaaaagaacagtgacagctttgctgaagagaacacaatgaactgaaaagccaccagctttgatcaaaaccctgccccaggaactctccagctgctcagacatggttttctggcatctgtgggagctgtggaatctcagaaagggacaatgtgatcaggtctgagggaggaagaaaaacacaagcagaccagaggcagtgattctgcacactgta

SEQ ID NO: 33 - DNA, 3540 bp, Homo sapiens
gcggggttggagggactcagctacgcgcctggggaggccgcgggccctcgcagactaccgaacttccattctgccgccgggttttcacacctgccggccccgaggaaacaatgacgttgggattttggggggccgccccttgactcgggcgaatgggacacgaacggcgaccccttgctctcttccatccgcctgccgccgttgctgcccaccgactcctacagctcatttctcgctcctgcaggctccaggaatgcaaataatttctcactgggttttggcgggggcgcggagctgcggcgaagcgcgcgcccgacagctttcgccgcagctgggtccccgggcgctggcggctgcggcccccagatacgggcggaggctgcaatatgcacatgcggccacagtgtggtgccaggggcccgccgtgggacacgctcggagcgcgacgccccatcccatcatttacggatcaaaccaaataatctagaatcaagttgctgtgtgtgtcatactcctcctgttttttttccctaaacttttagtagagtcatttacatagttcagtttttacctcagctgttacacagtggcaggaaaatattttgtctccaaactacagcccaagtatgagagcagcgtatcctgaagctaattagtaaccagaaaatcaggaaggtaaagcaaatctctggaggcaagatctggactctatggtatcgccgcttctccccacttgaagcgtctctttgcagtgccgcacttggagatttggacttaatcgttaaacaaaaagaacagttacattctgccttcctacagggcaggggcctaggactggcagcatttttgttgtctctagaaatagaggggttatgagagagcctcaaaagagagggcaagaataacacatccatttctcatcatgagttacccccttgtatgcctagaacgcgtatggagacattctcttttagtaaagtcaaagagaaaagccatgaactaagtatcctgaacacagaggcgtgagccctctcagtctcacagtcccttaggagtcatttatctcagaagttggttgaaacaaaaacagttcatacagcatggtaggcagaattctaaaatgatcccaatgactcactcccttgcataatccccttgagtgtgggtggaacctatgacttgcttctagccaacagaatatgacaagggtgatgaaatgtcactcttgggattgctacattatgtaagactctatcttagcagtctggatggaaagtctcctcctgaacttgaagaggtaagctgccacgccaggagagggcctacaagagtgccacaaggcaagggcctctaggagctgagagtggccccccactgatgggcagcaagaaagcaggaacctcagtcctacaaccacaaagaactgaattctgccagtgaccttgtgagcctggaagagctgcaaacagaaacacagcaaagtcaacaccctaactgcagccttggaagactctcagcagagcactcagctaagctgtgatgggagtcctgacccatggaaactggaagatcttaaatgtatgttgttgctaaatttgttacacagcaatagaaaacaaatacactccaactcttgacaaatttgttaataggaccacgcatcctgagacaaacacacagaagggcaaacatccagatataaacatcctactacattgatatgaatactcacatatgtaagatcaatgatatcactagcaaaacaagctccaagtcaatgggtttttcctttcgacaaacacctctacacataaccaaaaatgcttcaactacttttcttttctccagaggcagttggtttggctaagtaaaaatggggttcttaggagactaaggcggaaaagagacaatagtgcctttttcccctccagaacttatctaagaatggaaggcaggtgtttctatgctatacatagcatgaattttacagtcatggatactgatataatgcttccaaatagaattaattctcttccctcccttattcccacccacagccagcagatgctgaaagactgcactgtccaaacactgccatctttgctttatatatccaaaagagtgggaaatgctgtcacatctccatcagaaactgtcaaacactagtaatggtagaaaatatctgaatgacacaattaataggcttgattttgtggatgctctactttagaaagaaaattcatatgcttttcaaacacacatgcaatattagaaaaattaagtgtgaactaggccacaaagcaattttcaacaaatactaatgaactgataccatgtttaacacaaattctaaccaaagtgctataacattagaaatcaataacaaaaaactaccctccaaaaaacatctaagtaattcatgaataaaataatgtataacagaaatttatgagttttaaacttaaatggtaatggtagtattatatatcaaaactcacgagatgcagcttttagcagacattactaatttcctactcaacaatcattcccctaccttcatgactttggtgtcagccatatgattagggctcgggtccaccaaccagctgcattttcttggtcttagcatatactgattaaattgaaatgactaagagtcagtgagctgcaattgaattccccatggctgactgtggcaaaacattttaaaatagggcatagacagcaccaaccaaaaatgttggtgtattgtactgtagtaaaattaacaagtcttgttcattgaaaacaaacaaaactttaatattatagtgaaaagaaaagccacagagtgggagaagatatttaagacacttgaaaaaggacttatatccagaatatataaataactcctataagtcagtaagaaaaagacagacaatagaaaaattatcaaaaagagcttacaaaaaaggatacccaaataggtaataaacgtgaaaaatggtcaatatcatagtcattagggaaatgcttaatttgcatttgtatatccaaaagagtgggaaattgtaacatacctccatcagatactgtcgaacattagtaatggtagaaaatatttgaaacatgtaaacaaaaatatccacagcattactatttgtaagtggtcaaaaccagaagcaacccgagcccctcagcagaatgggaaaatatgaaatatacagtaataagaacaaatgaacttcaatttacaacatgtatactgttcacaatcataatgttgagaaaaataaaccagacacaaaagagtacatcctgtcccataccgtagccctttatatgaagttcaaaaataggcaaaaaacctatggtgctggaagtcagtgtcaggggtggactagaaatgggcaagaaggagtttctgaggtgctggaaatgtctaaaatagatctggatgctgtttactttgaaaaaatttactgtggcgtacatttatggcttgttgtacataagttatatttcaatgaaaattcacattaaaatgtaatgtaaaaaaga

SEQ ID NO: 34 - DNA, 344 bp, Homo sapiens
gaactccagaaccatcggctctgactgaaagtgaagcggcagccgcgttgtgggaaagctggctggagtctctctcataagcaggcattctttttctccagcccgtcactgtgttggtttgggcccacgtttgtggcacattctaggcactcgccatcatgaaataaacctctggagctgtgatattacaaacgtgaaaagatgacgagcactcagcaactttcaatgaagcgaagagacaaggagcaatccaatgtgtaataaaaaaaggcagcctgaattgttgttgctgtttttgaaatttaagctggttttcaattaaattcagtaaatggtccaggact

SEQ ID NO: 35 - DNA, 453 bp, Homo sapiens
acattctttcagatgccagaggatgctatagaaaaatgcgtgccctcttgtaatactttgttcaagttctgatcagaaggatgaatgatggagcccaagaagccagagtctcattgtgttgctcaggctggaatccagtggcatgatctcggctcagtgcaacctccgcctcctgggttcaagcagttctcctagatcagcatcagcgtcccgagtagctgggattacaggcacccgccaccatgcctggctaatgttggtcaggctggctcgaactcctgacctcaagagatccacctgctttggcctcccaaagtgctcggattacaggcatgagctgccacacccagcctccaaatactttttttttaaatcaaaataatgatttcaatgactgagatctgttatgtatttcaacataatcatgtttcataaagatttagtcttctgaaa

SEQ ID NO: 36 - DNA, 519 bp, Homo sapiens
gttccaatgagaatgaaggctgaggtgtgcgcctttttttttttttccttcttagtcgtgtgtacatcattgggaatggagggaaataaatgactggatggtcgctgctttttaagtttcaaattgacattccagacaagcggtgcctgagcccgtgcctgtcttcagatcttcacagcacagttcctgggaaggtggagccaccagcctctccttgacaagcaaagtggatcagcaaaggctgcagtcaccagcatcttttccaaccttaatgaactgtatcctcaaaagaacactatcagactggctctgccgacttccagttctggaacaagatggttaaactcatttttccctgctctgctcctctaaatacaactaagtaccttggaaactattcagcagacaatgataaagggctctgaaagctagaagaaaaggtgtacttgcaagaaacctcaggacttgagtaacagcaacatggtaagttttctaagttttcttttcgtctcccatata

SEQ ID NO: 37 - DNA, 3384 bp, Homo sapiens
gggtacagactatgggaaaaaataggtggtggtaggtctttccagggtcaacgccaaggagaggcctgagaggtgcatagcaaaggctgtggcactgactccatggctcagaggagggaaatccagggaagggctgaatgctctgtgtttaagggagagatagaatggacagctgggcaaacacacacccggggactcctttctccaagaccgatgggcattgggggtggcagaggaaataccagcatggaacaacatcccagggacccgcgtcctccccaggttacagtcctgggtccctgcatggctgcatgttgtctgcaggccacatctcctcaggactcccgcactcatcactttcccattgctatggaagagaggtgtcaaggtggcacctgcctccctgtccgtagtgctcaggtgtgtggctaccagaggaaaagccactcccaacctttgccgacaaccatcccgtttctgggttcctggagaagtctgggaagctgctctgttgtagaggctgaaaggagggctggtgagagcccccagctgaaaccagccctgccccttacccttcctcacccctctaccttcactctcctcctaacactccagggttttgttttttgtttgttttttgcttttctcaccccagggctcctgcctctccagcctggagacagatttgatttgggattgttacaaaaataataataacccaaatgcagagaagccacggaaagggctgagggcaaccctcccctccccccgccctcctccctccccattccaaaccgagtacaaaaccgcacccaaagcagacattctgtacaggggggtgggtgggctggggagcaagcgggaggggcggccctgcggttgctctgtacaagtccgggttggtgacggccccagcagtccccacagggcccctggggggcgcaggaagtgggcaggcgcctctagatgaaatattccttcttgtcgtcccctcctgactgcccgccttctgcattgatgatggccgtgtccgcgtctggagcatcgtcggagccttttgcctcatgtgtcagtagtggccaaggaagatgagcatgatgagcagcaggaagacaatgaaagccacgatcccaccgatgatggcgtgtcccgcccacttaaggatattcctggaagaagatgcagtagctccttctaccaccaggcgtcagcactggaaacagacgcagtccaacaggactccctctgcctggctgttgagcacaaagcagaggggagatcagcaagataccaaccacaagggcacaagaactttctctcactgccaatcatcatcagattggtctggagagatctgggggcagagaccggagctcagtgcattgtccttgctcttggcatcctacaatagccttgttgtgctgaggcagctcccacatgctgaggtctgcccctggagtgggaatcacccatccagacattctgatcccaagaactcagacctcttatcgctgggaggcctggctcttatcccctcaactgttttaatgagtgtctcaagtaagggagcctctgatgtttccccgacaatgcatttcccctattctgagaaaagataagactttctggcgggacccacagccattgggatcttcaaaaaaatcgcccgtcaactctccataaaggggcctctgtgtcaccctgtcactactcctgaagctgggttttgtggtcacagctttgagaagaacttcagagaaggagcatcacctggtccttctagaagatatggcatctgagaaaagattctgtctcttggcatagtacaagcttctctctattttctgtccagacccagtacactgtgcttaaggtgggcagaaaaaaaaatgacagcagttgcatgcacccaatacctagtcttaggagaagcaactctgagaagagccagttagagaaggaaatgcacctgcgcctgcacttgagaggctttggggcctctgcacacagaattattgttcttgttgtcagacaagtgcaggggatggaagatggtgtcacccaggccaccactaccaaagaaaggcagatgagagcccacccttctaatgttttttcactaagcggccattacacattctagagtggacctgggacctaagccctcagggaccccagtggtgggctggttttcctttactccactccccgtcacagtttggggatgttatcaggaagcattttaaaaaagggaataagatggacagagaaaggagattctggaggaagagaactgaggagggcttaccattaacattgagggtgtagtaggccttgtagctgcccatgttgctggtggctgtgcagccgtaggtgccactgtcactcttgttgaggaaagggaagatcagggcactctcctgggtcatcttcaggggtggcacactgccctccttctcccataggtactgctgggggctgtcgaggcagacaaatcagaagagctcaggagagcataggccagggagctaaaagaaaaaaaaaaataactgggagcagggatgtcaaggactgtttgatgaggctggagaaattatcggggccagagacactggagctgctatacgccaggtggcctcttggggttcgttctggggaagctgtagatctccagacttgtatcttactttaacttggcctttgtgggaaactcagggactgagttagggagtggccccttcccatttgtgctgctttgcagaagaactaattgcaggcggacattattggacagtcagggaaatgagaggctcaggtcagacaatacagaggagataggaaggagctgttatgtgaagaaggcaatctgagaatgtggagagtaaggaggagaccaggaaatggatcttcttacactggattgccgcgaccctcacagtgtagcaacagcttctggccctcacgaggatggggagggtctggcctaatcatcgcagttggtgtgtctgtggagaaggaaatggtatcaatgaatacctccccacacggcttaggagattccctcacttagttgcacactacagcttctacctctaaatgtttccgcagctcaagaagtgcaacaaagaccttccttctcctacttctcatgaacaaggaccattattgctattgaatatgtgagcaacttctcttgcaaccttgtgtgataggattctggaaggtctgtccttggtgggccctaagagatgtcttaacagaaagctgagaagggaaatgagtggtttacctgtgcctagcaaacctcctagcacataggaaagacctaatacatattttttacagaacaaataaagttgaacttgtcacatattgagctcacaa

SEQ ID NO: 38 - DNA, 737 bp, Homo sapiens
tgccacattggcacctatggggtggagccaggtagggcaggagctgagaacagccccagccttcaggggccgcccagcctccatccgactgcctggcctcaagctgggaggaggacccctggggatgcagcatattttaagatgttggttttaggcatggacatttgaatgagcagaatgtgtgggctgcaggctggggtgggagaaccgatgtccgcagggcaagagaatgctggtctctcttgccctgcggacatcgccaggaggctcttcctgcggccattgtgatttttagggtcagaaaattatttggaaatattttttattctgcaaatattttctatacattttttcttgagtgttttcccttagtatttagtaaaacttcttttgaaaatgctggcctgctgcacctgttctcagaggggcatgagaaaagaggattctcttcctagggctgtgggaagccccttgagatgttggaagcagggcagggcaggagaacccagggagggcacagagctgtggacgagggctgggaaagccatcccgcctccccagggggtctccgaggagtgctgctgtggccaaaccaggggggccactttgtgctttctgtttaggtgatgggatgcttctatctcctcagcaccccacaccaaatcccctgttattgccagatgatgtgcctaatgatcaaattgcttggaactcctaataataaaactttaaatcta

SEQ ID NO: 39 - DNA, 2463 bp, Homo sapiens
tcaattattaatttttgcggctggacgcggtgactcatacctgtaatctcaacactttgggaggccgaggtgggcagatcacctgaggtcaggagtttgagaccagcctggccagcatggtgaaactctgtctctactaaaaatacaataattagctgggtgtggtggcacgcacctgtaatcccagctactggggaggctgaggcaggagaatctcatgaacccaggaggcagaggtggcggtgagctgagattgcaccactacactccagactgggatttaagaaaatgtgtagttaaatattgcctaaaatgctcgaatgtaggttataaacaatgagaatagggcccatgaagagattttcgtttttcacagaggtgagacttaaaaaggccttgaaggataaatagaaatagaagcagagtagaagggttattccaggagaatattagtttggatgagggcacagaggcaggaagatggagcttagcttgagggaatggaggtcactggtgctgtgaatatttgcagacagccatatccagagctgagaggtgaaagaacagactggaatagttcttttctttttcactctcctaccttatttgcttttggtttagcaaggaggatcgaaagtaaaccaagagaaatggtggggggcagcagagggaggtgggagggaaactccaggatgagttatggtcagccaaaagaagctgttgaaataaaatgaccaagagttaatgcctttatagacgcagggatgcacagcctagatccccttcctctaaaggacttgctgcccatccactgaaagcttggtcagcagccagcccccagctatcggctctttcagggcctgccttgttgcaaagggccgcctccctgcaaagagctgccttgctcaaagagctgccttgcactaggtcatgctcttctggtggcagcttgcatcctgtcacagagaggcaggggtgtgaaagcacagccatctcatttgctctgcaggacaatatccactccagagttcctgctagactggccaagaccttgttgccattcaacttctttcccattctactcgctccctccttccttcacaggtgttgagccctaataaaattttgcacccgaaattctgcttcattatctgtttctggagaacccaacctgtaacattttcccagccagggctgaatacacacacacacacacacacacacacacacacacgtgctctctctgtatatatgtttctgtgtatgtatatatgtatgtatatttttaattacttttctccattcaatagtatactgcctatcaattattagcaaattgtattttcaacctgttggcttatttattctaaatatagccattttcctctaaagagaaatctttgttgccaaaagaattttataatggcaaaatcagtcattttccccactaatcgcaatgtaattttgcccattttgagatgggcaaaaatcatatgttcagaacagtaaggtgagacagaatcagctaatttactgataactgtgggcactacctgaactgacgtatcatgctgctacgcactttagtaccaggctctctggtggccagttctttgcaggataacgtggaataatgcttatgtaaaatatgacttccaagactaattctcaacttcagactccccactcccagcattattgctttggcattagtaatgttagtcagaaatatgagtaattcttggcaagaatgggaagcattcaacttgtaacttcaaaaagacattatctgaaaggttgaaagccagtttctaatagtacctggtatcttggcttcagggctcacagcaatcctgtggagaaagtatgagtttcccatttcaacaaagaaggtgaggcttagagggaaaggaagttgctcaagatttgctctggaacagagccaggattcccactcagatcttcgactctgaatcctgcaggccttcacctgtgcgagcactgagcgcctggctgccagctccagagctcctctggggccttggtcagtgtggtgttgtttatgtccagcacactttccgttggtctactggaggacagttcctgtacaggcagatgacttccttcaccaaggacctgtgactctctccctgagggctttctctgacatcatctgcacatggacagcttagactgaaagtttcaggggttcgatgccttccagaggcacctctctaacaataagagcccagattgagtggaaataccccagcttccttaccactccagcctccatgcccttagtggcatgattccgaggtgcatcctacactgactcttggtggctccctggccagagctcattcgcgtggccctcagcagctctcctccttccctggctgtcttcctcaccacctctccgtgattccaggaatcagctcccgaataaacgacttgcacccg

SEQ ID NO: 40 - DNA, 741 bp, Homo sapiens
atgccttcctggggtgaggacgctgccaggctcccagctctggagtcaccgccccgtgctaggggcaagagcccccaaggactgggatcaatattggaaacctgtgctttagttcttccacctctgctgctgctatgctgtgtgacctcaggactgggccgactgggagcaccatgtggagaacagagacaaactggagtgccttggggaggaaggaggagagcacagtctctgagtcagccatgaggcagagcaaatacaagtggtcatgcaggaagaagagtgctggttctgcggggtcctaagagggagatgtacggggggtgtgctttgttcaatatgacaacactaccaatggtttagttcttactgcatgagctttacatgtggtgtatctttctggccttgaaactatcctgcagggtaaaacaactgtcccccatcataagaaatgaaggtaacagtgcatgttctcccctcagcctgggacagcttcaccaggcaaattcctgctcattctccaggccatctccccagagaagtccttcctcaacctcaagaacacatcgagttctctgtcttctgttcccacaggaccctgcagtcacccctcctagctcttgctgtaacagtagacacatgatttcggtgtaaatatggacaggacaggaggcagggctggacactgctacatgccccagaacagtgcctgtcctatgatatccaaggaataattatcta

SEQ ID NO: 41 - DNA, 565 bp, Homo sapiens
aaagcattaggggagcccacggctacaaaaacaagtgagtgagaagaggtgggaggaagagaaactacgccacctcccctgcagccgagtgcacgcagcagcctggcgtgacaagtgggcgacgccggggggcagggagccggggtccttggccctggccggggaccccaccgcccaccgcgcggaggacaacttttagccggcagcccagaccagcgcggcacctgtctccggagtctccaccgctcctcccgattcatcccagggaaattctcaagaatacgctctacaaatctacgtgcgcatcattttcacctcgcgtcgcgcccgggaggaaggaacgaggcaaggagctaaagcagcgtgcgttcagccctggggagaaaaatcaagacgttcccttcagtcctccctcggtgttaacgtctgctccagctcgcagcccgctgctgggcattttattaatgcttttacgagttagaagagttgggataatttgccatctggagtttctctgccttgctgatctgagctcagacctgccaatttaccagagataattgat

SEQ ID NO: 42 - DNA, 733 bp, Homo sapiens
aaagaagcggagggaagcaacacagcgcagcgtgactacgtgcttgatctgtctcctcctaacgggcatgcaggcaacccaggtgccttaggtaagtgaccccattccctgccctgccttggagggccggatgagtcaaagagtaatcttatccctctgctagtgagtacaaatgaagtctgtgggccaacaaggagcgaggagcagtttcctggaagccctgggctggtgtttgacttgctttgagatagaataaatgggagaaagagactttatgggacatctgggcctagggctcctggatgctgtgctgaaaacaccacgtacagaagccagtctaaccttctggatgatgagagcccagatgcagtacagaggtgccccagccaacaatcagctgctatctgaatcccatctggatcccatctgaatcccatgtcaccatgaatgaggccaccttagcccagccagcacagctgaaagccagaagcagccgcatgcacaagcccaggggaagcccacagaggaaccaccagccaacacacagaattgcaagcagttaagcaactaagattaagacaacaattttaaaatgaaccaggtccggccgggtgcggtggctctcaggcctgtaatcccagcactttgggaggccgaagcgagcgggtcaccggaggttgggagttcgagaccagcctgaccaacatggagaaaccccgtctctactaaaaat

SEQ ID NO: 43 - DNA, 779 bp, Homo sapiens
ccgcttcctgggaagtaaggcataaccgagacctagcctcccggtagggaagttcatccgtttagtaaacagccccaactacgtgcggaccctcacggggatacgaagaattcaaccagggctggacaagtcagagtgggccaaggacaagtgagcattccagagaatttctacatgaccagctgttcattcttttaagaggatgacattcttcagctcatctggaaaggatacttcctttaagtctgttattcacagtctccaagggcaggtgtagttgggaaagacatttcatatggaaaaacaaacttgatagggtaaaaaaaaaaaaaatgagatgtaatctggaggcccaagtcattttcttaggagaaactcaaatgtgtttggtgttatctaaccttctgcagtttatcagtctgaaacaaatgcattctattctcatttgaaaatgtctgaacagccaccaattttcaaaatcacccatttaactagagactttaaagcccagaatttgcagttacgtatttcagaatgatttagtaattttgtgagcagctcagaggttaagtctacaatgtctgactacggtgcattattgaaaatatcagtagtgtaaggatcccgtagattggtgataactttgctcttgttatttcaacagttaccaccaacagttggtgacttaacaaattaagagcatagttgccatatgctcatatttggcaaatatgtcaaaatggccatatttgccaatttttaagacaataaattcacag

SEQ ID NO: 44 - DNA, 410 bp, Homo sapiens
gccctttttcacagcttgaaaatgattgttaaaaacaacaactgaaaatcaaacaactgaaaacatgagccaaatctattagcactgaactcctccaacagcactgatgtcacaggcccctggaagaatccacgttgttgacattactctggtcatttagttgccatgtagccaagcaaagagatggggtttgaccttgttgtccaggctggtttcaaactcctgagttcgagcaatctacccacccttcaaagtgttgggatcacaggtgactcttagaatcatctagtcaaaatggaattgtgactgtaagtgcactaagaaaagatccctttgggaagaatgaacttattttgacaaatatgttcaatatttttacatatttaaaatattgactctcacccaggaaa

SEQ ID NO: 45 - DNA, 571 bp, Homo sapiens
acggtgttctgggaggagttacgcaggcagggttgtggttgctggctgttaccaggacaaccggaggcgattgaccgttatctgcggtttggagccgttagcgggagaggcagagatattcagaggtcttttaggatgcgctaaagggtcgtgagggctctcttaaaattttcttcacaagcggttatccagtcgtgccccgcggccctgctgctggccccggggatctgagtcgtaccctcttgtttttctctgagtcagtcttaaggtgaaatgaagtgtggcccagtggctcctcactgtcgcttctctagttttctgcctccttttagaaaattgaattgaaaagacaggatgaagtggacacagcatgtgaagacaattctttcaagaagtttggctgtcaaggaaaacagagaatgtgctaaagaacatacagacacagagcagacaggccacctttgcaaccacatggaggtttgtctgatattgaagctaaagaagctaagctggaagacagagagaccaagtcctgatgacattgtttgaacccagagatccagacatgcct

SEQ ID NO: 46 - DNA, 705 bp, Homo sapiens
gtctctcctgccaccatgtgaagaaggtgcttgtttcccctttgccttccgccatgagtgtaagtttcctgaggtctcccagtcatactgctggttaagcctgcagaacggctggtcttgaactcccagcctcaagccatcctcccgccttggcctttcaaagtgctggattacaagcgtgagccaccgtgcacagccaagacacaattttaaatcgagcggtcaggaagcctcctggagaaaatgacgtttgaacaaagacatgaagaaagtggagaatatttggagaaaagcatttcaggcagaggaaagtgccagggcagaggccccgaggcaggaggaagcaacagaaaacagggaagcaggtgtcccaggaggagcccaatgccatggaaagatgggaaaagaggtggtggatgagatcctggattcttataaactttatctactccacttgcacagatgatggaggatttgaggagtgtcagtgaatgctctgtgtggactgaacttggagcagactggggctggaactctccagggagggcaactttgaccgagacatcttagggtttgccaagtcctcagcagatgttttttgatgtgccttgagatcctcaaatgagaagggcagtgggattcttccctctccagccaggaccacatctgtgcttttctgtaattgtgtaaaaaaaaaaaaaaaaa

SEQ ID NO: 47 - DNA, 1266 bp, Homo sapiens
gttcaatcccaggtcgttttccctttcagctgcaatgccgggattttaaatagcagagatgaaaggcccctgcccccgcctccctcctcccctgagttcatgtattatgaatgaaacggcagcctcgctgcttcctgaggtgctccacttcaggctggggtgcaatggctcgatctcggctcagtgcaacctctgcttcccgggttcaagtgattctcctgcgtcagcctcccaagcagctgtgaatacaggttggagtgcagtggtgctgtgtctggagtttgttcctgccgttgggtttgtggtcttgctgacttcaagaatgaagccacggaccttcacgtccatcgccttggcttagtgcatgtcaccaaaaattctccaggaatttcatagtttggaccttggtggcatggctggccctggattatccatgcagggaggcctgatcctgtgacagctggctgcagcagggggctgcccatcttctgtgctttgtggtacatatctgtgtcaccaaagtagcggcctcggtacagcaagcctttcatctgctgcttctccgtccagcagttgttccagaggttggcgatataatcatctttcacattcggtttgactgtttggaggctggagcctgtgtactcctcggagaaaatgcctgccacatagtagatgacactcaggtggtcagtgactcgcctgtgatgtggcccacaaacagtcttgggctcagactgtagggtggactggagaccatgagctggctgagagctgacatgaggatgaggatgggtatcagctgcacgaacacccgcaagctgccgtcactccgcttctccctgcagccctgcctttgctgatacacacacaggcacattggaaacgcagtagaaaatggctgccaatttaaaaccagaagttaagaagagcaaactcgaatgtacagcaagagagcttcaggctggactggcttccagcagaagtgggactggaaacctcggattctattgtctcttctctgtgaagtgggaaaacatgtcagtatctgaacttgagcttggtaattactgctcatttctcaaccttttccaagccacgtaactcccctaaggcttagttttcttatctgtgaattgcgagatggtatgttcttcatcacgaggttgctataaagactgaatgagataatgtgtgtggaagcaccaagcatggtccttggcatgcagtagatgctcaataaatatgaactggagtacacatgca

SEQ ID NO: 48 - DNA, 448 bp, Homo sapiens
tgatcctcctactttggccttaacttcagatgttgccttcctggtgtctgggcttccgcagctgctgcttcttgaaatctgattagcaccataggactgacagtggcataggcattgaccacaaacttgtggacactgtcgatgacagggctgaatacccataacagcattttggaggatgagacaattaagtccaatgagtacataaccacgaagaaactcaccagcagcaagatggtcttggtggcccttttctctggggaggttcttaataaaaagctagtgctgtgaaggtgctgggagcacctctgatgcctggacaagagaatcaccatgaaggcacttgagagcggcatgattcctacaaggaagacatctctggataacgacagagtaacaaacagccttctgatggtgacattcattggggaaagtgagcagtatttac

SEQ ID NO: 49 - DNA, 2781 bp, Homo sapiens
agctggggttcttacccactccagtgactgcctctcagaaaagaacagggcaatgtccattctccttttattttctttaagcacctgatcattctaaaagcatgtgttcctccgtgtgtgtgagttgtgtacacgtgtgtgtgtgttcctttcttttctcggactccaggctcatgactgcttatttgcatggtgttttggtgtcaaaggagtgttgaatgtgttctccacacacccagctttattccactctaggagtttaacttcttcagcattgttatgaggtccccggtgacctcagtttctcctctccgcgtcatccaggacttcacctgaagcttgagctacacgtaagacttcatctaccttgcacagggcaatggagagaggatggcataccagaatcaccagatgacagacatcggggtgctgtcggacccgggaatcagaacctctgcagatagatattttggaaggcgctccctagattggcacctctggttagaaccctgcccagggactggacaagttgggcccatggctcatatctggccagtgttcattgctttgttgaatcacacttaatcctttggttttggtagattcctgcaagtagactgacagctgcatgtttgcaggaaagttaaatattttgacagcgcagaagactgctgcatctggagggttctgggtccagctataaccagacttgcctgtcctaaacaaatggattgactgcttccggcatcctcactttacttctgcatggtgaccaacatccggagcttaattacctgacagccaggaggtagggggcaaaggaaaccttttaatttatagtaagaagtgatcagttccttttttgggtcttagttagaatccaggtgcacttgaaacaataaaaccttgtatatagttttctcctataagaaacttctcagatatttaccaaaatcctggaaaaatatatattggtcaatataccacaattcccacaagaggtaaatatttacaaaatctactttgggcggtgatgctgcaagaatattaaaaggcgttgactttatcgtcaagtgaattatttcttaattttttaaaatttaaatcacagtatatttgacaagctacagcagtaggaaaacacctttgctttaaacaaaactaccttttctcagcaagaacagttactagagtgggaaataaggttaatttcagttttattaataatatctgaaatgaaataatgttacaactctcccctctaacctcgttgctagacaacttagaatatttatttatttctccttcagagaaaataagagtggatgttacctttaagcaacatacacatttaattaatgaacacaaggaaaatgattccggttgtagttaaatcgggtacaagcatataggatttaagagatctgaccttagaaatgaagaaaatattattgtaattactccatttgctaaaaacaaatgatgtggcatttgaatttaagacttctatcaaaagcagttgagtgtctgtaatcagttctcacctttacattttaatggagttgaggttgagccgttgcatttacaattatctaggctgacttcatgcctttgaaatgacttaaaaagattagcattcatggattatttattagctcctcgtgaacgtatttccaagaatggaaacaacgtattgcatcaaagtctagtttccaagtttaactcttttaatgaacagcatgactgtacgatgctgcaaaaggcatctctgaagtcacaggacattttgtcatgcttttcccttcaagtgcatctttagtagcagtctttgttccttgcaagctcagggagaatgttgattccagccctggcagctgcccgagatgccctgtaaacactacggctagcagaaagcaggctgctcaggggggcaaggcagctgatcccagcctgctgtagctatcactgatagggaatgcctgtctggggctcggcagagaactcagtgacatgatggccctggcagtttaacccaaacacacttttctgcctagataacaaaaatgtcatgcctgagtccctgatagcaaccccagaggagctccaggtttgaggcagcgctggcaggacgtggtctatctgccatctgaagcccttcattgcccgcctggctgtgaatctcacctcctctgtagtggaaaacaggctgaacagaactggcaggcaggtaagggacagcaaaccttgcagggagggcctagtgctgaagctaagccagccctttgagttcaagctcaaagacatgtgatgccagctttgcaggggagctaagattcttccgagaaaaagcagaatgagagagagatatgcagctgcagtggaggacttggaagagaacaacgccaggtcctggatcctgcaagaatctcctctggaaaagcaggggagagaaaagcaaggaaggaagcagggtcaccgcaagtgtgggatttgtcttattaaaatctgatactgtgtggcagtttgcttcactcttggtataaaatgtctgagctccatgttaaagtaaatgtaagtaatataaatctgcctttcctgaggtgaaaatagatccatattatttaaaatatgaactgagatagatgacagttacaaacattatacttgttcttattataattcttactaagctcaaggaataaaaactgggatgatgaaaaagaagttctgaatgtaaaaattggtgttttggataaaatacaaaccaacccagaaatgatg

SEQ ID NO: 50 - DNA, 559 bp, Homo sapiens
ctgctgtcgataagataaattctccagtagacaacctctcccactaattgtgtattagcaacgtattttatcttgagagcttgtacactgggctctcaacgtggtgtggaaggtagcctgttacagtgctggattcataaaagggcctttatggtttgtgaaagaatatctgtgtgcttagggaggaaactttttgatctgcagaaaagccagaagacatctaggacatccataaaaattcatcagagagcattttactactgagctgcaaagggaaaaacttaaaatggatatgaaaagtgaagaaagtgatcataggagaaaaccatttcaggtgtctgatgatttgtgagcctcaagtgactactctgtggaatcatctgtccttgcctttgaattagctttccctaggccatgagtcaacattagtagtttatacatccaaattgatgacaagagcacctcaaaggcagcagcctcaaggagcagccatggccccagacttgtcgcacggatgcagaaaacttaatggaggaggctgaggtcagaatgggaagag

SEQ ID NO: 51 - DNA, 3996 bp, Homo sapiens
tatgagaactgtaaatatctgcagacattttctctttcctattctaaaacttactaaaattttagatacaggaattctctgttgaaaaaaatatatatatgtatagatagatacacacgtatatatatacgaaatgtgagaaaaaatatatatatatattcctttgatggtctttaatatttagtttaaaaactttaaggaaatcataaaacttttaaatttcaactctctctaagattatatgggcagttaagtttaaatatagagcatatatttcttcagttaaaaggaagtgtgtatttactgctgttcaattagaaaaagcaattaacacctgcctaatcataagctacactgttttttatgtttagattttcaaaatagagcttgcccataaggacatctacctactggggaacatagaattattttgaaaagtttgttaagaattggctgattacttgacctaaggatttaattcagcatgaatacacaaaagaaagaaaatgtatatttgcttgtgttcaagtctgaaattaagctttggtctacggttaaattaatacagccctgagaacaccttgtcttaacttcctaaaaattaattttgagaaatagatttaatagtaccaaggtacattgttgttataatgaagaaggcgagaatagtttttattaccttaattgacgcgcttttataaaacgtcatttgcatctggattctaaagggaacgtgaattatttttgcacgattatgatttggagtaatattgaaatattaaaaaaattcatccttttattcttaattgaattccaatgcagtaacttcaaaacaatggaaatagcatgaggccagaaaggggaaagggagtagttgacactttgcataccaccagtaacatggaataggagggatgctacaattataggatgctactaaatatgaaaatttattcattaattcagcatttgtacactgagcatctactatgtgtcagctatcaagtatgtaatgatgagcgaagaaaaaaaaacaaaaaacaataatcaacccaaaaagtaatactgtcatgtagattatagcattaagattatccaaaacttaaacattctacaaatagatgtgaaattaattacaagtgttaaagtgttattactgctacaaaagaaaggtaatgttttgcaagatcatagaatagtcaacttaaccttgtagaaagatcaaggaagtcttcccaaggaattaaatgatactttcattatctttgctttacctgtgaagagctgaagtacagttaaataacttgctaaagttttcacaactgctaagtgataaagacaggactgggatccatgcactggtgccagagcctacaatattaacccctctaatatactgtccgccactgaattccttactataatgtcaagagtttattaggcaagcttcatcaggttgactaagcaatggtcatcaagggaacagtaaagagaggttaggagagaggaataattagaattataataactcaaatatgcagcaacctcacgaattaggaaaggaaaagaaaaagaaaaataaataaatgtataactagccttgaatctagtttatggaaataagtagttttcatctaacagtctgcataggaaactacataagctcaattcacagaatgaagataaatgattattaaaaataatcctcatctatgacagaatactttgtgcccactcccaatcatatcatttaaagctaaattaccaaaagcatgtcatttgtctttgaatttcaggtttattaactgtataatggcaattgaattacctttcctggaattaaaggtaaacagtcttttccccacattattctgaaattgattttgctttgaagataacatgtacacttacattgtgtttctgtttcatgaaaatctattgttaatgctaaatattttaaaataatgttttcattcattaattcaatgaatacttagaaaattctattgaagatactggacaaaattaagagaggcataattttggagcttacattctataggaggagaaagaaaattaacaagtagaccaagccatgtataaatacaatttatgtttataattgaatatggaacatgcagaagccattctcaaatggataactctagtctgggtggaaatcaaacatttcttgcccaatgtaccaatgagactgtaccataataatgtgtaaatattcctaatataaataatagtataagtaatatttgcttcagtgcttcaatttcttaatcaaatacactaaagaataattgtggatctttaatttctacattttacatttactttgctgaataattattatatttataatattaccaatatttaataacctactctactgtagtagggcttctacggtaggaaagctaagattgtaaatcctattataaagttttgtttttcccttaagcaaaacaactcctattttttttgtgtaaactcatttttctacaataattggatgttttaaagagacatagttattcttctggtattttctattttattttttcactgcaaattcatcacctcattctgttgactggatcaaatttattattaatgtatcacctgggctgtcagtaatttttaacatgtcaatattttccagtatttctagtaagtatgctttaccagaaacatacatattttatagtttttctttgcttcttaaattttcctttatttattttcagaagtctttgtctttcttttcactgagaaagtcaaccatggtttatgggtcagcttaattttttacttaaaggaggtctttcctaattacctaatttaaattgatatccactcagattgttctgttttattgtatcctaatgttttccttcatctgtcacatttcaaaagtattgcttatgtaagtcctcaaaagtattgcttatgtaagtgttttagcatacacttttcctaccacttggagtctcatggtcccagtgactacgtgggttttgttcactgatacatgcccagtttttagcacagtgccttgtacagagtatgaaatatttttcctgtaaagaaatgagtgttggatgttacagtctgtgataataaggaaaatcctgcccttcatttgttactttctcttgcataagaaatacttcactattatttaccttaattcttatctcaattctaatatgcatgctggtttgtgccattgctaagctcttttaattgcaaaagacaagaatatttgtttttaacagagtaatttgttatgattccacatcctccaacagtgtcatggtacaaacataaaatataatagagaacaatgaccaacttttatctccttattctagtttttatctccttgtgaattaattttagaactcaaaacttagataaaagtatctatggagatttcttccttttcattttactttacctaattttattggcttgaaagacctcattgtgcttaattaatatcagtgatcaaatctattatgttcactttcactatgtaggtctttaaggggtaccaaccactcaaatagtcaaaaagtccatgtataacttttgactaacccaaagagttaactactaatagcctattattgactggaagccttaccaataacataaacagtcaattaacacatattttctatgtgatatgtattagatacagtattcttacaataaaataaactagagaaaggaacatattattaagaaaatcatatgaaagagaaaatatgtttactattaagtggaagtggatcattacaaaagtcttcatctttgtcatcattttgagttggctgaggaggagaggaagaggaaggattggttttgctgtcccaggggtggcagagggggaaggaaatctgcatatgaatgcattcatgccattcaaacctatgttgttcaagagaccactgtaaattaaaaaggcatcagattttt

SEQ ID NO: 52 - DNA, 2008 bp, Homo sapiens
gcttgggtgcaatggccgctcaaagggcgaggcttattcgaagcctcaaattcagaaaacccagccagaccttggaagttaagaaggtggaaggcagatcgcggaaccagtgttctgatagttgtggttctctgagggaagccaattctggggaccggtagtggaaagctcttgcgctgtttccggccacctcagcgggaagcggagacgcaagcagctggatctccggtaactgagacatagggtataactgttgtcgcggcggaggaagtgaggacggcgccaagggccttccgggccagtgttggatccctgtagtttgtgaagatggtgttgctaacaatgatcgcccgagtggcggacgggctcccgctggccgcctcgatgcaggaggacgaacagtctggccgggaccttcaacagtatcagagtcaggctaagtaactctttcgaaagttgaatgaacagtcccctaccagatgtaccttggaagcaggagccatgacttttcactacattattgagcagggggtgtgtgatttggttttatgtgaagctgccttccctaagacgttggcttttgcctacctagaagatttgcactcagaatttgatgaacagcatggaaagaaggtgcccactgtgtcccgaccctattcctttattgaatttgatactttcattcagaaaaccaagaagctctacattgacagttgtgctcgaagaaacctaggctccatcaacactgaattgcaagatgtgcagaggatcatggtggccaatatcgaagaagtgttacaacgaggagaagcactctcagcattggattcaaaggctaacaatttgtccagtctgtccaagaaataccgccaggatgcgaagtacttgaacatgcattccacttatgccaaacttgcagcagtagctgtatttttcatcatgttaatagtgtatgtccgattctggtggctgtgaaataatgaatacagtcactggtaagggagaacctagaacccagtaggtgtatattttcaggaaactgagctcacagagatgtgtattagaatccaagtggaacttctgcctctaaagaccttgcaagaaaagagatgtcctgaaaatgaaaggttgcacctcatttaatgaagcttaaccctatgtagaaagtctctttcgggggcagaggctttctctgggtgccaagccatatatattagggaatagtagattgttatttcgttttttccctcccagtgcattttaaaaacagcactggctggggcattctcattctctgatggagccatcaatgagatttaacttagtcaacctgtgctagcaacattctgaaattccttcaaagaaggcagtcctttgggaaggtgtttttttttttgtttttttgtttttttgttttttttgactctaatcaacattccttttgttggtgacatttgtgattttcagtaatctgagtttttgatggccttttaaacaagactccagtatgtgaaagttaattgctgtgctccacagatcttgtctattggcccctgtagaaagttaacctttgttgttttccttttataatttgcttattgcacaattgctttagggtaagtgaattatattaagatgccttgaaattatagcactccttgattaagaagctaaaatgtttctctcatttactccttaaacaaaagacttaaattagtttgggtcattattacttttattttgcagcatttggtttgttattagtgtaagagcaagtataggatatggagaggcccctggcttcatgagaacaaaggcaggcccaggttataattacagctttctcctgccccttctttactttctctaccacagttttctccgctgtttgttttcctcttgccacaatttgctaacacttaaaaaattttcctgcacccagtagtttcatatcctgtagacatcctcttaggacattctcaaatttcaaaataaaaaatattcatct

SEQ ID NO: 53 - DNA, 2315 bp, Homo sapiens
taaaaaaatacttctacctttattggcattgtgtgtggaaaaagtggtctatttaagggaaatacaggctagtaaaatatttgttatttgcactaggagataatttaaggaacaccttctcaaatgtcatcagacttactttaaaggcaaaccaagtccaaaagttctaaattgagaaagctggaagggaaacttaaatatgatccaaccccctgttttatgaccagaggggaatggattggccaagatgtcggggatggttaataggacctcaggctcctggtcagtgtggggcactcagacccatgagtctagaaagcaaagaacaactggattcatgtttcctatgtcagagtccacccagttgcagttccacctgagtccttcacagacattaaaggtaggattcacatcatggaataagcatttttctactagcgatttgtttaataaagctttattggaatataatttgcatgccataacatttccccttttagatggaaataatagacactgggaactccaaaagagcagggaggagagggagggttgaaaaattacctgttgggtataacattcgattgtaatcagtttccagtgttttgcattcctaccagccgtgtaatgcactatgaacattcatttgggggatgaataccctaggagcccaatccccaccattacatgtgtaatacccatgtaataaacaagcacatgtaccccaaataaaaaaaaatccccttttaaagtgtgtcattcactggttttcagtgtattcacagagttatgcaaccatcaccacaaaccaaatgtttaacatttccatcacccacttagccccctcaaagaaatcctagacctactagcagccactccccattacccacttccaggctctggcaaccacccttcagcttccagtctttatagatttgcatgtgctgggtgttttcatagaaaaggagtgtgtgcccttttgaatctgatttctttcactcagcagattcatccatgcttcagttcatccacgttgtaacatggattagtacttcattccttttcatagccaagtaatattccactttatggctatactacattttattgatgtacatttgagttgtttaccctttttggctgttaggaataatgctctgtgaacatttgtttacagagtttttgtgtatacgtatgttttcagtttccttaggtgtacacccagtagtagaattgctaggtcatatgggaattctgtgtttaaccttttgaggagctgccagacggttttccaaagtggctgcaccgtttgacattccctccagccgtgtatgagggttcgctttctccacgccctcgctaacacctgcgattttcttgttatgtgagccttctcgtgaatgttattccactgacattaatctcatggcaccgtcagtgattgaaatgatcttcttgttctctgtcttcgcctctggatcatgaccttcccgaggactgaatgtgtcataaaatccccagtctctagcagtacatgtgtattgagttggatcacatgctgctggacccatggcttgtcatcatgtgtacatgtagccgactttgactctcaactgtgtcagttctgggctagagactgttactttatacaaagagagataaactgtgtcccttgtcctcaaataaataggttggactactagggtatttacaaaacagagtgtaggtgaagaaaaggaaatttcagtgacaaattaggaggcacttaagaaatactggacgttttcaattaatttggcaaaatgaaaagtaatagatacatttccttggttgtggctgtgatgggtagagacagtggtgctgaacctcgctcacacatgtgaaagcttgtctgctccagaagtagaagagagccttccagttgctaaggctctgtccagggccgggctcctgccaggtggcaggcagaggcttcctcaagccctgcgtccctcttctgggttcagagaccactcccaggcttggttctatcagcacactccatgcatacaggtgcagaatgctctccccggccacccgagaccacacctcagccaggaccttgtgcagagcttgcttgggccaaggtacacgatccaggaaagctgagctcaagaaaaatgaatccaatgctggatgtggtgactcgtgcctataatcccagctaattaggaggctgaggtgggaggattgcctgagcccaagagttcgaggctgtgttgagccatgattgcaccaccgcactccagcttgggtgacaaagggccatgtttctt

SEQ ID NO: 54 - DNA, 735 bp, Homo sapiens
aagtatttgttttcaggcaaaagcaagcctccaaaagccccttggttcttctctgtgtgtctcgccccttctgccttgtacaccagactgccggcaagcaagcggggaggtggcgaacagctgggatcctccagtgaaaagtttgctcagcgcgagagatgtcaagaggctgggattgtcgcctatcgggagaagaattccacagatgaattggttctgccctgtatctttgaatggtttttattttctgatgtccagtgtggcagcctggcagagacatttagttgaaagaacacggggctctggaaacaaccagtcctccttggttcatattctcgtgttgtcacttattaaccgagtgacattggaggtgatatgctgcagtttatcactgaggtcctgagatggtccatactctaagctttgtgtctactgtggggggcaaagggaaaacttcccccttgctctctgaagagtcattgaaaatcaactgacaaaagaatctaaaatattcctggaaatggagagtcctgacatgatggccccatgatgaaaagaacccaggttcctgagtcacgacgtggacatgaggcaccaaggagaaaacacgtgaaccttaataagtttgggggtacacctccttgccatgtgttaccttctgtcatgttatgatgcagcaagaaggccctaatcagtggtagtccctcagtcctggacttctcagcctccagaact

SEQ ID NO: 55 - DNA, 995 bp, Homo sapiens
gacggggttaggcttccggcgtgggttgtgtggcctctcccagctccacgcgtttctgggcgccgggcactaggcgagccggccgggctggcgcgaggccgcaggcgggaagagtccccggggtcggccccgaagcggctctggaggcagtagccggggacgccgaggtcagggaggaggcggatccgagcgcggtcccgcagggccctgtccgttcttccgcctcggccggtcccgtcaggccgcctttaaatgcccggcgcctcgcacctgctaacaaaacgagctcctgctgttccccagctccgtaaatggtgcccctggccctccccagttctcaggcagagccttggcggcctccctgacccctaacaccccgcatccagcccggcagtacatcctgttggctgtgccttcgaaatttccccagacctgacctcttctcccacctctgccaccaccctgctccgagccgtcttttcccgccgagatgactgtagtagcgtctcagctgggtctccccgcttccaccttcccctcctgagtctcctcaacacaggagccagagcgatctcggaaagtacaggaggtcatgccccagtgtggttcccctttcctgggtttaagtcaaggtcctcaccgtgcctgccggcctcccgggtctctgcgcggtggactctggacctccctgccccgtcctgcctcagggcctttgcacctgctgttaccgcggcctggaacgctcctcccctgaaaccctgtgactcccacttagtgaggcgaccacctgttgaaaaccgtgcccccttcctatacagatgctcctgtcatatggggttagattccccatcaacccatcataggttaaagcattgtaaggcaatttacggtaggtttatccggatgtaaccccatctgtaagcggaggagtatactgaatgtgtatggcgtttgtaccatggcaaagccaaaatgtaagtcaaactcgaagtcca

SEQ ID NO: 56 - DNA, 583 bp, Homo sapiens
aacttggaaaccgaaaactcggcggccgaggctccgtgccccgcgcgcagcgctgctcctgccccggccaaggacgcacgggccagccggcggaaccagaggttttcagtgatgttgagagtcaacaggaaattaatcagcaagtagaaaattgaaagaagatctgcatcttactgcaggagtcattaaaataaaagcagatttggcaaaatggcaagaaccagaggatgaggatgtaaaacaaaaacttttggagtcattttgccaccaggatgaaaataggatgaagctgacatgacaaaggtgcaggtgacagcttctaccttatgatctgcgttccagtcagcgggaaggagatggggtgggaatgtgataaaccacttcccttgaaggacattttccagaaggtgaatgccacttctgtttatatcccattggccagcacttagatttatttccaagaagaaaaaaggagaacagatatcatgttgaccagcagtctctgccacagacagctaatctccaccttccactaaggctgagaaattaccagcatgggaggaaaaggtggtgcagttcagca

SEQ ID NO: 57 - DNA, 875 bp, Homo sapiens
catagtgagtctggggacccaagatcttattttcctttctgtcacccccgcttggttttggattccgtgacagctggacccggcttctgcgtggacataattggagacactggttattttaccaaagctttgaccggaaggatgtacttttggatacaaacagactgctttaaggagtcaaagctgacttatgaagttggcctcatcccttgtctacacagtcactgtacagagttccttgcctgtagtatgtaaagaatgtcactttctgacaggctcaggagccccaaattatcctgggaccttgaggagaggacattgcccaatttatataggtattttcaggcaccaataaatcatggctgggctcaaggctttaaaaaaagtcaaatctgggattcgttatagaataaagttccagcaaagccaattttaagacaggcctatatggcaaataattattcgtgctgacattatgcaaacactcaggccaagtataagatgaaaaattattttaaataaatttgtcctactatgatttgtcttcagtaaaaacaggtactgggctgggcatggtggctcacagctgtaatcccagcacactgggaggccaaggcaggcagatcgcttgaggtcaggagtttgagaccagcctggccaacatggtggtgaaacaccatctctaccaaaaaatataaaaattagccaggtgtggtggcatgtgtctgtaatcctagctacccaggaggctgaggcatgagaattgcttgaacccaggaggtggagcttgcctgagtcctggtaaggcacagacagaaagggttgtcagccatttttttctgaggttataagatctgcaacttccccagttattc

SEQ ID NO: 58 - DNA, 491 bp, Homo sapiens
ctggcctggtgaaggaggcacgaggaagattgcagtcagggacgctcagcctgggagctgaccctcagatccagggatcccagcagccttagaaagctgatgatgccaggagcggggacttgcctggggctcaagggaaccattatgcctgtgctgagatgaaacgtgtcccactattcctggatgtgtacagaacccgacaccatggctatgagtacctaccacgaagaaacagtaacaataactggactgtcaatactggatgtcttgggagcttaagagacactgttctgagtattttacatgtatttgtcagtggctgttcccatgcaggaggccctgggacatgcctgctactgtttctttctgctggtctgaatattttacatgtattatctaatttaatcctcacaacaactatcatacttatggtaattatattatacccattatgcagacgagaaagaaggtagttgggattcatacttgtg

SEQ ID NO: 59 - DNA, 756 bp, Homo sapiens
ataaggaaataggtgacttgcggccaggcacggaggctcacgcatgtaatccctgcactttgggaggccgaagcgggcggatcacgatgtcaacagatcaagaccatcctggccaacatgaacatgcttctagaactttcatctattatgaaaaaataatgcatcaggagcagctggtacctgcaggaggagagttgtgcctttgtcagctcaaactgcaggaagcgctttgggacccacaccctctacagacacccaccaggcgaagggccctgttcagggtgctcccagcctgggctcacttccacaggagacccttcccttatgggggctggggacaggttctcaccctgcctgggcacactgcttgagggaggtctgatgctcgggcagggaggagctgtacaccgtcagaggagatctagggacaagagcggctctgcctcgaggaggaggattggtatatgtcacctcttccccagtcccagcacagcctagtgggatattttgcaagacagtaccccagctctgcagtggcagcaacagtagcagttggccccttaaacatgggtccagagcaggactggagctttgtgctcagcctgaggtcagatgtgcttcctgtctataaaggagaggttgacaagaaacttttcaggcttttcctctcaccagttcatttcttgaggatgaaccagttggatttttaattcatcaatggcatggaaataaaatattgattaaaacactggcaaa

SEQ ID NO: 60 - DNA, 3510 bp, Homo sapiens
cctggagagagaagaatgcaggcagcattttcaagctaatcgtttattggcaatctgtgatcacaaggttgagcaccaaatcggagtcattttgggagaggagagaagctggactccaggcatgacccagacggagctgatcctcacacctccgttgaaggcagaatatctttgtgcacatcagcttcattctgcagaccagctttggctacctggaacactgttcaggattccaagacctcgggctgcagtggaacaagacattgatctgagattaattatgaccagcaaggatcaacacctgtggatggagaggggaggggagggtgcaggcatctcctgtcatgctcattggtcagcttagagacttgcagacctggcactcgccctagaggaagcagtgtagtgagaagaaagccagacttaagggatgttggcttctgtttccagctctgacacaccgaccttttggttagaagaagctcaactagaagacttagatcctaagagcttcttggggatgtagaacaaagtctgcttccattagggcactgcccttttgaaatgatcatgtagataacatgcatttgaacaattggatcagtttttgagaagtgaatgtgtgtgtgtgtgtgtgtatgcctgtgcagactgacaggatatggtggaatcgaatccctgctgcagagttttcacatttacagctgatcactgcattaacaaaaatgtattgatcaccaaactgacattgtttagcataacaatttttcttcaaatgattactgtgttagcaaaaggatctcttgggttcaaccttaggccagtgtttgaccctgagcctgttagaacctcatgtgtcgtatctggacctctgagagctgggggcccctttgtgctgtaaaccagtacaatgtggtgctcttgacactaggaaattattgaagacccccaaagagcttttggttatgtatctttccaaaaatggaaagacaaaaaattttaaacatttattaatgtctctaccaattacaaacccattacatgttatcatagcaaactttaaagaaaaatctttttcaaaacactagtagaagagtaacattgttttacattttggaaaatcacgtctgccttctccattcaatgtgtgaaatacattttttttttttttggaaatacataaagaaaatggtctcccacagattcacagttggaaaaggaataagaacttgaatagcgttttcagagaactggatttttatccttggcactataccaaaatccaacaagtgaaaatttcttaaaggttcatgcagtgtgaaatctgaaaccctatcaatgaatctttagcccccctgtcaaaatccacttggaacacaacttttatctgtgcacaattttgtgccattatttgattatttgaaaaaaagtgattcattgagttatgctaatctttcaaatgtggacaaattttggaaagtatttttaaaaatcacatttctacaggttaccaccaatctcgacagagacatcatttaactgttaagaacccactaggctcacggaacttgcagttccaaatgaatattccaggtcctggggtgtgtctgtcctcatgctttcccatcatctgtcttgtttgccaggctgaggctgagttgcatctacattttggtttgagaagaggcagaaagtgtggcagaggcacacgtgcagtcttcagggccacacccccgccatgtccactcccattttaggaggaactgttagtcagatgcagaagacgtaggaagacaagccacagttgtatggttgctgcctgtgaagcagtgagccacctgtccctgtgtgcagcaaatggatggcagctcaaagggttaaactgaagataattgaatgaagggaccctttggagaggcgcaggtaggattaaggaagccaggaaggggtggaagcactcagaaagtagctcagaaggaagtcgttcccagtgctaggcctgcagacacaaggcggggggaacctgtacccaccaagaatgggagccaagagtgcgaggctgaggtgtatcttggagcctcccattggcccaaacccaacaggagccataggaggccctggttcacagagcccctccccagctttgtagctgccaccgcttggcaactgcccttaggtgcacagcaagactgaataaccacagtgtccctgcagatgggggcagtcctgtgcacggcctccatgaaaccctcactgtccagctcccgtcctgtggctccaccagcttcagattgcatcttttgtcgtcatgctgctgcctccacatcccatttgggcagctcgccctccaggatagcatctgcattctgggaaggaaagctgagaagggaaggtggaggaggaagcggttagtgcttagagtagcaaagctttttttgtttgtttgtttagacggaatctctctgtcagccaggctggagtgtggtggcacaatctcggctcactgcaacctccgcctcccaggttcaagcaattctcctgcctcagcttcctgagtagctggaactacaggtggtgccaccatacctagctaatttttcctctttttagtagagatacagggctgcgtggggattacatgaaatactccaagtaaagccctaaatgaatacttgacccacagcaaatataattaatattaggaattatcattgttttagtagatgtgaaagaaaggctgttatcaaactataagtaatgtatacatgctagttaccactgtgaacacaggacatgaaataagtatccaattagtgataatatacaatgaattgtgactgtgctcccagagaagccaggtgaaggccaggggaaattcagaggaccatctctggctgggacatcagggcaggcttcctggagcaggaggtccctcaagactggagaggacactttcaggaagtcaaccaagactgaggatgtgactgacattcctggaaaatatcaaggtggaatttagtatcttccagtgttcttacatggaatcatttgttcatttctcctgtggagattaaaaaactacaaacctcacattctttaccataaaaatctcccatttttaaaattcttatatttagtcctagatttctgtgagtcttcctcatttgcccctggctatcatcatcctacataaaatcagggatggttggcatcctaactggcagctactaggaaaaggaaactgagagaagataggattctaaagctgccactgcctggaaaatcttgttagataatgatacaagttaggagcattgataacaacacgtttttcacttactgaggtctaagttttgggtcatccaattgtcatcctactctttaccttgtcaccacaaaaatgttcttgctgggtgagtcggaatgtattaattacctatcaaacaattgaatattatatcaataaattatgtaaatattaatattttaataaatagcaatacaaattaa

SEQ ID NO: 61 - DNA, 402 bp, Homo sapiens
caaatactattgtctcaattttgtagaaaaatgaagctcttagagatgttaagggattggccaaatcactgtcaggtaaatgagggtgttgggttttgatctctggcctgtcactagacatcatgacagtatcagcagactgtctctcgaaggcataggactgtctcctctctgttgattttgcactgcacgggacggcctcctacttacgctgtaaacagctgcattttagtctttagccttgttagatctcattgtcagaaaaataaataaaggcaagaggagcctgggctggcggtcgggatcttttccctccctccgcgcccgccctccctctgtccttaaggaaatgctaccagacaccccccaccagacacgctcagccttggcgaggagcggccg

SEQ ID NO: 62 - DNA, 993 bp, Homo sapiens
atcatgcttcagttccctaaaaaagaaaacacttctcctgtgcaggggaaattgcttcaatggatagattgcatttaaataatttaagtataaaattactcgaacaggccgactgatatttcgaaaacgaaacagtcacaatcacttaagaatgctggcaaagttcgtgatttggtgtgtagatgagagaaggatggatagagaaaagcatcattacaaaagtgaaatgtgtgaattttattctggctttgaacattgagtagacgaagaagacaattccagacggaggaaactccacaagaaatatcatggaaatttgaaagaacacagtgggcttgggaagagagatctcagtggtggaagcaccatcatcccaaggagacttaggacattatttgaagagagttttcccctgaggaaagtgcttcagaggagaaaatacaccagaaaaagacaaggccctgctctgaggagtgaagacacaatccagcaggcaggagggatggctaagttcaaagtcttgagaagtgcccctcatggacaccccagggtgcccatctccaggttaccaccaggtgcttccaagaccaagataaccaggcaatcatagtagatgcatcaatgcacccttgcccaagggcctagacaagaggaggaaggaaaggaggagcacgtgcacaaagctaaggaggtgattaacaacatgatacagtattgtttagcttcgcatgaattttatcaccttgcctagaaccagccaccatctgccagggctcctgactttttctgaaatgaatagacactaaagcctgctggggaatttcatggaaatcaagatgactcaacccagagtccatttcaaggctaggatgctagaggacgccaacaaaggagtagggaagtgaaacggatcagctcacatccaagcccttgcatgatcaatcctgcagtaggagtgctgctcagttgggactcatgagagcccggaagagg

SEQ ID NO: 63 - DNA, 479 bp, Homo sapiens
agccccaaaagttacctttgtcacgtctactgtactctattggttatgcatgttctgttggaggaaggagactatggaacggcatgaatatcaaaaggccatgatcactggagccatcttggaggctggctatcacaacactcacctcactgctatcagagtgatcccttaaacatgaacctgtctaattaaagtggaaatggtgaagatacactgtggatagaggaattgagaagaatggtggtgaaggcctgaaagagaatggaagataaagcagcaatttactatgggcatcaaacagatacgtcgaatgacattgagggtttcactgaagaccagtggactcaaacttacccaatatggccactgttctctcaaaaaacgtgagcaaatgacatctggagctgatctccaatattttagagaaagaattgaaaagaatttttgtgggggaataaaattttacccagaaagtaaaa

SEQ ID NO: 64 - DNA, 318 bp, Homo sapiens
ggatgtgagggcgatctggctgcgacatctgtcaccccattgatcgccagggttgattcggctgatctggctggctaggtgggtgtccccttcctacctcaccgctccatgtgcgtccctcccgaagctgcgcgctccgtcgaagaggacgaccaaccccgatagaggaggaccggtcttcggtcaagggtatacgagtagctgcgctcccctgctggaacctccaaacaagctctcaagattgctgatctagggccactaagtgatgaattgtatttggaagcaaaaaggatggctaaaaaggacctcaaccctttt

SEQ ID NO: 65 - DNA, 703 bp, Homo sapiens
ggaaacagggcggaggcgtggagggagccgtgcagcgctggtgtgaggagcagcgagcaggccaggcctgtaaagcagagtgagggaaccaggatagagaaggctgtacaggaagcatggtgatggcatctgcatggcgcctgtggaggccccagggagcttttactcatgatggaaggcacagagggagtaggcacatcacatggtccgaggaggagcaagagaaaatgggagtggggggtgtcaatgtgctgatattccaatcttgcagaaatcgactggatttagtggaattaaagtcaactggaagacgatctgtggggataattccatgattcaaagccttcagggaaaacgtgtttgctcagctgcagtgattgaaaaattgaaggcaatgagagtcatatgttatgcttggttatgtcctgctctgatgccagtttggagtaaaggctgaactttgctgttgaaagccactgtggaaagtggaaacattgactgtgcgttgctgaggggaggaatgtatttacttacccagaaatagacgcatccttgtctcagtgggctgggagatagtatcaatcctttctgttgcaacagatcccactgccttcttttttcaaaagagtaaatatttaaataggtaatacagaaaagttattgccatttttccttcatcagccatggctgggagtcaaaagag

SEQ ID NO: 66 - DNA, 4452 bp, Homo sapiens
aaaatacacaaattagctgggtgtggtgacacacacatatagtcccagctaattagggggctgaggtgggaagatcacttgagctccaggaggtggaggctgcagtgagccaagttggtgtcactgtactctagcctgggtggcaaagtgagaccctgtctcaatcaatcaatcaatcaatcaatcaatatctcatgctgtaattgtcttctgatgttttcatccacccagccccacctctgcagccttaattactggagtaggtccatgatttcagtgtagggttaatgtattctgcagatcatctttgatttgacctgcttttttgcttcctttttatctctgaacaaaggagatcatcattctctttaatctgccttctgtgtaaatctctaccagactggaagctccctgaaagcagaaactgtctgcttccccagaacttagcactgtgctttcatgtatgtgggataaatttttactttgttagtgcaactttgtttgtacacgttatccttgatattacatacatttgttgatgggggcaatttatatttgttgtgagtaaaatacttttttgttggattaagaagaactatactcttcccagcactttgggaggccaaggaggacggattacctgaggttagtagcttgagaccagcctgaccaacatggagaaaccccatctctattaaaactacaaaaaaattagctgtgcgttgtggcacatgcctgtaatcccagctagtcaggaggctgaggcaggagaaccgcttgaacccctgaggcagaggttgcggttgagccgagatcgcgccattgcactccagcctgggcaacaagagttaaactccatttcaaaaaaacaaaaacaaaaacaaaaacaaaaaaacaaaagaagaactactctgtagtgagagctagaatcctcatgttgtttatttaaaatttttggccaagtacagtggctcatgcctgtaatcccagcactttgggaggctgaggccagaggatcacttgaagccaggagttcagttacagcttgggcagcaaagtgagaccttgtctctacaaaaaaattttttttaaattagccaggtgtggtggtatgcccctgtagtcccagctactcaggaaaccgaagcaggagaatcgcttgaacacaggagtttgagggtgctatgagctatgattgtgccactgcactccagcctgggcaacagggcaaggccctgtcttaataaaataaaataaaattcttaatatgtttatatatttgaaaaactatttgtgtagagacacatgtctgtaaatacacatagatatattaactttttaagctttaattgaagcctttctcttcacaggttttatatatttgactgcagatgactaacagattgaattttaagagtgcgaaacactctggtgctatagggaaggaacttcataaatagcccctcctgtaagggaccagtctttaatttaaaacagtccagcccaggaatcttgcaagaattttgtaattatttgaggagagatgtagatataccctggagttctttgactttaagttattctagagtcatcccagagatggcctagaagacttgaatgtaccccaaaggattctgaatccctttgggaaatttagactatgattttcagtaagaattaaaagccccaggataagcgtggtggttcacacctgtaatcccagcaatttgtgaggccaaggcgggaggatcgcttgagctcaggagttcgagaccagcctaggcaacatagtgagaccccacccatctcaatttaaaaaaagagagaaaaaggccaggtgtagtggctcacgcctgtaatcccagcactttgggaggccaaggcgggtggatcacctgaggtcaggagttcaagaccagcctgatcaatatggtgaaaccccatctctactaaaaatacaaaaattagccagtcctgatggcatgtgcctgtggtcccagcgacttgggaggctgagacaggagaattgcttgaacccgggacgtggaggttgcagtgagccgagattgggccactgcattccagcctgggtgagagagcgagactctgtctcaaaaaaaaaaaagagagagagagagagagagagagaaagccccaaacataccttgggcctttacaacctacttggtcccagaatcgtcttattgtaaacccaaagccaggtcttctggttcgaaccagtcaaaatgggtaatctaaaaaagttaaatagatgattcaaaatcgtgttggtggttttttctttttaaatcccctttccaagtaaaaggaatcttttttttttttttaagttttgaagcctcatagccataaatattttggcaccagcatctattggcacctaagtcattggctgtatcatattcccatgggacccttgttcctagaggaatgcaggaatgatcttggagtgggaaggacagaaacaggtgcttgcaaaatcagatatttctgaaattctctgttattctatttctactgtctttccccactttactataaatttgatctgttataaaatggctgtgtttagatagatacccgtgatgtttaggaaacaaatgatatagagactcccatttaaatgaatcttatctttataagaaacagccaaactgttttccagactggctataccatcttacattcccaccaggaatgtatgagtgatccagtttctctgcatgctcgccagcatttggtgttgtcactatttcttatttcaaccattctgtttatccttttcagtgaaatatctgttcatatcttttgcccatttgccaattgaggcaggaggatcacttgagcccaggagttcgaggctgcagtgagatatgatcactaaatgtttgcttaatgagccatatctttaaatatcttttttaaagtttttaaaagtcagtccagtggtttatgtgattatgtgggattttttaaatctttccaggcaaaatgtgtatagcattttgaacatatttacactgtactgagcccaagagttctcatattctttctttgctcattatagagtatggtactaatactgtataatagtaaattttcaaagatacctttatttagaatgttagagtatacagatatatactttgtacatagttatcataatgtttctaacctttttatttaaagcaggctgatttgtgtaaaggtttcagaatgattttgttaataagttattagaaactttcctatttgtacaagatggtaaatgtagattccaatttgtatgcctcagtaaattcataatcttatttctctgatgtgagccactgtgcctggccttctgtgatgctcttaatgaattttgcagttttattaaattgtcattgagaacctcataaatcattgttaagatctatacaaaaaatcaaggatccacagtaatagaatatttttcatctgcatatgaatttttcccttccctttttgtctacttttagatttaaaaaaaattaccaggacattcttattaaatactattacctgttttggtttctgcacattaagaaagtcacagagaagccagacacagtggcatgctcttctattcccagctactcaggaggctgaggctggagaatcacttgagcccaggagtttgaggatatcctgggcaacatggtgaaacttggcaaaaacaaaaacaaggccgggcatggtggctcacacgtgtagtcccagcactttgggaggccacggctggcggatcacgaggtcaggagatcgagaccatcctggctaacatggtgaaaccctgtctctactaaaaatacaaaaaattagccaggcgtggtggcgggtgcctgtactcccagctactcgggaggctgaggcaagagaatggcatgaacccaggaggcggagcttgcagtgagctgagatcgcgccactgcactcctgcctgggtgacagagtgagactccatctcaaaaaaaaaaaacaaaaacaacaacaacaacaacaaaaaacaaccagagaaatagcacttgttaactacaattgtgactctaggtaaacttgggccttaatatggttagacaagaagggttttaggtaacttgcctttttagatcctatttaggcttattagtctatattctacattcttgcacgatggaaattactagagaagtgggataattctttgttgtggggaaaataaaatttgttgtgaaaatatactgtattttaaaatatttagaaagattataaataactggagaaaagataatttcatatactaatatgatggaattagcctagcagatgttaaaaatcctttctgaaaattataatctaaaattatttgggaaattacaatggaactgaataatctgtacgttggtatattaaagccatttttatattgtg

SEQ ID NO: 67 - DNA, 1717 bp, Homo sapiens
gttggtccctacagtagataaaacgggcacagtagctaaaattaacgcctaagtaaaaccgctgccggtgagttttgggagtattttcgcttttttgaaagttagtattttggctctcacaaagcctcctgattttagtaggctttccctggaatgacccagattccttttcgttaccttagttaaggcaccccctccccgtgcagggtcagggttggaaaactaccgcgctgagcccaaattaccgcgaagatcgtcggaaatgtgcgcaactcagctaaagcggagatttaatggatggtattcagtagaaaatgggacaagacatgaatggacagtttacaggaaaaaaaaatgcaaggggcccctaaacatttaagtgggtgctcagcctttttcataatcagaagaatgcaaacgaaaacctcactgagctaaggcttctgatccatcagattgtcaaaaatccaaaagtttaacaagcgaggtacgctgttaaggacaatacaggaacctgatctgtcctgcattgttgggagggagtgcaaatttacctttgacccgcaatccacctctagaatctactctgaaagtaaacttgcacaaatatgaaaacagcatacgcgcaaggttttatttgtagtggcactgtatgaatttgcaagactggaaaccatgcagatgtccatgagagggggagtggctgagtaaactggtacatccgggctggtactacagcccagctgactctgtggcgttaagaaaaatgaggaaaactacaatattttctatggcgtgatttgtctccagagatgatgtatattggctgctaccgttagcaaaaagaagcactgaaacgataaaaccaaaactgataaaattgatagcgtaaatggtggagaatccggtggaagccctagaggggttccaccaaaagaaaaataaggtgacaataataatagtaaaaagaatctgtggcagtaggaatctgccaggcttcctgttctggaacccagcactagacccggaaaggcatgtttggctgggtgggcctcaagttacttataattggtggccatgctatagcctgagtgaaggatttctggtaccctgccgctctccaaaaagacgtctctttgggaactctagaactggaatggtccatcagcacctgccttttggcagagagggcaggcctttgtaccccactagtgacttggtttggaggtgggctgcccccagaacaggatgtaatcttgggcaaggcagctgctgtcaggctgggcacaacctccccctcaaggctgtgaggagggaagaaaggaaacaacttctactttctttaaagtaggaaacctcctcatctgccacctctcctgcagtgagaagtagagactagacgtggatactcccacataggatactggggcctaatggatgactgtgggcctccaccaggcgcaggtgaccctgcagatatgattcagaggcagcctctcgctgctgttcatcagcagcctgattccatgtggactatactgttgctttcagaaatcatggtctgcctggacctagccaggctcactgttgaagtcttgttgtgtgctcttccttccaggcccagagagctgcccagtagatcaacttgggctttctatcaggctctaagtacaggcaggtccttaggacaaattagaataaaacaatctcagagtga

SEQ ID NO: 68 - DNA, 2170 bp, Homo sapiens
acgaaatgtgtttaagagttcaactcacaaatttagtttatttctctgcctataaatagagatttgtagattcttataggtagagaaataaaccaaattccaactgctccttatgatcattcctctaggtgttaagagtgagagagggaaggcttgacaaatttactgaaagaggtatgggagtgtgaaagctttagacaaggtacaaagatccactctcagaaagagaaaatctgaaaaaagctccaaaacattgatcataggtttggagtttgatagttcacagctctatgtatggagaagagcttaaaggtaagcagtaccagaattggtagctttaaattataagcattgcctcataagggaaacatgaagacttggagacatgtcagtgaagacttggaaacatggcagtgaagaagaagaaagaagaaaaaattcttcaggaaaagaaaaaaactgaacttagagaagagggtgttcttgaagtaggagctctgcctatgaaatgaacagaaatagaaaagagcaggccacatccatacagaactgtaagaaaaaacaaacaggaaatgtgaatcagcatttcaactgatgaaaatctacccccatcaaaaaaagcaggaaaaaattgacacaatgctccaagtgaaattaaacatcctcaaaccaatgtttggagatttgaaaaataaaattaagaaatattctgaaacaaatacaaagaacaaaaagcattaagaaatgaacacaaagtagattaaacagaaaaatagaagataaaatcataaccaataatgaagttttaacattcccacatttcaaattcaaatttaataaaaagtcttgaagaaaagcaggaaaacaggataattgagatgagatttttgttttgaaaattgaccaagttgaaatgggagatggatccaaagtctactgtatataattggtgtccttcaagaagagaaaatatttaaaactataatccaagaaaactttctggaagtgaaaagagatctgaatctataccacagaagttcataccagaaggcacactcaaagatatttcctagtaaagctgtatgactgtaaagatgcaaagaattctcagggtctccaggcaaagacgtgacatagaggcaagagaattagaccagtgtcagatttctcaaaagcaacataacaaagcaagacagtggagcagcatgaggaaagtgactgctagccaaggattttatatccagctaactgttgtccaggtattagggctgcagaacaacagtttgaacatgcaggaactcagggaatactgtactcgtttacccctcctgaggacactcgaaaaggatgactttcatctaaaagatatttgggacatttcctacaaaaagactgtgacaataagtatttcagatatctttttgaactaagattaaaaccaatagtagggacctagagaatagtacataaacattatacattctgacaaagcagaaagaatgcaactaaaatataatgggatggaaaataaaaggaaaaactaaggccatgtgtggtggctcacacctgtaatcccagcactttgggaggcttaggtgggtggattacttgagcccaggacttctagaccagcctgggcaacatagtgagacccagtctctacaaaaaaaaaaaaaaaagtgtttaattagccaggcatggtggctcatgcctgtagtcccaactactcaggaggctgaagtaggaggatcatttgagcccaggaggtcaaggctgcagagagctgtgtttgcctaactgcactccagcctgggcaacagaatgagaccctgtctagaactgttctttttcagaactagaataagaataattactgtaattgaagtaatatgagggagtcagaggctaccatctaaaactgaaagaccaaatagaaaagattaggtaagaaaaaaaatacagtgtactgtaaaagctattaatataaaggtaagcgtgacgaagactttccaaaatactgagagaaatttttaaagggacaaagaaaaccatgatggaacagaaaaaaaagtatacagtacataatgcataccctaatgataaaatatgtggagaattgagagcaaacataaaggccaggacaaatatgtaccaggcaaatagaaacccc

SEQ ID NO: 69 - DNA, 3961 bp, Homo sapiens
gctagagtagggtctggagagagctcccactgtggcgagtcctgtcgttggattcccgcggcgccccgtaaggctccgccccggcggtgctaccaaaccctgttcgattttagaatcgtacattcccagagggaatcctagacccctcattttacagttgaggaaacaggcccaagtagcatgacttgttcgcgccgctagtcgaaggagcagcagccccgatcccttgactctggggcactgctttccctttagctcatttttggaggaaatgggtgcgcccttgctcgacctttggtgattgccgccacaggccttcccgccggctaactcagcgtgcccaagtcccgtgacttagtgccaggacggtgctgtgacccgttatcccctgtcgggttttacctccccccgggagagctcagccctggatcccggcgggcggcggagcctctctggagcccggacgggacagcccaccagggtctgcttctgtgaggggccgaggcgtcattccgcgaagccttctccttgctgttgccatgtgaagaaggatgtgtttgcttccccttctgccatgattgaaaagaagcataagctgcaataaaaatttggtttcaagataacaaagtcagtccccaaaaatcagtattgagagtcactgacattaaatgatgaagatacgaggatggtgtggggacctttactcttcgaagatgagctatacatgcccctgaaaaggctgtctgaagacaggggaaggctggagatggcaactttggcctctgccaagtactcgtgctattttctgtatgtgatactatctgttttgtaactcagaggcaacaccacatacctagcataaggcttgaactccctttggggttatcaattacttacatagccttcctctaagggaaggcttgcaagtggttcatattcgacccttccatgtgataagcattcatgtgggcttcacaatgtaacagaggtacacagagattcttgtaaacagaaaattttataaaactgttaactgatctcactttgaagaagtcttactgactagatgtcatttatcagagtagacaggcttaaaatgcattgcttgtactagactgttgtaatgcatttttttgtttttgcattggtttttaattcatttaattggtttacactcatttttttttttacattccatttttgcatttgtatgccagttaaaaattatgaaatggcacattgtgggattttgtttagctaaattctagaaaaattgaaagataccttttattcgacttaagcctgaggttattcagcacggtgatctctgcatttttgaaaggttgtctcgtcgtttaataaacgtaaataacttaagcacattggaagagctattaaatgagagcaggagattaaaaagacatgatttcttactttatccacctgacaggatagcttgcattggtgattaaccttgcattgttaaattcatttcctaaatatttaggtaagtagttggtttgatcattatttgtaaagtattagtagttgcatgttgaattatcatgttaagatttttagtttgttgttcatgtgatatgaaagataacaattcctaaaactgaatgcatgcatggcttattcagctcaggtcacatacaaagagaaatgtgacgctgcaataaacatagcagagctatctgggtttgaagcaaaaaggctatgacgttaggtatatgcactttacattgtatgtatctttttagttctagtgaactcatctggaatcatgttacagaaaatgattctccaggtccaaacacatttaagtttaatgactgggactactctaacaattgcggctatctcattttgtctcattggttcattagcatagcacccatttaagaacaactacttctaaacacagtaatatttcagaggctataaaataatagagaaagaaaacttaaaaaatcctttgtttgcagccaagaaaatgtgaggatcagatttgtacttgttttgaacaattggaaactgtcacaattgtttttaagatgtaataaatgtatataaaatatgggattctatagtattagccattttgatatcttttgttgaaagaaaaaaccaaaaaaccccatatgttctaagtctcagaaatcaaagaattccacaattttcatttccactaaaatatttatttaatggatatcttacagaaataaataaaaacagtttttgtctaatacagataggtttttttatatatatgtaatttgattttacaaaattgaagcatatcaaattgttttctctaaaacatagctcagaaaggaatagtagaaaacaaacacaaagaaatactgaaatagtctcatttttaaattataagcatgggccttctgaatctcagcatgacatgttattagtaaaagaatgtaagatatggagtcaggggacctgggctccactgtttacttgctacatgtcctaagaaagtttcaatatatctgaacttcagttctctacctttaaaacagtaaagatattaattatatcaacttcacaagattgttgggtaaattaaacacgtaaatgtacatgaaagctctttttaatatgtgaagagctataaaaataacagtttgatttaatttcatataaaagaatcaatggatacctccttttaactgaagaataagcaccaaaagcatgtgtgtgttttcttcagttgaattacatcactctataaacctagagtaagaaaatgcaccttaactaagcaccaaagcctctcggacaaatgggatctagggaatggttctatgagttttccaggcagctaactgggagctaataagtcctgagggtcaaagagggtcctttaaaactctgaaggctcaaagaaaaggaagccaaataagaacatttgtattacatcaaatggctaggatgtaacaagctactccttattcagcaatttcaaagtccattaattcctcacagaagaagaaacacttcgttattatcacttgcaacgatttgcttatgtgaacatggcattctcttgttcaaaaggtcaaagactcgtgcttaagggaggaacaactggagtgaaataacaactctaccatgaattcagatatcactggctaaaaagtctagttacacaagaacatgggaaagaaaaagaatccaagacatcagtataataatgattaaaaaaaaaaccctgccatatttccatgttataataaaacaaaatcataaaaactgcaatatttacagatacatcaatcttacaacatataaaaactttaacaataagaaaaattaagagtagggaaagcagataattttaaggtaatcattaatacattaaaaaatctatttggagttaactgtttacactaacaccactttacacataatagaaatatgaatattttcattgtttttgttttcagtagcaagatgcagaagaaacaaataactgtctaacattaacttattgtaaggagttgtattactgcaaaattactaggtgtaaagttatggtataagcctactcaaaaaatgggttaatataattcaccatctacttaaaatattactaacaagatattggtgaatcatgtgctaaagatactgaaggcccttccaaaactgagatctatgtttgttcaatataccaggtcatataaaactagactagtttactttcttattccaactgttttatgagtgatcttatcataagaaaagtacacattacctctcttaattcccttgcatcatcagatatagatactatttgggacaaaaaataaatgttttattaggagtgtaaaattaagaatctttatagatcttttggaaacagtatattgaaaaggactcaataagtactaagccactgtataaccagaacaataaacaaattcattcaactagg

SEQ ID NO: 70 - DNA, 601 bp, Homo sapiens
gggagcaggcgctcacctgagctgactcagaaattggaatgagttgtctgtggatcctgtaaggagcctggacatggtgaagagaatgccttgaccatcaggagacagcttagcttgttgaatcttgatcacttcttctgaccgctttggatcttaaaagaacaagggatgatggtgacttatggtgacaaccaagaacaggcttcagaaagaaagcagctgtgtagctatggccaaattgaacttcttgagtcggtgtcctcgcttgtaaaatggacaattctactgaaggaaattgaaggtcttaccgactccatccaaggaattgacaagagatccccaagaaggttgcatagagcgagttctgggggctggaaattcaacatcaaggcacaagcagatcagcagattcagtgtctgttttctcccccagaataacatcaatagaactcccagtgaaagaacgtcttcctaaggcaattctgaagacaaaaaagcaacataagaacacacttcccaataatgtgaagatctatgactgtactaaataaaaatgttcccttaatgtactgtaaaaaataaagatgtttggctagattta

SEQ ID NO: 71 - DNA, 952 bp, Homo sapiens
acccacagatgtgaatgtcgtgtgatgttggctttccagtgtcttgcatggcgtggtagcagcagaaatgagcttggctgggcaccctctctgggccttggaggcaagcctgggctcctctgaaaatacaggcagcttcctttccctgacttgcctggaggagccaggccctgtggtgcggtctggctctgaggcctgtggtcctgcttgggactggcagtcttaggctgagggaacattttccagagtatagccgagggacagaatgtctcagtaagacgggctcggaggggaagtgttttggaaaggcctctgcttgctctgggaggcgttcaggatgctgaggttttggaaatctatggcggctcttcacaactgctcccagctttgggaggaggaatagacgggtgctcgtttcctcgggttcagtggcaaaggtgaagaccagcactgccgacctgggacctgggcctctcccgggcctggggaggacactggactttgaaggggaatgcagcctagaaggcctggaccctggagtcaggagatgctgctcccatccagtaagccctggctggagctcttctgggcaccaaccctggcataaaaccagtggggcctctgggcctgcactcaacagtgcctctgatggagcaggttcagcttggttgtgacctctgctagaagccctccctggcctccctgtgcactgagctggtggttcctcctttgcgccccaggtacatgctcagatctgtgtaccctacactttgtcctccagcttcgtgtttggatgttcacaactcccatgagaagggcccccgagagctggcacagtgcatgtgtttcctctccagacttctacaaacctggcacataattgtttgctgaaagatggcatgttcctaaaacagaggaagtagaaccgaataaagcgaaatccaacttccca

SEQ ID NO: 72 - DNA, 285 bp, Homo sapiens
caagttaattcactcagtgctccaggcatcaacttcatagaaggaatggaaattctacctgtttcctaaagaactacagaggtgtacaccaaacggagggcaaatgctgttaccactcatcgtgcaagacttttgaggcaatttggacatagacaagtgatgggaaaattgaatcattatatggctcatgacagtgttgaaaactcaaacatccaaggacctgtacctttgctaagtgccatgcatatgttgctgataaagatgcaataaatactcttttgttaa

SEQ ID NO: 73 - DNA, 678 bp, Homo sapiens
ctaaccaggttaggcataggcagatggggcaaatgtgctgggaaggtttctgggaaagggtctctaaattcttaaaaagtgcaagggaaatcttctatctctgtatagaaatgtccaaagaggtgatctaggaatttggcagccaccctggacccagggggaacaaacagaagagctccagctagtgccctaggctgcatgtgcaattccatcactgagctgctaaaacaacagccctagagctgcctcacttgggcttcctgtttggtgagctaacaagcccctttttgttctgaacgtttttattgagctttattttcaaaaaagcagcctgattcatgcacatatctttagaagaaatttaaaacgccctagaaaagaatatcttcagtttaaaatctaagcaatttggaatttacaggaatatattcctcttagttccagttactcaccattaaaaaataatggtcctcaggttcagctcgaagatatttaaaaaccacttgctccatgaacctttccataagatcccagtcttcaatgattccatgtcgtatcggccactggaggaagagacaccagagttgtcaagcctcagttcgcaacaataagagcaacagtttaacagtggcacagaagaaactgtattattaagaataaaggtctccttctcattgc

SEQ ID NO: 74 - DNA, 430 bp, Homo sapiens
caaagctccaagacagacctgtagcagcatggcccaaaaagttcctctgctgccccagtcccatacctgcctgaggtacgggggttcaggctgagtcggctgacctggagtcatctggaagccttgtcagaaatgcagattctgcagtgctgttcccagaggatgagattcagcagaactgggtgttggatattatatgaagagatttgcaagtgttattttacgtaattcgcactttacaaaggaggaaactgcagcgcaggtaccaaggttgccccatctcggtccaggcctgctcccggcgagccactcgcccttgaccacgcctcctctctcctgattggctgtcaggcatgagtcgacagagaaagatgaccactgccctcaccccactaaagaagccccagcacttagcaagcacttatggccc

SEQ ID NO: 75 - DNA, 2646 bp, Homo sapiens
gcaggggagacaatagcgaacatgctgtgtgggctcagccgggagacccctggagaggcggacgatgggccctactccaaaggaggcaaggacgcaggaggggccgacgtttccctggcgtgccgcagacagagcattccagaggagttccgagggatcactgtggtggagctgatcaagaaagaaggcagcacgctgggcctgactatctcaggtggcaccgacaaggatggaaagcccagggtctccaacctgagacctgggggacttgcagccaggagtgatctgctgaacattggtgactatattcggtctgtgaacgggatccacctgaccaggctccgccacgatgagatcatcaccctgctcaagaatgtgggcgagcgcgtggtgctggaggtggagtatgagctgcccccgcccgctcctgagaataaccccaggatcatttcaaagacagtggacgtctccctctacaaggagggcaatagctttggctttgtccttagaggaggtgcccatgaagatgggcacaagtcccgcccgcttgtcctgacctacgtgcggcccggtggccctgccgacagggagggctccctgaaggtgggcgacaggctgctcagtgtcgatggaatcccgctgcacggggccagccatgccaccgccctggccaccctgcggcagtgcagccacgaggcactctttcaggtggagtatgatgtggccacccctgacacggtggctaatgcttcgggacccttgatggtggaaatagtcaagacgccagggtctgccctggggatctcgctcaccaccacctccctccggaacaagtcagtcattaccatcgaccgcatcaagccagccagcgtggtggacaggagcggagccctgcaccctggagaccacatcctgtccatcgatggcaccagcatggaacactgctcgctgcttgaggccaccaagctcctggccagcatttcagagaaggtgcggctggagatcctgcctgtgccccagagtcagcggccactgaggcctcagaggcaggtggtgaaagtgcagaggagtgagcagctgcaccgctgggacccctgcgtgccctcctgccacagcccccggcccggccactgcaggatgcccacctgggccacacctgctggccaggaccaaagccgatccttgtcttcaactcccttttcctcgccgaccttgaaccacgccttttcctgcaacaaccccagcacccttccccgtggatcccagcccatgagtcctcgaactacaatggggcggaggaggcagcgaagaagggaacacaagagctcgttgtcgctagcctccagcacggtggggccgggcgggcagattgtgcacacggagaccacggaggtcgtgctctgtggagaccccctcagcggctttggcctccagctccagggcggcatcttcgccaccgagaccctgtcctccccacccctcgtgtgcttcatcgagcctgacagtccggctgagaggtgtgggctgctgcaggtgggggaccgtgtcctgtccatcaatggcattgccaccgaggacgggactatggaggaagccaaccagctcctgcgggacgccgcactggcccacaaggtcgtgctggaggtggagttcgatgtggcggagtccgtcatcccaagcagtggcaccttccacgtgaagctgcccaagaagcgcagcgtggagctgggcatcaccatcagctcggccagcaggaaacgaggggagcccttgatcatctccgacatcaagaaaggcagcgtggcacacaggacgggcaccctggagccaggcgacaagctactggccattgacaatatccgcctggacaactgccccatggaggacgccgtgcaaatcctgcggcagtgcgaggacctggtgaagctgaagatccggaaggacgaggacaactctgatgagctggagaccacaggtgccgtcagttacacagtggagctgaagcgctacgggggtcccctgggcatcaccatttcgggcacggaggaaccttttgaccccattgtcatctcaggcctcaccaagcgtggcctggctgagaggactggtgccatccacgtgggggaccgcattctggccatcaacaacgttagcctcaagggccggccgctgagcgaggccatccacctcctgcaggtggctggagagaccgtcacactgaagatcaagaagcaactagaccgtcccctcctaccccgcaagtcgggcagcctcagtgagaccagtgatgctgatgaggacccagcagatgccctgaaaggaggcctgccagcagcccgcttctcgccggctgtgcccagtgtggacagtgctgtggagtcttgggacagctcggccaccgagggtggctttgggggcccagggtcctatacaccacaggcagcagcccggggcacgaccccccaggagcggaggcctggctggctgaggggcagccccccacccaccgagccccggaggacgagctataccccaaccccagctgacgagagctttccagaggaggaggaggaggatgattgggagccgccaacgaggcatcctgtgtcaccgctctccaccccgtctcatctgcccctgttctaa

SEQ ID NO: 76 - DNA, 2424 bp, Homo sapiens
acttccgcctccagcctccgggccgaagctttggcctatggtgcggggaggtagtagtttcttccgcgagggtgcgggagggccccggggcgcccttgggaaccgggctggaggcagagacaggcccggaggaccaggcggacgtaaggatcaggcctctggacgcaactgcggagccggaacagaccaggagggcgcggttgggcgggtacagccaggaagtgctcgtcgcgagcgcggcccgcggttcggtcacagcgagaagcccgcgggtgctgggagtgctcggtcttctctcgatctctgcagggagtcactggccccgttcctttttatctgtctgaacatcacgccgaacttttaacagttgattccactgcattttcaatgtggtattttttttttctgtaaatgttcatctatttttcgcttcaaatatgcgtttctgttacttttctaatgtaccgtaggagccaagaccacctatactacgttgcaaaatagcactgataccaggggttctcccaaggttcattcagaaatgtcacatgattccagtaacaatacgaaaaggttttttttttggaaccaggcatattgatcctggagttcacatggaggaacaaatgtctcataacgcagacgacgcggacaaacaaaagcgcaatgcccgacagatgcgaaaacagcctctgtcattaaaactgtgtgctagtgacacatgaacaggaaacaaatggaatatccagacatcaacccagtaacatggaaatttggttcataaacataatttcagagcggtggaacaaacatgcagtttataatgaaaggtgctaagacaaatggttagccgtctgagaaatgatgaaattaattctggatctcacagggataaactccaaacggatcaggagtctaaatgtgaaaaacaaaacaaaaccacatgtgaagtgttcacgtgatttcgtggctgattaagaaacaagatgtgcccaggaggtggcggtggcgcacaagctttgacaggttggagggtgagggagtctcacgcaccatgagattacccacaggcttcgaattgggggtcactactcagaaaagagaaaaaaatgagcgtgggcggggggcgcgcagagaactcccagagaagaaggagatcagacagggggagggctgacgtgactagatcacgtttctcagcagcctgacaggtgtctgagtcacaaagctctgaagggcagcaacggcttgcagtctttagagccccaggatttatcttatctatggctagcagagattggacacaatttcacgaagtatacaaagcaaccacatgctaaatggttcaacactatgagtgtttgggatgtgttttatttattatttattaattttgatacggagtctccctctgtcgtccaggctggagtgcagtggcacgatcttggctcactgcaacctccgcctcccaggttccagctattctcctgcctcagcctcccaagtagctgggattacaggtgcccaccttgtaatttttagtagagacggagtttcaccatgttggccaggctggtctcaaacttctcacttcaggtgatccacccgcctcggcctcccaaagtggtgggattacagacgtgagccactgcagccaccgtgcctgcccttgggatatgtttttttttcttttaattttgttttgttttgtttttttgagacgaagtcttgctctgtcgaccaggctggagtgcaggggcacaatcttggctcaccgcaacctccgcctcccaggttcaagcgattctcctgcctcagcctccagagtagctgggattacaggcacgtgccaccaagcccagctaatttttgtatttttagtagagatggggtttcaccatgttagccaggatggtatctatctcttgacctcgtgatcctcctgcctcagcctcccagactgctgagattacaggcgtgagccaccgcacggatatgttttaagtaactgaatgtattaaaatttgactttggcaccagcaggctattgtgaataatgttgctttgagcatcgtgtgcaaaaatatcctggacccttgttctcagcacttttggatatatatgcaaaagtggaatggctgggtcacatgataattctgtctgatgttttgagaaaccactgtcctgttttccagagctgctgcaccattttgtattcccatgagcaggtgcacaaggttccaactttaccacatccagccaacagttacctcctatttaatggctaagagccatcaccaccggggtaatgtgatctcactgtggcttttgttttcatttccctaatgtttagttatgttgatcatcttttcatgttcttattggccatctgttatcttctttattataagtccttttctgaat

SEQ ID NO: 77 - DNA, 716 bp, Homo sapiens
tcagtggtgacattagcgaagaatgacagcatgtctctaacaaagatgtgaaaactgaggcttttcaaagtcacacagttagcaaaatgtggagccggaattcaaatacaggtttccgtggcttgagatcccagcttttcaccattaaacagtgtcaccttcagaaatggcctttatgcctcctggtctcaacatagagcagaaaggaccatctggacaccacatatgaggaaatcagacatctctaggttgaatcatgcccaaaaggacaatttcttgtcagataagctgctgtgtactaagtctgataactaacaaaattgctatatggtaattttaactggaaattgtccacttttatcctccggttttctctcttattccattggtaaccaccctgggagttctaataccatgtccatgtacaagtgcttaaatcaaccctcaggttgtgacagtcaagctacagtggctgtgaaataatctgcacagcagagtatgctatgtcattggctcaatcagcataatgcagcataatagaatagaagcacacaattatataatgccataatttgatttctctctaatttctggacacatcacaaaataatcaaggcagtgaaatgaagtgtaaagaataatggctgagtttggagtcacatcactgccacttgctagcctgtgtgaccttaaacaaataaaaaactctttcttga

SEQ ID NO: 78 - DNA, 315 bp, Homo sapiens
tgttacaggagaggggtcctgatccagaccccaagagagggttcttggatttggatcctgtgcaagaaagaattcaggtgacttagaatgcctgaccatgtgggaatgcagcccagtaggactcagtctcattttacccagcccctgttcaagatggagtcgctctggttcacacgcctcagacacagcctctgcctcccgcctcagcctcctaagcagctgggactacagtgcatacctgattttctcgacctcttttatgaaatatccccgccagactccctcgaccgtgccacccccaggttcccgtgcata

SEQ ID NO: 79 - DNA, 1966 bp, Homo sapiens
agcagctgcccctgcaaatgtcagcgccagcccagtcaaaagagcttgaaacctaccaagccggaggactgtgctgtgcctctctcgcccacattttccccaagcactctcaggaacctggcaacagtgtccccttgtggccaagcctggaacatcacatctgtacgttgcaatctgtggatcagctacgagactgagagaaaggaatgaaaggatggaagaattacaagatcaggcactgctgtctgtctgttccacggatgtaaccacagcacacgcgtggctcacggtactagtgtgataaatgcttgttacatgaaggcgtgaacagggatgagaagagacttcctggagaaacaaaaggactaacaatcaggaaggggaggtgatcggggcaggagtaaagtggacacctcagcaaagccattcgctgtgatctctgattgtgcagtgtcatgtcctgtcaccagagccccctcgtgtttgatgttggccaatgccgccagcatgatctagcaggccaaatcctaatctaccattctctgacaccagctggtcccctgggtcgtccacccgatgtcccccattctccccacttggcctcccccacaggctctcggcaaaggaccgtgggaggcacctgtgacactgcccttttcctgtgcagctgtttttcttcttcattcttttcactcctcgttactcttttttttttcactctcagcccacacaaaactaggaactttgttattctacttatttttctgtactctgtctgtttgcacacagatggatatctgagagccagcgaactttctttacctcctagtatcatttcatgaaaattagtagcacctgcacaatggggccttggagacaggaataaaaggaaaaatctggaatggaatcacatgacgcaacaggctatgaagactccctgcccggctgctatatgtctggtaaacagaataaatagtacttgagcatccctgactctgagactgtggggtagctggttgttttaagatgggaccagggtattgtgcacttattgccaattcttgcttcagtaagtggggtggctgtgcagagtgagtggcctgtgtatgaaccagggtccgtcccatctaatgagagtccggtcaggctgagtcctcaccaagacttcagcgtggattcatcagtaaccttggttcactggcaggcttgctggactttggagaaaaggctgaccctcccccaaagcagcccattgctgccactgccctaggaacagagggcctggagccagggcttgacctggtacaggagcttttgcacaaggccggctcaaacctccaaacctggggaaacaggatgcatggtgaagtgaagaagaaagaaaatgcatccaccgttccttcctgttggtgtcagcacgatgaggaataattacctggatctggaaagcaggcgtgtgggaggctgcaggcccccctgatctgtgtagttaggcacttaatttttcatcctcctccttctctctgccctcccgaaaccgccgttttcaaaggaaaaacagaaaaacgtatctgggtaacccgtgtaatactgtttacatcagcccacttggcccagaaaggataccagctccttactgatgctcagataacagggttagtgcttaaaaaaattatgccttgggccgggtgcggtggctcacgcctataatcccagcactttgggaggctgaggtgggtggatcacaaggtcaagagatcaagaccatcctggccaaccaacatagtgaacctgtctctactaaaaatacaaaaagtagctgggcgtagtggcgcatgcctgtagtcccagctgctcgggaggctgaggcaggagagtcgtttaggcctggcaggcggaggttgcagtgagctgagattgcgccacactgcactccagcccaggcggtggagtgagtctccatctc

SEQ ID NO: 80 - DNA, 2822 bp, Homo sapiens
gtttttgtgcaggaacagcccctcccgtctttgtcctggcggtgagcacccagggctaagcttttgaacactttctttgtgtttggattcagcccaggcaatgcatatttgctttcatttcttcttgagcttgaggagctcctgggtgcaaatcttggaaaatgaggatctctgagcctttccaggccagctctttgttttgtagcagacaattgaggctttgaaaaggaaagtgggtgggggcaccccacaggtggccctcatcacccaattgccagtgcctgcaggctgcttcagcagaggcccagagtcaaagaggacttaaaaccagctgtcgtttctcccttagcttctgtgtatgagagaaacgacttctgtttttcaaagtaagaacaaggaggaatttgtttctaaaagaacattaaaacacaggctcgtggtctaaaagcaaatggttcagcaggatgttcagggccttaaagcacagtcagcaggactcagcatctcccagcacctgctctccggttgtcatggtaacatcatccccaacccaaccaccttgtccagccgagagacagcaatcataaggagggacctcggtttcccccgaggatcctgggcttcctttctgaaacgcttgcttctgagctcagcaaccaggaacaccaggccagcccatccccagcacctctgtggagatgagggacaaagtcctacagtccctcttcctgttctgatgagaaagggagggaagaaaacataccccgagcgcctgcaatatggtcatgacactttcaaaaagcctgtgctatggagtcatgatcagaaaccagagtgtggagagggtcagcagcctgcctcagagcagccagctaggcggggagtggtaaatttgggacttgtacccaggcatgactggctccgagcccagtgctccactctatggaatgttccctgggcctcagttgctttcctttcctttgcaggccgcgggctgctgccactctggcagctggtgagttagctggagggcaacattccaaagcaggggcagcatgctgctttcctcctgtgcccactcctgcggggaagtccgttgactcccaccgctgaagggagctggcaacaccaggatgaggtcccaggggacgggagcaggtacccactgtctgtctaccttcccactggaaaagcacggacaggccagcccttgcgggggcaggcagaggacagagttggctttgcgcggtctctgcctgctgagcagttccaattcctctcatgggagaaacaaggaggcagtcgcttgtgcatgttccagaagttttactggggaggaggaagcggacagaggaagctgtgtgtgcatgtgaaggggtgggcagggtgggagggatgcacgcgtatgtgagcatagcatgtgtgagtactacacacatctccatgcagaagcacaactgggcagccctggcttccagctctgggcttcagcacaacagacaccagcctgtggtctctcagaagccagggagaccacatcgggctcaggacgttttacccaaagtccagagtttttatgcctctccctggcattctccataaagaagggaaggtcagatgaccccttagatctgtgtcatctgggaatttccttgggctggtttagacacgatgccctctttttctcaggatagcagataacctgctttgaaagagggcttaattctgtgggtcctaaattttctcctttctctctctctttctgtgtgtgtgtgttgggaaaatggcaagtttccaataccagctttggaggaacgattacgttttccctccaatttcaagtccgaaagaccagagccctcattccaaagccccccacccagatggattttttcgtttcatttgtcatccgtcccatgggagggccccatgtctcctcagaacccatcctggaggcagcaggtcgggtagagtgagtttggcctgctcatgacctccacccctgagattgtgaacaaggatgtctggggcgatgctgagaatgtttttgaagctgctcccagatgacgctgatgatcacaccagattgagtgctgcgatcgccttgagtccaacctctgcataaacgaggttctcataaacaagttcactctaccctaagctaagtctatgtgagcaaacccacttcatcctttgtacctggagacctggttacactaacctgatactgacctgttcatgtagctggaatggtgtgtttcatgcagtgtggaccaagcaatggcatggggtgtgtgtgtgtgtgtgtgtgtgtctgtgtgtgtgtgtttgtgtatgcgttcacacttgtgtgtgtatatgtgcatgtagatgctgcataaatgatttttgatgtcaaagacaaacacattccattgttttaaatattctattatgtaaacaatacgcagagggaccatatctactcttgtcatattatttgtgatggtaaaacatgcatttgcaataaattaagctttctgggaaggcaagcagtattggagccaaacgactgtctcggaacatgtgtgtgttatctcggttcatatcaagtccaaagctaatggagccttccccgccatccagggaggaacaccaggaccccggagtttcttcttagtgctatattttaaagttgcattgacgttttcctccccttccttttgtgcaagttggaagtagcagtgttctaaaagatggtttgacgtttttgctgttgttttatgtttttaaaaatgtatctgctttgtgtttggaaataaaaatctctattttggtctatg

SEQ ID NO: 81 - DNA, 237 bp, Homo sapiens
gagggggagcaggcctgcagccccagaagcacccagagggcctgtgggtagatttgaataaaggtggtccatgggagtggcttcccagggagaaggcaagccccagaactggacagggaagaaagcaaaccatgttggactcgcaatcagtgatgatctagagcagaggtcatcaaaatacaggccacaggcctggcctgtcaccagttttttgtaaataaagttttattgaaacat

SEQ ID NO: 82 - DNA, 725 bp, Homo sapiens
tgggctgccaggcagttaggcctatggagagctgctgtcagtctctctaggaggccatggtttcctgcatgtgggggagagccccatcccccagactctggagtgagtttaatttcccaaggcaagtctgcctgattgtcctctcctttccttaccttcagcaccaagaagtttccggtcccggtacagatcagtgaggaagaggctattgacaagtgtggatttgcccaggccagactctcctgagaggagagaggacagaggcaccaaatcagaagggacccttctctgggctgtctgatagtctgcagagacacagctgcttccgtgctctaggagagagggactccttggagatctgatctcactagtagtcgtaattctttggatgggctcagtttgtactgcttcatcctttggagaaggctccagaccctcctttactctcccgagattctagaaattctcaggactcatccagagaaggaatcagccagaagatcctatgaagacaagatcaaaccaaacacgctgtgttcgccccagttttaataagaaatctgactgaaaacaaatggttgaatgtgctgctaacagagagggccaaacgatgatgtctattgtggcagctgaacaaagtgagacttacagaactggaactgctgccctgacagcaactgaagcagaaagagaagaaaggagcttacaaccaggacactcaaact

SEQ ID NO: 83 - DNA, 2469 bp, Homo sapiens
gtagaccttaggcgagggaaggcatgtactttccctaagaagcgggaggagagaaataaatagagggcagtgggatgagaagaacctcgcgggatgggaagccgcggagggaagggccgtctttggttacctggagagcgggagcagctgcggatcccttatgaagtgcccggatgaagctccagcgctcacgcgctttccgcattgagtgcagcgccatcttgagaagggcggagccgtcttgtttggaatgacgtctgttcagagagccaatcccagtctcgcgactcctgcttgctgggcgcggcttgggcctccaggctgcgcagcgcagccgctatcgggcggactgcagttcttgccgagcaggggagcaggagagtcagtctaagaaggaaatgtgatgatggaaacagaggttggaagatggaagaggacccagagtcaaggaatgcaggtagaaaagaaaagcctggattctcccctaaagcctccagatggaacacagccctgcctccaccttgatttcaggacttcttaccccaagaatctcacccgggaggaaccatctatcatcctgccttgaaggtagtttctgctggatctggtcagacctttgtatgatggattttggaaacccagtggaaggatgttcgctcattgcccccatttgccactataggactatgcgcctcccttttatttactcaatttgcttttatcctgatctattatgttgttgtagacccagttccagttgttacaatactgggttatcagttctaaggccctggcaagggtggtgtggaacaggtcccacataactgcccatgtcgagagctctaagcctaaattgggagggacaccagggacaagactcctgggttcatagcctaggggcctaaggtcgcagcatagagcttccttagatccctttggagatactaatacttgggagaggaagtgaaagtctgaagcattagtatctaggaggcagggatcagaggaagtagattcagaggtaaggagaattttggggctacactttcaagaaagttgtggtcaggacccaggaggtatgggtcagaaggaaaggtagaggcacacgcacgggtgactgttgagtagggacttctggctgcgccatgatctcaaccggctaatgccgagagtttgggatgacagctttctgcctctagtcggcccccggcttccccagggaaattgaaagtggaagctggttccaggtagaccagcgcttccaacccagaagcgttgggggttgttagaaagccattccccagacagcctcacacttgagtcttaagtctggtggccgccctatcgtttttaaccgtccgacaggtgcctggtattttcctccaattctaaggaagggtagaacagaatagcaagcgaaagcgctttggaggtcccttcatgattgccaaaatgttaccagggagtccttgttcttagagctccaaagatgatggtgggccgcttccatgatggcggcaagcctcttgttctctgacctggggttcctggcctcacggatactaaggaatggaatcttgggccatgcattgagtgttatagctctattcagcccaattaggatgaaccccaggcacttagcccgcgcaggaacaatggcaagcctctagcccgattgggagcagcaatggacactgcctcgctggatcacaagtgcagcagatccacccctgccagatccagagggttggaagtcagctgcgggtctgcaatgacggcaaacagtggtggacggcgagtgaaagctcagctcgagccataaaaaacacagaccagaagagtgtgcagttgcaagatttaatagagtgaaaacagagctcccataaaatgggaggggacacaaagggggttgcccttcattctgtttttcataaggactgtactaatttacactcccaccaacagtgaataagggttccattttttgcacgtccttgccaacacatcttatcttctgtgtttttgatagtagtcattctaataggcatgaagtgatatctcattgtggttttaatttgcatttccctgatgatttgtgatgttgaatatttttttcatatacctactagccatttgtatgtcttcatttgagaaattctattcaagtcgtctgaccagtttttaattaggttatttgctttcttactattgagttgtttcaattccttatatattttggatattaaccccttgtcagatgtttggtttgcaaatatattttctcattctgcaggttgtctccttactctgttcattatttttgtagttatgcagaagctttgtagtttgatgtaatcccagttgtccaattttgcttttgttgcttgtcatttggggacatacccataattgatcttagccaaaaggctgagaagtgatttgggtcatattaaaaaatatcattgccaa

SEQ ID NO: 84 - DNA, 573 bp, Homo sapiens
ggctatgaaagaagtcacaggaggatttttgcagagcttccatccagttcagaaacaaagcaattcaatacatgtcttcaagatttctaaaggcaatgacttagtgttgaaaagctaattcacagctccccagctgcctacttgtggggacagctttcttcggctgcaggcagtaattgctttactgctatcctaaattgccctggagaagaaagcaaagctttgcttgctttatcctgtggatttaaagcagtgcctatacttgctctgcatagaagagaacttctcctacagatatttttattctaatccacgcaacacattccagttgaaacaagattttgaagacacgccctagtgtacattttatctgcactggcctcatgaggaaaatcaaataagattatcttacattacaaaattttcttgcatactttatgcaacagtggaaacaacacaggattggaattagaagacctggttttaaataccaaattgttccccagaatgatctgatcctactgcttagcctatctggatgtcagtttctacatctctaaaaggaaggtgtgc

SEQ ID NO: 85 - DNA, 516 bp, Homo sapiens
gtgcatatgcacagaaagttctagaagaacccaggaggcagtgtgagcctgagaagcaaaaccacaaagagaacagagggaaactcacggacaatggtgggagaagcagagccagtgtgcacagagcagtaaagggcagaaccaggagccgacaagagtctcgaagcctcaggcggggcgccagggaggtctgcagctgacagtgaggggatcagtgccacccaggtcctctatgggattcctgaattgttgtggagactggagcagctgggatccctcgctctcatgttttcagttctctgtggggcttgaaggtgtggctgccgtgtggaaatggactcaggtcattgactaacaacatcaacaatgaaatgaatctgagaaaacaggaaattgagagcaagagaaaaaaaagttaattatactgattttgtataagacccctttgaacacatttttaaaaaatcaaatagaaggtgcccaggtccactgtgccttgtgaatatttgtcttgta

SEQ ID NO: 86 - DNA, 1094 bp, Homo sapiens
gcggcggggaggggcggctagccgcgacggcggcggacggagggggagggccgcgagccttcggaaccagcctcgagggtgctgaaccccgcgcgcccgcctcgccgcggcccccgggtgggggcgtccacggcccgggttcccggcgggcttggggcagggacgcagtccggagattccgggactgcccggctgctgcagcccgcaggctcctctctcctccccgcttcccctccgcactgcctgggctaaaggcggccaagctgaggctccgaaagaaaagggaaaattgcaacccttgcctacaaccagactgacagcataatttcttaggaatcaagaatcaatacagggttatttctttagattaaaccttaaaagcccccttggaggctgaagaagcagaggatagccatgcatacacttgaacgtgaaaaatggtcctctttcattggagaggtcttcctcttcagctaaaccgacagagtggtgaaaagaagaagggaccccttgttgaccaaaataatccagacaaatcaaatcggccctttccagcaaggagtggaacagcccaagggtggctagatcacatcttctgctcacaccaccactgagcaaccctctccaggactgccacctatgcataggtcatgccctgtgcaagagcacataaagtgggagctgaagtcctgcccaggctccattcaccaagcagagcttatgttgttgtgtgtctgtgtctacccagaggatgtgggtcctttttaaaatgtgcaccaatgcatcttgtatgagctggcaccagctcggaccatcccaccctcataccctggtcctatccagggttatattccctactttagaagaattaattatttttatgaacgtatttagtttattgtaaaaaatgaaatatatgacacaaattgaaattaatttcagaggtaaaggtcagaatattaccatgtatgtgaattatgtttgtatgtatatgtatatatcaagagagttatatgaatatacatttttgtgtatcagaagtgaggacaatttaactttgttaagtgtttgaaataaaattattttgagttttg

SEQ ID NO: 87 - DNA, 1651 bp, Homo sapiens
tgggaatcttgtctgaacaacaagttaactgctgttcccagttatatctggtctttcccacccccaaacatacacaaaagatttttgtcattcttggcactggacaacagaagtgataagacatgccagcagaactctaaaggcagaatgtccttccacctgttttatgctgtaagacaaacttccaagtgcgaggcagtgtggagggctgttgccttgaatggcagctgaatgcaccagcgggatccttggcagcaatgcccaggcactgaagtcgggcattcaggagagctaaatggagaaaagaaacttgagcaaactgcttcctggaacactgagaacctgaatgggaaattaagaagaaccagattctttctattcttccaccagccaagagacccattacaacttgcttatcgttgggtagaggttatatccagggaagagggaaccgaggagaagtggaggaaaggaggaaggcatgagatgttggccctaacctagattgttccagagactggaagttcaagaccaaggtatagcagagctggtgtctggtgagggctctcctcgtaggtggcagacagctgccttctcactgtgtgctcacctggcctttcctctgtgttcctcagattttgaagatttgttttgaatcttgaagagagagcagcaagccttttggcctatggattctaagagtcacattccaacaggtgatatcaaaaggacaaggaagcagggaggggtgacttgcacggaaggtgcccagtgagatgtctctgccatggagattgtgctgatgccacaagcaaagcgtttgtacccctctcatccacaagagaagtccctccgggtatttcagatgatacctgaaaggatgataaggcagggaatcagaggctgacaccgctattggatggactgggggagtgaagaccaaaaggtcattttcaggaaaaaaataaattaggaagtacagggataagacagaagccaccaccaataactccacacctacagctccaaagcatgtgattcagaaggatccttgttgatattggccatcaccttgtgtcacaataccagtggccgcagagatttaaataaatgcatcccagatacagagttaaaagcatgccaacaatgagggctgtgtggtttggagaagagcagaagagcacactgctttcagtcaggcagaggcagattagattgcctgccacctccagtgggatggtggctccggacagtcactcaccttctctaaaacccacctccacctagtctataaaatgcagagaacgaacaatgcctactccactgaattgtatgagcattagaaagggtgtgtgcaaatcacctgacatttggcagaattcattacatgccagctgttattgaaagtaattgaaatgttgtcaagctagtcagaggaagatttctaactaaaagctatactagcgaaagcactgagaatagagtgtgatatctcctattaaaaaacacatacgtatacataatacatgtatgtaaatactcaatatttttatagatagttgtctaatgagatcattaaaatatatacatatacataataaagttgaaaagttttctcaataaataaaatatatacatatacacaataaag

SEQ ID NO: 88 - DNA, 654 bp, Homo sapiens
attccaagggagagaagaaagcaaccccaggaagcctggccccgaagactgtgaggtatggtggggccttgctgtgctctggactggacaagaggcaccctgggctctggacacagccagatcttcagccaattgcatctccggcccagggcaggccctttatcttatagcccagtggtgcctctctcctcacctaggaaacaaagccaacaggatctgcaccacctctgcctcccggacattggaaggactaaataagatcagagacctcattcctagatggaacgaggaatggtagcgaccacgatcctcccctcccaggatctgcgccacaagggaagatcagaaccttcagctgccagaagcactgtggcggaaatgtaggtccccatccaggctgatctgagcttggctttctggagcacgcaaacctcgatgcactgaactgctgccggacctcaccttgccaggcccactgtgctcacactcacacatcgctccatccactggaggctgcagaggcaagatccaccaagaagatggtcttcctgtccaggatgcccttccctgagagaagtgtatttaatcttaaattcagatgtttgtttgtctacccacttaaaacaccctgttgaataaaaattactcaaggaa

SEQ ID NO: 89 - DNA, 371 bp, Homo sapiens
gaattgtactgaatttgaaaaacaagcatgaatctttcctataggataggaagcctctgatttataccataaagtgaaatttcatatacaggatgtatcaattaagatttaattcaaaaaagatgaatttaagttaaaaagaaaaacacaggataacttccattcatctgatgttcatatgccctggcacatctattgcttcttataatgtgcttgcttaaaaaaaaaaaacatgagcttttctcagagacactaatataatgaattcatgtacccatcaccaacttctacaattaccaatattcagcctcttccatttacaacctgcccattttctaagaaataattaaagcacatgctacacccataaa

SEQ ID NO: 90 - DNA, 883 bp, Homo sapiens
cttgcaagaaacctcaggacttgagtaacagcaacatgctcaccaagctcctgtatctactggaaaatggaagtccagccttaccaacttgtgaaccttgtctgaagggagccagggcctgccaatggaaccacctccaggagctgcaactgctgttgtcattaataccattgtgtctattttttgagagagataaacttttcatggtgttacattttggaaaaaaaaaaaaaagactaggtgaacagtcaggtaggaaagcagcataacagtcccttaaattctgatcatgtaggacattcttctttgccctgggcctgggaaaatgcagcatgttccagagcaaaagtcctaatgaggggaactaaaccagtgggacccaaaccaatgtcctggctcactgaggacccgttagaaccaaatctctgggtgtggacaggctcccatacttttcaaaaattcccctgatgactaatgaacaaccagaggtaagaaccagtggcccagaggaataaccagcccagctgttgtacgagctcgctaagctggctcaggtcaatgttgaattctctgctaggcagctcctcataagaactggcagagatggttcttacacaacaacaggtgacaactccagactctgccggaagttccaggatctgggttcccggacaatgcatgacactcagtccagcattgcaggtggaagagcgacggtgaaaagaccaaagtcaattaaaatgtgttaaccaaaacaggaaacatgagtgaggtgattgagagtgtgtttaacttagatgtgtgattttatcaatactttcattgttcaaaaactcttattttttaaagatattttcaaaacaaatccaaactttacttttca

SEQ ID NO: 91 - DNA, 766 bp, Homo sapiens
aaaacttaactcaatacatcttggctactttgcctcaacccacggggttccctggaaacatttgttgaacttggccaagaggagattgtatatggatggcacacctggaaaaggggagaaagcacactagttcatctcttttataagtagaatggtcccagggatgttaacctttctgatgctgatagtagatgagtggagtggaggtaatcgtgagaaaacttaaaaacccttaagctgtttggagactacacaccacagtggagcaaaccaaggtggggcctcactgcctcctcagagcccatccctgaccatgtcattggataggatggaagacaaagtctttgaaatggaggctgggctggcaaaagtgatatcccaagtgacacagaaacacagctcctccggatggtgaagtctccgctgcaaaactcacgaaacagcacagaggatgactctagggtgctctcccacttgctccaagttaggcaggtgccctgatggaggcaaggctgagccattaacatgcacagctccatatcctggaagcctctgtagccttgaggagataggctctatccaacaggactcagaataaatgactgccacctcaactgagcagtatgaactgcccacctcaactgggcagtctgacctcttccacagtctttaagaaacagaagagccatttgcattatttaatcaccattcaataatctcctccctccccatagctgcttgagttaactgtcccacaagtgtcctg

SEQ ID NO: 92 - DNA, 2344 bp, Homo sapiens
aaaaggaccttcctcataatcaaaactacattttcaaaataattaagaagtgtttgggagctgtgagaagatcccagaaatcagggaaaatcctttttctcccatcttgttcctaaggaaacccactgccacgagatctgttttccaggccttgaatgcttttattcctcatatctgggttttcttctcttttctccagcctctgcctctgaatgtgaagggaaactggaccagctcagtgtcaagcctacagacatttccttgttcctggggactgagcagtttgaagtttccaaagatgaaaacatctactctgaagagacctgaatggacaagagatgttttcctcttccttaccataataaaagaggactgctcctgaccacaggatatgcctggtccaggaaatggccacatttcccccctcaggacctctacttggatgggctgccttggaaataaggaagctcaaactgaggcagaatcacagcgatttggaaaatggtccaatcagctatagtggaagagcagaatcattgaatataaaacatggagatgtcagcagcaggggctgtgagctgaacagcttcactgggaagaggatatgggtgagaaggtacagcaatgggtacctccattaacaggtaagctggatcctccataggaataggcactagctggttttggatgaaggtgtcgtaagatcagatacacttttgggtgatcagcatgatctgggtatggacatggcagagcaggtggaagggaagggaccaatatgtgtcaataaccatctatgagccaggcacttaccgggaagtataatgtctttgtagttagacagaccagtagtgtctgttgctctggaggaagttacttaaactcaccaagactcagttttctctgtattaaaatgatgacacctacctcactatctggccattgggattaaatatgagaatatgtgtgaaaatttatgtcatatggtaagcactcagatgtttcctggtggaacagcatggtgtggattaggaacatccaaactctgacatcaagctgaacttttgaaatagaggcctccctgctcactagttgggcaaccttgaacaagctagttaaactgtctagagctcagttttgttatctggtgagattaatagcattgaatggtgtaaagcacattctcagtaaatgctcattattatgattatagttattaatgtttatttaactttgaaataataatgtgtaggagctcctcaggtagataatggaaataagaaatttcttaggtcatggaagcatggaggtatggaaaattttggagaacaaagaggagtctggtgaagtagggtggggatactgggcagatgcaaagattgccaagggttatatcataaaggccgggataccagcctggcatcaactgccttagattgggaagatgcaaaactgtggtctggagtcagccctgcagaagcctgtttcctgactttccatcttcaatctcttttctatgcagttaccagagtcatgttttgaaatctcaaatctgagcatctatcctcaaatagaggcctacatggcttccagttcctccaggagaaggtccaaatcccttaagatgactttaaggccctcaagtgttccaggctctgtacgttcttgtgccacaactatgccacaacaaaacagtttttcccccatttctactttgtttttccagctgtagagtcaaagcctcaagaaggggaaagggacgaatggacaccaggtcatgtgccaggtagctgggaaatgaatacttctattttctattcttttttttttttttttttttttgagatggagtctcacactgttgcccgggctggagtgcaatggcgcaatctcagctaactgcaacctctgcctcccaggttcacagattctcctgcctcagcctcccgagtagccgggattacaggtgcgcaccaccacgtctggctaattttttgtattttttagtagagacggggtttccctatgttggccatactggtttcaaactcctgacctcgtgatccgcctgcctcggcctcccaaagtgctgggattacaggtgtgagccaccgcacctggccaaatacttctattttcatctcttaggaaagcatatgatgtaaatcactgttcccatattcaaatttaaataatggcttacctttccggggatgtttgtatttgaatgaagcagcaagtttttgccacactgtaatactttaactttacagatattttgactccttctgtttctgatttgctttcataaatgaataaaaatacattattttacatcaaattc

SEQ ID NO: 93 - DNA, 3342 bp, Homo sapiens
gccatggctcctgaaagaaataaaagatgatcatctttctaaaaagtcttaagtctgaattattagtaacttaactggagaatctcacttttcctactctcgtattttaaccacagttgctctaacacagacctttgaggatcttttcatgacttcattcacaaatacctatttatgctgtacagatgctactaggaaggaaatagggatgtctgttttgactgtggaacttaacttggtctcgtctcttcgtgcatgcaaccctgtccttgggatagctttcttgagcatatctacttatgttcaagaggtaaattgtcctgaaacccccattgctataagtatttattttattactcataatacttaatgctcctaaagttggggtatttttttttttggatacctaaacttcattgagatactttgaactatttatagagaaaacggaaccttctaatacctggcttctatttcttaaaatgttatgatcatacatggcttagggctttatggccaaataacttcactgaacccaggaaaaagaatagatccatctgaaacagacctgtagcttccagaggcctaaattttcggctccatttgtatccttcattttctgtgaggtaaagaagtggaaggagacaagcctcagcccttcccctggcacctttactcttcgcccttcctcctggcatggtggaaagtgcactggaggaggagtgaagggccctaggtttgcatccatattctgccacttgccaaccttaatggcccttacaattgatttaccctcatgaaatttggaatgatttctaaagtctttcctcgccctgaatgttaacattttttgatagtcaggactttctgtagcttcaccttccttatttagtgttatttttttctcaagactgaacagagagggaagctgtcaaagtgtgctgggcacacaccctgcagtggggcaatggccaattctaatctcaagtcattaggctgcagtagcatgaccactgcttcctgtctaccctcagagggtagagacagctgagctcctgtagttggggtcaggcccagccactctgtggggacagtgattagtgttgtgtcaccaattcagggaaggagccaccttgtcttattttccctcttgaattatcttgatatgaccccattataaatttccttttgtaaacctctgtctcccaatttctccttttagcttactttctattgaagtagaggaacagagtacaacttccatcctctttcatcagccctgagagcagaacgcaagcgccgttactgggaactatatccttggctccctggatgtggctattaacttctggcctgccactctatcacatacacatatggagatggtgtcatccatgtaccttaccccgtatttacaacttctatcacccaacagtgccaatggccctgatggtccctctgggagggagagaagagtaagctggagtcaccccttccctgtacttcccacctcgccaggcctgttggtgttagtgtcccttctgatcttggcctgacccctgtgccctgggcactgggctgcaggttggagaggcagcatgatggagtggggataacacatactccaaaaccaaacagaagccagacctgggttgggtcctggcgaaacagtctagaggcttggtgaccttaacctcctaattaatcttcctaagcataagtttccttatcataagttatgtatgataaaattttccttggatgcattcattttagcatgacttgaaattatgtgtgaaggaacctggcccacggaagttgccctgtaaattcagattcactttcccttggacatatggatgacattagctcattacagttatgacctccctaaaactcccaaatattctttaagttcttctcttattttccctttagtttgtagtcatatttcttagttcttatatcagttgggattcccacatcttctagttggacaatattggagaagacaccacattttaactgagttccagtgatatgacaggctttcaattctctaatctcacagaagttagaaaaaaagtagataatcaaaatccacagaaaatatagaagattccattaactctgagaatgattctcaggtatccttaggacctcaagaaagctgttctctcctgggcctgtagagagttcaagtgccaggaatctaccacaaagtagccgggaggtgcagggcagcagggggcacagtgaagtgctgaagggcttctcagtcttctttaattagagtgagaagaaaagagcacctcctcattttagagtacatggtgtgaactcactctcagctgccaagtgagcttcaccttgggctgttttgcatgctttctcctagtgctttaagccaccctgagatgtacagaccaatactggccatcacaaaaatatactcgagtacatagaccattgacactataaagcaagtaaacaatgaagtctacataacagccaaataacaacatgatgataggatcaaatctgcacatatcaatattaaccttgaatgtaaatgagctaaatgcctcaattaataggcagagagtggcaagttggacagagaagcaagacccaactgtatgtcttcaagagacccatctcatatgcagggacaccaatagcctcaaagtaagggatggagaaagatctatcaagcaaatggaaaacaaaaaacagcactctctgtccaacaaaaacagaatatacattcttttcagctgcacatggtacatactcttaaaatcgaccacaattgctttattggccagaaagcaattctcaacaaattcaagaaacctgaaataccggccaggtgtagtggctcacacctgtaatcccaacactttggaaggctgaggtgggcaaatcacttgaggtcaagagtttgagaccagcctggccaacatggcaaaaacccatctcttctaaaaaatataaaaattagccgtgcatggtggcatgcgcctgtaatcccagctacttcggaggttgagtcacgagaattgcttgaacctgggaggaggaggttgcagtgagctgagatcacgccattgcactccagtctggttgacagagtgagactcatctcaaaaaaacaaaaaaaccctgaaataccaaccacactcttggaccacagtgccataaaaataaataccaagaagatctctcaaaaccatataattaagtggaaattaatctactcctgaatgacttgggtaaacaaagagaaattaaggcagaaatcaagaaattgtttacaactaatgaaaacaaagataaaaa

SEQ ID NO: 94 - DNA, 794 bp, Homo sapiens
caatttgaacgacaatggacttcttatcaggagtcatgaagccacatggaagtagcaaacattttcaagtgctgaagaaggggaactcttaacccagaatccttggatatccactggaaacaattcatgaaggacattctcagataaaggaaaactaagagagtttgtcaccagcaaactgaggaagctgaaatatagtggcatgtatagctgatcaggagccagtgaggaaaccccagggacaggtggctgaaaggatttaatagcacagaaattgtatacatcagggtccaggaggtgaaggagatctctttacatgaacagtctacagaaatcttgagtaaggctttggatttccacagtgcattgacctaggcatttaagccaatcatatctaaattcaaatggcaacaaaatatttttaaaaatctttcaaagcaggtgatgctacagtctctgtgcttcacaaatccaagttatcattattggctaccactcctccatatgcacaggcaataagtcaggtattccttccagtaattggggctacaatgtaaacttagcaaagcttccagattaacacatttgtaaaaacaagacttcctaataacctgtcatctgctttcccaatttctctataattttagtctgtagatgacattcttgtggagttttaggtgactgtcatattgcagccatctggcagcctgtttaagaagcacaactctgacattataagatgatgaatcagtggttaaaaacaaaacaaaaggtggttgatgtttattgtaata

SEQ ID NO: 95 - DNA, 3167 bp, Homo sapiens
tactgtaccctcccggcagcctccggcagaacacgcagcagcagcagcagttagcgctgatgcaactatcgttgctgttgccaccgcctccccactgacggggcgtgcacctggggggtacttgcagtttccaggggcaacaagcatctctctaccaccctctcctgcgcccctgagagaggctggctccaagcttgatatagaagactatcatatgaaccagaaagggtaactgaaaccaaagaaatgactccagtatcaagctaaagacatgccttaaaggatgaggaggagcagaaatcttaccagcaaggcaagaaagaagccgtacgtgaacagcctctgctttaggcccagaaggaaaagaagcttacaggagacaatcagtcttacactcttccatggtcacaaacaagaggtccctggatctacagtatctaggcccacatgcaatatgactttgcaactcatcccatcagaggatggaaactatttcttcacccccttgaacctgggctggctttgtaatttgttttggccaatagaatgtggtggaagtgatggtgttaccagaaagagttcccaatccagactcgtgcgagaaagaatttgagaaatgaaagaaccagagcattatagcagaacgaatcctggaatgggaatggaatgcctggatttgtggcacagttgggaagcgtcctggccatgccatgttaaagctgtctccaaggcagtgattcttacccttggctacacattggagtcatttgggaagctagaaaaaaaaaatgcccaggacctgggcaagacggctgaataagaacagctctggtctgcagttcctagcaagatcaacgcagaagggaagctggcagcctgggctcttggagattgtatctggtgccggagaggactggctcccacactcagtgagggaggaattttactgacccagcatccagatgaactttggtgaggagaggagacggagtttcactgttgttgcccaggctggagtgcagtggcgtgatttcagctcacggctacctctgcctcccgggttcaagcaattctcctgcctcagcctcccaagtagctgggattacagatcatgaactggcagccatgtggaaagaagactagactgcgaatcacttaggatcccaccctcggtttagtctagaatactctgcgaatcagctttttggccctaggtaggaaagagacaaatggaagcaaaatagcaaaatggtgaagaggagggttctagaggcagagagccctgcagtcctgagtcctgagtccaccgtttaacagagtgactttgctcagcctgtggattataatgaaacttgcctgttataggatccagttttttaggtggtagcaacatgctcaaggaagatgcagccccttcctccagcctgagagaataaagcatcattggcttatgccaaccatggcaatcccattccccttttctcatgattgatttgggaatgggcaagtgacccagttctaaccaatgagacgaaagaaaaagtctattggtcagcttatctcagaagatttttgtttcctgctataaagagaaacagtaagttccttcctgcctgacttaaatgcaattgtgtgcaaacatgttacttggagctacagcaacgattctgtgaccatgaggcaataagccaaggacaaaggatagaatagtgaaaagacagagtattggattttttttatgatatcattgaactgctggaccaatgtggaaccatctacttttagtctttcatgatttgtgagatgattaaacatttcttttttttagccattatttcttttctgttacttgcaactgaagacatcctacataatacaaacactatccaacttggattgtaatttatctattttcagatctgtgtgttctgtcttactgatttttgtattcttagcactgagtataaggctgctacttagtaagacttcaataaatgactgtttaaaaaggtcttagaggatttaaaaaaaattctgaagttgctgaaatatgaagaccaggaaccaatttcaggttctataaatttctcgcttccttcacttctggagtagtcttcatttctgtctgattctacctttactaaaatgaatgaatgattgagaaatacgaaaaatggctggtatagtggctactgctgagaagtatctcttggaaattcccggaaattccatcagtcacattcagacctaactctctgatgatcaatgtttctgaactcaaaccagtgtacataagcagtggactatttaaagtggtattagcctagaatatctaggacccatgttttatgcattcagtaagcgtttgtttaatgtctgttatctaccaggcacattattatgcattgggcatatagagatgaccaaccacacggcctcaatccttgaaaagcttacagtaaccaaatagggttaacggcctaaagagaggtaattacaagtcttacactcagtcttcttagcatagtatggtgctacctctgagttaattaagataacaaaattcctagatatatatctttgatgaaacggtttccatgaaaactttccaagtttggtccctccccggctgagttcattttggaaggtgactttctgctctcatcacctaaggtccttaacacgtatcctgtgttctccggaggcaccccttgcccagagtgtgccctctgcatggttcccccagaacacctatttcaaaggaaaagaagttggatcattcagtgaagatttggggggccacttttctacgtgggaggattatgagtattaccttcctcccctatgtattagtaaatataaagaaaacataaattaaccccctttctggctgggcacggtggctcacgcctgtcatcccgcactatgggaatccgaagtgggcggatcacttgaggtcagcagtttgagaccagcctggccaacatggcaaaaccccgtctctactaaaatataaaaattagccagatgtggttgcacacatctctagtcccagctactcgggaggctgaggcacaagaactgcttgagcctgggagcaagggttgcagtgagctgagattgtgccattgcactccagcctgggtgacagagcaagactctgtctc

SEQ ID NO: 96 - DNA, 449 bp, Homo sapiens
gccctgttcaaatggttacaaagttcagctagagaattccttctccctgtagagttttaccccctgctcctctggccgccctccggatggatctttgtgttgccaggcaggaatgggctgcttggggacccagtgagctccgagggcctttctgctgcttcctgtacccctgtatttcgctcagctctctgacttgactcagctccagacatctacccctggagaaagagcccaatgagaagtaatctctgaagcccagatttcctaaggatgaagcttcaggagaggccttatcaatcctgacaacaaacttttctcgtcaatttagtttcatttaatggaagttttaaatgtgtaaagttcagaaggctattaaaattggttccagctatctaagatacacacacaaccacacacgcgcacacacggtagagataaatatgttcgaa

SEQ ID NO: 97 - DNA, 1032 bp, Homo sapiens
catttccttaagttttgatctccgtcttcctgatgaagcaggcagagctcagaggatcttggcatcacccaccaaagttagctgaaagcagggcactcctggataaagcagcttcactcaactctggggaatgctaccattttttttccaaagtagaaaggaagcacttctgagccagtgaccactgaaagatgaacactcttcctgatcctctcctctagaattcatctcctcctgctagcagccgcgtcctggaggagcagcggatggggaatccattctgtttcttcctggtgtttaggaagttgccccacacacagattgccccgatgtccaaccagaagaagtgaaactgctgctgggtctggagaggtgaagacccgtggccagcttctgttgttgccatcggccattgctttttgttcgcttgcttttggttttgcaagaagagcggcctctgtctctgatctgcttcaaatcatcattccatcagtgacagaagtggctgttccatcagtggtcgcagccagttcagctcctgcatccatccccaagtgttctgagtggaatttgaggcctccccaaccacctaccaaaaaaggagggtgaaatgaaaggaagaagaaaaactcagcattctttcctctgacaaagagtaaaacgacaaggaatatcggcctgaattctcttcccaagaagaaagaaagcacaccaacgcaggcatttgtcttctgtccatggtgctgaagtttattcactttcaaaccactttcagtaacagcaaattctttagaaaaggaaaatacagggaaagggataaacctcactgacttggaggaaatcaagaggagtgagcacagcatcagaaagccccctggccccagactgcacccgctttcctggccctaccttgaaatccatcaggtctgcgttggacacggcattgtacatgggattagctctggtctgacctaggagctggaatgccagtaaaaggaggaagctcacggtggtggtggagaaggagctcat

SEQ ID NO: 98 - DNA, 618 bp, Homo sapiens
acagtttgctggacctcacagaggtgattgatgcagcatccccccgggagccgggtgaaatcacagactccagcagcagcttctgagatgactgtggctaacaaatttttccagcaacacagagctgagaggattgggatctcagagaagaaggagccctgcattcttggcttcatctgcctggagtggagtttccatcatgctgagctggaggtgcacggggccagggaatgagcaagtcgtagctcaaatgtcccagactcttactattcttattgaaatttagtaggttttcttgaataaatgtttcttcatctgctgtatgcccttaggacaattcccaggaacatacatctatattgatatcaatataaatataaatagataattatgtatgtataactttagcagttttacttgttctgctggaaagaaggtctggaaggtttgcagagctgctcatgccaccattccagaagttatccaccagttcattgctttttgcacagtagtattccattgcatgtctatgccacaatttgtttatccattcacctgttgatggacatttgagctgtttcctgtttgaggctattacaaataaagctgctttacaaa

SEQ ID NO: 99 - DNA, 561 bp, Homo sapiens
agtcatcaatggatgtagaatttcaggcttactcttatttcatttcagcatattggagaccatgaattcaggtctcaaaccgtggaaggctggcttgcagttgtgaattaccaggaagattttgtttgtttgtttgcttccaatgagaatcaagatcaagagaggctggagtgcaatggcgtgatctcaactccctgcaacctctgcctcctgggttcatgcagttctctgcctcagcctcccgagtagctgggattacaggcgcccgccactacacccagcaaaatgttgtgagcacctaccatatgccaggcactgttcagtgaactggttgtacaggagtgaatgagatcatcttgattttgagaagtttataatctactcaagggaaacacgtgtaatcaactatgtttcagacataacccctcaaaaccaaagcagaacctcttcaaggagctgagagatgcaagcctggctgtcggtggaaccatggggctgagtcacgtctgcccacagctgctgctgttcgcatccctgggcactgaggcctgaaactccacc

SEQ ID NO: 100 - DNA, 9346 bp, Homo sapiens
ttttaatactaaaaacattaatagaccaaacatctccagctgggtcagctgcacacctttgtacatgtctgatgattcagagtttaaatggctgtagttacaatttctcaggtaaacaattgttttctcaaatttttaccaatccctgcattattaggataaattttgagacagtgtaaaaacctcaaagtacagtagggtaagtcccagccctgttcacgtgaaagccagaggtggcccttccccggcatctgatcgtctgatcatgtgggtgcctggggccttgccacccttccctgtccactgctgcccccctgggcctgtcaagatttgaggggtgcccactcgctggctttgtccccatcccactgttaagtaaggtgtgccttgctttaagcaaactgaatgtgaaaattatgtgtagaagtctgggtttgtttaaaagaaaaactgggattttatctcatctctttaaaagaggtctcccaattcgatttctgtactgggactcttcctggtgtgtttttacatgttcactttttaaaaacattgatgtactcccatccttttaccactaccctatcacatttgacaagttcttgctgtaatgacgacgcaattaacgaacaccaggggagcggtggaaagctgccctcgtgtgtgagcccttcggtgacgcaaagccaccgtcctgttgttttgtgtgtcctaagctcagattttcctggtttggataaattttgtaaaactgggcatagctgtacttttagaaagggatcgttttccttaagttttggttttctctggttcaagcagtctttacatgcagccttttgattgcacatcagggtctcccttttcttttccagatgatgttgcttttcggtggtggtctcacactcctttgaatgaatgtttgcactctagaaccacaaacgatgcgtgaccattgtacagcttgcccaagagggaactgttggaagcaggcagtgacctccacgctgtttgtttgaggctgacctaaactgctatcactaatgtttacccccgtgacggagtgcccattagaacagatcatgtcagttcagttcctgtagtggggttagtaggtggggggttttattgttgttgttatttgttacttttattgctgttaaatgcaaatattgctatttattttttcctttctgctctggtttggtttggccgacacagatattccagtgcatgtggtacctaatggatatgatagaaattatttccccaacttttataaattgcctaatgtttaccttcaagtttgctggatgatttatttttgaaagccacaaatgtgatttttctggatgaattgtttttcttatatatgcagcaatgtaattttacattgatctgcggggtggtttaaattttatttttacaaggcagtttttcagtcaaattatatatttgatacaatacgctaggatagaccggccacacgtcaggcagccgggacaccggagtgtccccaggaggcctttggggctggggtggcccgtggcttgttccctgcgcctctgggaactggatgagtccttcggcgggactgtgacccgctggacagttaaaaggatttttcatgggcattttcctacacataaggcagttccattaggaggagctttagaagtcgacataatccagacagtggacaatcccagtggcccagacaagccatacgacattttcctgtgacctctctctgacccatctctcacgctcatgagaaaaggaatgtacaataaatagaaacagaaacttcctcagtgctcatgcgcctcacttgcagaacgtgagtatttcatttatgtttgaagcccttccccaaagtgaccgaggagttgcactctagctgccgtgccagcagtctcgtctgctgtgacgcttctcggtgcggatgcagtgcacctgtgactttgtcatgggggtgcccctgttacacacacacacgctgactcttttttatgaggaaaatcttcgactcaaaataattgcactgattttttgacaacttctttttacgatgtcccacttcgcatctgctgtacttgtttgagatgattgtaaatagatttgtggtaggagaagtgacatgaatgcaacacgtggctctgttgtggagacactgcctcgtattcagtattatgtgttaaagttgtgtggacttaactctgttccgccctttagcttcgtgtctgttgaccatttatgaaggacaagttcgcctcattttctttttcttctgaagggaagttctagatcggttactaggagaacatggtctcttggtgcctgatgatttagtcctaagcagactcgttgcagtcttgtgaacactgttgtggtctgtttgattcctcgtcgcttaccgtggctctccaaagcatggtctttgagttccacccagcctgggacagtccagacgggaggcatctgctccgcctgctactaggacgcaagggcctccttgcatctctgtggtcagagtcatcttaaagccatgaggttactgtcgtgtcaaagctgtcatttgtgcccgttattttgctggagtagcagcgtgtgctgtagcccccgtgtgtcactctgtggtcaggctaccctgtgtcacacccagcaagaagtttttcagccccagaccagtctgtgtgtgtgtccgagtcacaccagtgccattacggtgccctcgcttatgcttctttcagtatgttttgccatgttattgtctaaagtgaatgtattggcttagccaaatcactacagaaggtggttcctaaataccttttagtttaaaaaaaaatgcagataaaggctacctctgaattctcaatagattcatcatgtttgctcttaagtgtagctgtccacactgaaaacagccaatatgttgcctgaataaactgaattgtgaacatctatctgttcagttctggcttgaaaatgtgtgtgccatactgtgacccacgggcagcccctcctcctctactgtgtcaggtggaccagggtcacctctgttctgcgcagctttgagattctaggattctacggccggcacgaatggcatgggagggttctctgcacgggacggcataacggcatgccatccttcaggctggcaggagcctgcgcaggtgtggcaaaatcttgaaacagcctgtgtcctgcctggcttttcactttcctatttaatataagaaagcacttttttttctgctttacctacaaatgggttgaaaatggcctcctctgtcctctcctctcttttatacactctgtaaaatcacaaaggtgcttcaacaccgactgtcatgcaaataatacatttaaaatagttgcatggtttcaaagacaatgcagacgtaattggcctttgactttgggacctcgggttactctcactccctactgcaaaacaaactaagggttgaaagcaaagcattctgttcaaatccagggccctttgtttgaaaagaacacagggcccacagctggtgttttgaagtagaagttcccactagtggcgcagtggaccgtctgatgcagacttgcaggaagtcggtcctgggaggctctgaacacccctccctgtgattaaccactttgctgtcagaaatgtcattttcccatacactgtgctgtgggcccggggcctccttcgcttctttctttgggttccatatgttgcccgatcttgaggttagcgctcgccccaatttctccatgagtttactctgagttgacaggcgatgatctgacagttggaggtgtctgggtgtttggaggtggccccgttctcatgttggctgctcatcagacattgagtttggccccggcggttctactacgtcactacctggaagcaattgcctttaacactctgctgtttggggtttcgatgctttttatgctgcgttgcgtgctttcattccggaagagctaagtgtcctttgcagtctctctgagaatgttttgtaattctgccgccacgctgttctgtgcggaccgacctcaagaggcttgggcccccgtgggtgtcccactgcctgccggcccagggtacaggctgcttgggtccgctgggctggccttgggctgtcagaatctggtccagggtgtttcgaggggacactgcacagccgctcgcccctcgactcagtcatgggagctgcagcacgcagatccaccgcaagcttcctgcacgcgcatctccggaatgctgcgctgggccctcccaccatcttcgcgtttgtgagaatttactcagaagtgagagaactgaagattcctggtgcttttgttaacacgtttctatcttattggttggtgtggaaatgttagatgtgttgttaggtttttaaatgctgtgggtggtatgattaaagggttaagtcctcacctcagcccccagcccccttttggggggtaggaagaggctgagttatctcctatttaaaacctccttggatttaagtagttcagagttaaagctaaaacaccaaatattaactctttcccccaagtgtctccaggaactggacgttggggccattcttattcagttctttctgtagctccaaggtccttaaaatgagtgagttgatcccaagaacaccccacagcaccaaccagcagggcacagtgcaagcgacttcatagatcggggtgctcgtgtaggggtccggggctcctttgaactctgggagttgtgtgcgcagtcttgggtgggagacggcaggtccctctgtcccaagaagctggtggtgccaaggccttcctctgtctccatcagtgccagcctgatcgcgttctggaagacccagtctcagactctgtgcctttaaagtccggtcctcagtgtcctttcagaatcatgttggggctgcgtttctctggggaactaagcctgtgccattccacaaggcaggcgtggacctccagccttggaagctttctttccgctcctcagcccctgacttgtaaactgtgatgccatgcagtctggagccgcgggggacgcactcggtctcattgcggaaaacacttggttccagtcgtgtggtttctcccataccctgaccaagtccacctctgccaggattgcaggagattggtgcaagacccatctcttatgcattgaccatgaccatcagcaaagcctggtggtcttgttctcatagtcactcgagaagaatatttattgtaatggaagtagattttttaaaaaaggaattggaatcatgtctttgtagaatgtgtgtgtgtgaagtcctcagctgtaaggtgctattcagtcctgtgacccttattttggaatgctcttcattactgttgctctgttttgtgacttcctgggaaaccgcttactttggtgtggtgtcaccttgagctgtgcacataggacaccagttttgacttaacctaacaggcagtttttatctctagctttttcaagccaggtattgagcagtttcttggccaatggcctgagaaaccacctgtccctgtcaaggggtgattttattggttttaagtggggaagtaatcccatgtacttatttcttaaatacctaggaagttcttcttggtggctcctcttggccctcccctctttctcccccaacccaccatcctgcaaggcaaggaatggcctctccctccacagaggcaacggctgcagagggagcactgtggctgccatcccagttcctcttcaaagccaaacagacacgcgtgactcaaatcctacagtatggagggtggcgttgcattgaaattccaggcctgagtttgatagtggattttaatgtagttgttaaaggtatgaattcatgttttataactgtagaggcaagcaagtttttattttttaaaaagttttgagagaataatttataagtttctgtgcagcaaagtggctaattactcattaaatacaggaaaagaatgtagtatctaaatccagctttttcttacctctggtacacttcagattacttacctaatacatattgagggcttttaacccttagttttatcaatttttctagttttattttatttttataaaataattgaaaaagaaccaaaaatgaattcagaagttccatagatggatttttgccccttcttaattttctcccacaatgaaaacattttagaagacattttgaatcaaaatgtattatgaccattgaaagttctctattttctaagaagctgagcagctccaagggcctcgtttcaggtggtactctatgtattgtctgtgggcttgtttctacctgtacagtggaaccatgtgaccatgtcttgtgcttgcaatatagaaaccatgcagtgctgttttgtgaattggcagtttctgtataaactcttatttatatacattggcctctctgtatgattttccatttgctacatgaattgtaaaattaattataaaattatagtacctgctaaatacaattctgaggcttcatgtcattgtctttagttgaataccatgctgtgtgtcttgaagatgtccacgcttgcatgatgctaggtggcaatgccactttaaattaagccttaatcagatgttaaatttgtgagtttcagagtatgcaaaaatattaggcagagtgagtgtaaactgttcagatcaagatgctgtatcataattcaagttatttttttctggagttaaagggaagcattcagtgatacacctctctctctctctctctctctccccctctcccccctccccctccctctctctgtctctgtctctgtctctctctctctctcttgtctagcttggctatggccatagcttgatgaaaatggaccattgtgcatttctgtgacagtcaaaaagacctgttctaaaagtcttgcgactttttcagggttttttttttttttcatgtttctttttttttttcccctccagtctgagatttctgtgtggctgatggagagtgtgatttgggcgtaggtcttatttgcaaacctgctcatgttctaagctttcttcaggtagtaccacctgtcatcgcttctgcatatgatttaaatggatttttgtttttataaaagtatcataaatttagagataaaatggaggggacccagctttctttacaatgtggatctacctcagttaaacagttgggtgctattactaagtctgtcaaattaaattggaaaaagtaaccaaacagtgagatacaactccacatgaaacttgaaattgtaatttccgtttatttaatgatatttttatttatttgtgccttttatgttgaaccccaatgcattgaaaaaattcagtatgaaacagtacatattttatttatattacaggtgggagaaaagtccaattggtcatggaatttgatagacttttccccagccaactgctacagtgtattataatcccgactgcccccctgtgaaaagaaaaaaaaaaatgtccaagagcaaatttaacattttacaaacaataaagtccaaactcctctatgcacatatttatagcttatcacttcattttctgtgccagtgaaggggtggccagaaaaaaaatcccaagtaccctcatcattgcttttctagccattcatgccccctcttcctctggcacattttctaagagtttatttcataagcagcaaacggactgttgtcgatttcatctctcctgacctacctggtggaggtgctaatggccatggacagaaaggggcgagccagagctcgtggctttgtggaggcagaggcctgcattcagcagcggccctgtgtgcctgtaagttaggaaggctttctgacaggtaagaaaatgagataggttgatgacttaccatgcttttatatttggcagtttacaattctagacttttcctactatggcgatctttttttacttaattctttggaggtaacaatattttggagtcttaagaatttgattttataccaataagaaataaaaattagggatctttcctgtagtatatagttttactattttaaagagatctctgaattttacaagagaaccaacattccttaatggcagaactttgaaagttgatttgggaggctttttgctgcaggatctcaaaaatagagagagagatgattctacttaaatgtttttaattttctaacttccatcaggttgatacttaagctctattttgtaaagagtaaatcatcctttagtatgctgcataagatgatcagcattcttgcactttctcagtaataagacgtgccgggcaattggctccccaggacgcattgtgtttttaacctaacgagaggactttggggcaggtgattaaatttatataggtacctcaagaaaaagaacctgaatatgctgcattttctttctttagcttttacatgtagcattttgttttgcttttgttatttttgttttgatatatgctttttggaccccaatagactgttgaaagaaatttaaaaattactcttgtagggatatagtatccttaaaaaataaaaatttaaaaaaatttaaaaaaattgctgcaatatctggctcgaaggttgccctatattagaataatactttagccaaatacacctgaggaggcagacactgtgtttataagcagacaataatgttctgaatccttcctgttcatgctgctttcttaattcatttctccatgtcatcaagaggttggataacttatttctaagctcaaggttaaaaatcatgtcacctttttttttttcccccaacacagacctcagaaaaattgcgattgaggaagtagcatgatcctaaatgtgttgctgaaatcaggcagcccgagcctctggtctctccagagagcccgtcttcacatttctctattcctcagcactcacccgaaactgaacagatggggagtggtcttgattgtcaagataaaactggtgaagaaagctaaatgctgagaaactgagcatctattgtcgtgtttaagcttagctgggtcctttctagtttgtttttacagcttactaggtgaagtagtttgcactatttttgcaataaattcatggaaaacctaacagttacttgttttgtttcttactgtgtgtatataaactaatactaaaagtttggcatagtgttttttcacctccttacataacccctaacatgcacagaatgctgtaaatctgataaaatatgatgtgaatgatattttataaagttattttgtatggtgtcaattttgttttgcctcatagtatgtcagcaaaaaattaaataaaagtcctcctatttaca

SEQ ID NO: 101 - DNA, 789 bp, Homo sapiens
tggcctgcatccactgtctggcactccctagtgagatgaacccggtacctcagatggaaatgcagaaatcacccgtcttctgcgtcgctcacgctgggagctgtagaccggagctgttcctattcggccatcttgggtctggattcggcattacatgtcttaacggaaaaatcaactcaagatggattaaggacttaaacctaagacttgaaactataaaaattctagaagataacattggaaaaacccttctagacattgacttagataagtatttcatgaccaagaacccaaaagcaaatgcaataaaaacaaagataaataactaggacctaactgaactaagagcttttgtgcagcaaaaagaacagtcagcagagtaaacagacaacctacagagtgggagaaaatcttcacaatctatacatctgacaaaggactaatattcagaatccacaacaaacacaaatcagtgaaaaaatcctatcaaaaagtgggctaaggacataaatagacaattctcaaaagaagatatacaaacgtccaataaacatgcaaaaaatgctcaacatcactaatgatcagggaaatgcaaatcaaaaccacaatgtgatatcactttgctcctgcaagaatggccataatcaaaaaattgaaaaacagtagatgttggcgtgggtgtggtgataagggaacacttctacactgctggtgggaatgtaaactagtacagccactgtggaaaatggtgtggagattccttaaagaatgaaaagtagaactaccatt

SEQ ID NO: 102 - DNA, 693 bp, Homo sapiens
ttacaggcgtgagccacggtgcctggccccaggccttttagactgaactcagacatcacctccttcagaaagccttcatgatgagtgtttgtgtctgcgcaggcatggcactaagtgtcccatggcacatttggccctcatggaggcctcaaaagggcaggaccagcaccctcttctacggaggaaggaacgggcacagcaggtacatgatgtggtcaaattaacaagaggcagaggccggggtgagccactgcgcctgatcaaggcatcaccgttgaacctcctaagaggaaaacataaggctgtgcaataccaggaactgggattctaggttgccccagacaccaaggcatcaaaagccaggggatccagagaaaacacagacagccaagagagaaactgcgggaaaaagccaaaaggttgagagccacaccatctagaagcttcctgcctgtggtgcggcacagaaacaaggagagtcagcaattaccagccagccaaggtcctggaagctgacgtagagctcgtgccgacggcagacctgccggccgtgggagccgcggacgtcatctgcagggacagaaggggcaaggtcttttctggggttcctgctgtgtgcagctactatggggtaccagggtgggggatgccctgatgagcacatttgtcaaataaatgaatgacaggaaacca

SEQ ID NO: 103 - DNA, 4527 bp, Homo sapiens
agagttccgactgaaatttgagaagctctttgctattcaagtggatatgtgcagttgacagtttgagagatgcatctagggttcagtaaagacaacacaagcctgtctttagggtctacctgtgaactgtgaacacagcaatgagaatgatggacatcacctttaagtatttttctagactttattactcatgtgtttgtcatgaggtgtaacttagtagttcatagtcctataatgtatgttattgactaggtagcatttatttttctaattgtttctgttatagtgctgccacatgtgtttcccagaaacgcattttacccacagttcttagggttggcctgattagtttaattgctgtctgaacctgcttcttactgtgattagttcaggaatctagatcaaactcattggcatttaacatttcaggaagtgaactgagtaacaactaactcagcaggggagtgtagtatgctattatcttttgggaaagcagcttatttgctttcaagaggcagcaggaggatggactgtctttaggtatgaaggcaagaatgattatagacaatatgcagaggaggacacagtgtgggagaatcagggaactgagccactcatggagttcagccaaccttggatccctgctgcacctttggacttccagttaagccaatttgtctgacatatttacttataccagtttgaatcttgaaatatttcaggaataataatttcctagataaaaggaaagacctttcatgaaaggtctcaagtcaaatagggtcaattaggacagagttgctccaattacatatttggaacagatgtccaaatgttaatacttgactaaggctaaagactaatattaccatcacaggaaaaatgtccagggttttttttcagatgtgaaattttatttaaaaattttaaataaactaaatcaaaaaattttagtagttgtactaatttcctggggctgtcaaagtaccacaaactgtatggcgtaaaacaacacaaagttattctttcatggttttagaggctagaagtttgaaatcaacgtgttggtagggccatgctctctccaaacccactaggggaagactcctgtctttcagtgtctggtagccccacttgttctttggtttctggcagcataactgtaatctctacctcagttttttcatgtatgtctccatgtttttttactttctttcttgagatggagtttcactcttgttgcccaggctggagtgcagtggcatgatcttggcttactgcaacctctgtgccccgggttcaagcaattttcctgcctcagcctcccgagtagctgggattacaggcatgcgtcagcacgcccggctgattttgtatttttggtagagatggagtttcatcatgttagtcaggctggcctcgaactgacctcaggtgatccacctgccttggcctcccaaagtgctgggattacagatgtgagccactgcacccggctgtctccatgtcttcttataagggtatcagtcatactggattagggcccaccctaaagacctcattttaacttgattacctctgtaaagaccctgtttccaaagaaggcaaaattctaagcaactaggggttagacttcaacatatctttcggggggacacaactcaacccataacagtagtcaatggctgtggcaggctaaatgtggctcccaaatatgtccatatcctaatccctacagcctgtgaatattaccttatatagccaagaggattttgcagatgtgattctgagattgagagattatgccagattatccaggtaggccccaaatgtaatcaccacagtccttataggagaggcaagaaagtcaagtgtagaaggaggcgatagaaggagagagggatttgaagattaataggctgcttgctttgaagacagagggaagggaccataaaccagaaataaacctctagaagctggaaaaggcatggaaatagaccctcccttaaggtctctggagggagtgcagccttgatttctaccgagtaaaattgattttgtacttcagacctccaaaactgtaagagaatgactgttgttttaaaaccattgagtttgtagtaatttgttgcagcagccacaagaaactaatacaacatctatatagaattttttcaataattggagaaatttgaatatggattgcatattaatattactgaatcagcattaaatttgttaggtgtaataatgtgattgtagctatttaggagaatatcctatttttaagagacatgccaccatatttagggagaagtgccaacatatttgcagtttattttcaaatggttcagaggctgtctgtgtacatgagaagacaaagataaggcaaatgcagcaaaattgtaataattggtgaatccaggtgaagggactatggctggtctttgtacttttttttccaacttttctgtaggtttaaaattttcaaaataaaaaaatgggaaatactttaaaaattgtaatcaaagacattagtacagaaactttcataatgtattttatttttacagtaaaattaatttatgtaaattgatagaattttactaatttcactcccaagttacattaaaaggcttacatatgtttgataatagcatatgtaaactagaactctgaatgatatccattggtcataatacgtactatgtagcggtaatggtgacttttgtgattgcacaagtctagagatgccccaaatgacattgacttagacatctggttattctaaggctgaaactgaagttgaatagaaggttttagtcaaatactgagatgaaaactgaggcagtcctggcgggggggagtgagtgtgtgtgtatatatacacacatagacatcatgcttctaaacatttacagaaagaaagggtagattatctacaaaaaaataagaatcagactgatatgagatcttacaaacctaacccccttctctttcctaaactccagattctcatatttctgacttcctatttgatatttacacttcgatatttaccaggagtcttcaacattttgttcaaaacagtactcttggttttcttcctccaagactactccttactcatatcagcaaatagcagctcttttcaagtgctcagtgtaaaaacctacaattaatccttgatttctctttcagtcagcctatactaaatcaatttcatttaaaatatctcggctactactctgcatctccactgctaccatcggcctctccagtcacattctccaagagcactctatctcatttaaaagacaaaatctctgcagtggcctgtgatgctccttaatggcctacataatccagccctcaagcacctccgtgatctctgtaaaactttcccttggtcactgtgcttcagccacattaaccagcttgcatatttctcacattcaccaagcttgttcctgccttggggcctttgtacttaccatgttctgttctgagaatactctgcctcaagatatcctacaactatcttactgtattcagctctctgctcaagtattaactgatgaaacctgtcatccctactccactccatgttctgctttacttaacagcaattgcacatatggccccctgaataatatacatttagtcacttatttttacttatctgctaattaaaatgtagactttttctattctgtttactgctgtattcccagcatgttttatccgaatgtgcagtggtttcttttcttctcccttatcgtgggaagtgatgtgcacaaatacacataatggagcctgaatgtcatattgctttcatacctgtgtgaattttggtaagaaaggaaaagtagcgattgacaggtaatataattacattaagtcactctcatagttagctgtttattgctttcctgctcttattctcagtccccaggaccaaatgttgaccactaccttcccccacatataattaggttatttaccgaacgccatgcaggtggctgttaaaaggaagatatatacttaccttataaactcaacttttccctgttgtctttctgtctcacccctacctccatgctttaaattaacttttcaggcttaggccttatctctcagtagagccatataaggtatgtgtaaaagcaggaaaatgtttcctggggatgaagctttgaaaagcttttttttttttttcttttggcaataaaataaggtagattcagcacaatacctaataactaaaaaatctgtttttaattgggtggggcagacagcaagtgtgtcatcctggaagatactatttgggattttatgtaggtacataagagaaaaaagtgaacaaaagcaaggggctaccaggacgccgcagtatgcttaacatgtattttctaagtttgtattatgcctttatcttggtacttttatcttctgttctcacttgatctttttgaaatgtattttaaatcctaataaaaatatataaagtctggaattaataaagga

SEQ ID NO: 104 - DNA, 2089 bp, Homo sapiens
taatttgttgactctgtagcatgtcaagaagagtagttttttgagatctggcaagaatattttagagatacatattcttttctaagtatgttatcaccctgtggtgttgagcatatcgtcccaaaaacctgcttcagcaagcagttcttggccaggcatggtggctcacacctgtaatcccagcactttgggaggccgaggcaggtggatcacgaggtcaggagttcaagaccagcctggccaagatggtgaaaccccatctctactaaaaatacaaaaattagccgggcgtggaggtgggcgcctgtcagctactcgtgaggctgaggcagagaattacttgaactcaggaggtggaggttttggtgagctgagatggcgccactgcactccaacccgagcgacagagcaagattccgtcccaaaaagaaaaagcagtttttgccatcagcaaggatatctcctccactttaatggacaggcctcatttttggcagctatgctgtttgagatgtagactgaatatccaaggttcctccctagctcaagtttttacttgtgattacacacaccacattgaattccgtcttcagaggcaaagatttgggcttcatatctcaacagcaaaagggcctgttcagcaattcccttcattttagactcatatgacctcagcgattgcatgatagtagtaaactagtctcctggaaataatggatgtaggtgcttctagaatatgttacagaatttcagacttaacctattaatagataaatggatcttgacttaaggtgacaaaatgaaacttttattattgcttaaaaatgctgtgccaatattgtataactagctcctctaatacttttggtattttggatttaataataagaccttaagcattttaaatgtgaacatgttcagggaagtatgctttgatgtaaatgtctcagatctaagttgtaacacaattgaatacttgtggcttattcttggtttaacttaggaaaactggttaaacaatcccccatttgggcctgtcatcattttaatagtgacgatgttctttctgaaatcttcagggtcggagtcaggctgaatttttttaaaaattaaatattatgttcaaattctttcctttttgccattgtgaaaaagcaaaattttaaatgatttctcctgttagaatttttaaaaatacccacaggttggaccatctttcttatgggttgcacaatgaatttatattttaaattagattaagtagaatgtgaagtacatttcagatttactagttttctttccattgttcattttgggttgcctcagattcagtgtatattttaaaatattggttacataataggtactcaatgaaatggtttatagtagaatatctaagctagcactttattttaaaaagtaacttattaattaatcacacattgatggtacaccttgtatttagcaaatgtttgcatgttgataaaatctcctatgtcttctttcttaaatccagttgctgattttgtaaaatacagttgtgataaagcagcattacgggggggaaaaagctatattccaactggtgttaaatgtattcaacaaaatcttacatcatacagtatttatttcttaattaatagaacttcagtgatatacttggtagatatctcaagccttttgtcttttacacaatggtgctctatcctattgttttcttttcaaagaagcatctgaacacttgcatttctattttcctatccaaaggcatccacatctaagtgtgtttttaaagttgattaaaattatttttctgttaaagcattctgaaagtgtttgtctttacctagaatgatttgtacacactcgtggtcaactgaacatgaatgtcagtagtagtctaattatgggaagggtaaacgtgttagattaaggctcttaaagctctaaaccatataaactatggacttgtatcatgatttaactgttcttagatctttcttacacagtgattcattcctctatttgtacagtggctttatgaaatgttgtgaattgatactgtaatcaataaagtgcttttaaccag

SEQ ID NO: 105 - DNA, 2256 bp, Homo sapiens
gggggtggggccttggggccgcgagtgggagcgggagcggttctgcggcctcctcgggcttcttggccctgggcggagtgggattgggtgtcccggctgttcgcagtggccgcgagtgcggccggacctggagtagtacctgagccgctctggccgagcaaggcgcggggccccggtctacaccgcgctggacccggctatgccgtgacggaattcccgaggccgtagcgccacgcgagacgcgcactggtggcctccgcggcgagtcctggggtctccgcaaggcctcagtgcccgagctggggacgtgctggggggaggcccggccccgtcgctgcccgaggccccgctgtcccggccggaccggcctggtccctggcgtcctgtcgggtccgcgctggaggagagtcccagacagcagagcccgcggtgcagctccagccccgggaagccccgcgctcaacaggttaatactacacagcggcgattctaatggtcacgcttttatttacagctcgcctcccttccgccaagattcacagaacacggcagagtggcctcgggatcacctgcccaagacacctgcacgaccggaagttgggagaagaaattaaggccatgatgatgaacgcagcctttctcgtttatttccaatcccacaacaaaccggagtccaggaactcatgggtgattatcggactattacctagtcgtaaaactgtggagcattggtgtctaaaggaatctgagacagacccgcagtgtctcccccacatgccttaagtcacttctgccaagcagaaaatcatttttaagtaaatgttagtgaaattggttttaaaaaagagaaggggccgggcgcggtggctcacgcctgtaatcctatcctttaggaggccgaggtgggcggattgcctgagttcaggagttcgagaccagcctgggcgacacggtgaaaccccgtccctactaaaatacaaaaaattagccgggcgtggcggcacgcgcctgtagtcccagctactcaggaggctgaggcaggagaatggcttgaactcgggtgggggaggttgcaatgagccgagatcgcgccgctgcactccagcctgggcgacagagcgagactctgtctctgaaaaaaaacaaaacaaaacgagaaggctttcaaaattactctgcggtacactaatttaacagattagatcactttccaggctttaagttggcctttgttctaccctttttttagtgtatgataaaagttgtgttggttcgttgatcagcatgcaatgaactctggctcttgttaatcaggtgactacagttttgtccttacatttgtatgtatgtcatgagtggttttgtatgggcaggaggtaaacaacgcacatttaaatatacttaatgatttatcattccaatgttttctggttgttttagtctttcatttgtctcttgaacaatctgaaacatccctattctaaggctaaaaaatttcctttacaaacttaggttaaacattcctaatctgaaatccaaaatgctctaaaattcgaatttttttgagtactgacgtgaccccacaaatggaaaattccacacttgccctcatgtgacactgggtgacagtcaagtcacaatcaagcctggtgtggtgggcacctgtagtgccagctactcgggaggttgagcaggaggattgcttgagcccaggagtttgagtccagcctggacgatatagccagaccctgtctgtaaaaaaacaaaaaccaaaacaaaaaaaacaatgaaaacatttttttttaaaacgccatcaaaactttgtttcatgcacaaaattatttaaaatatataatataaccttaccttcaggctatgtgggtaaggtaaggtgtatgtgaaacaaatgaatttcccatttagacttgggtcccatccccaagatatcttattatgtatatgcaaatattccaaatcaaaaatatctgaaatacttttgtcccaagcatttcagataaaggttactcaacctgtaataaaaacactcagtgcttgcctgaaggaaaaaccaagaatttgtcatccatccttaaatttttatgacaccctttgtaatcaggaaaccttttaatacctaagaatatatttgatatattctggtatatgtttatcattctgatgtttaatgttctatgttgggcatatatcagtgtaataaatacattagatccaaatacagatcatgctgccttttta

SEQ ID NO: 106 - DNA, 572 bp, Homo sapiens
gtacatgccctaacattactccaaaatctgatccccatcagccctatcagaacactatttaaaagctcagcttacttcaactgtggcaaaacagttatggcccaggtaaacagaagaaggtagactccaccgtaacaaatttagttaacaggaagcaatcccagatctataggcacagagaagaataagagagaaacttcaccctaatgaaatttagacttgagttttagaagattttcctggaaagactaagtagagtcaagagttgagataaagtgaaggcatgaaaagcagaatgatgtggaatttaaaagatgaagagctataaacgtgttaatttaattggcacgatctctcgaagacagatccactgcaaccacgaagaagaattatcctttctacacagggccatttttccacgatgctactacattggccatcacagagcacaatggcatcaccagaaaccaagaagatggtaaggcctggaggtggcagagctgaagaggtgagagaaggaagcctgatgaagaaatacaattctaatggtaaacctagggaatcaggaaatc

SEQ ID NO: 107 - DNA, 758 bp, Homo sapiens
ttcccggcggggtcctgcggagttggcggaggctcctccagggactggggcaccgatctgcgtagaaacgggtggcggggaagagaggggaggagagctctgagtgggaagcggagccgggggcctgggacccgtcgcgtcagagccaggcaagtgaaccggagcaaacgacttccgatccagtctgcgctgttgcggctcccgtttgggatttgatttgcagcatctttgagcctctacgacaaaaaaccgcgaagcacgcccagccctcccccggcaccccgaaaagcacccactccctcccggggacacagctgggcgcgtccacacccccgcagccccacaccatgttgtgcggaaggacttccactccccgcctgtgtcgttgatgtcagaccccaggccagcctccgggcgctgcagttctcccggctaatgctgaggctgcggctccggctctagcacaggcaccagccgccgccgcacccggccccagcgcccaccgtctgcatgtgcccgccgtagccgtctgcccagcccgcagcccgcgctccacggagcgctggagaccaccgtggggggccccttctgccctcgagagaagcggtcttggaggtattgatttaggtggttggattttttccgtggatctatcaattcacaattcgaatttggaagaaagaaggaaaacatgacgtctccagccaaattcaaaaaggataaggagatcatagcagagtacgatactcaggtcaaag

SEQ ID NO: 108 - DNA, 1525 bp, Homo sapiens
cagactcccaatgtggctggcaactgcgggggtagaagaactcaggcaaagtaggcacaggaatgggggagatgagagccaagggacaaacgccgagaaagcgttccgacaagcatgtgtgttcatacatgcatacccccaacaaagggcaatgcactgtgtaacagaactgaacacaatttaacaaagctgctcccagccttcctgtcacctctttggcagtagggcaggccatctcaacttcggacacacaaagacattctcttcaggaggaaggctgtcctgtgtggtggggacaaggcttcagttgcaagatggtcgtctctccttcttcctgaataagacaacgtaccactgttataagattccaagtgaattccttcagaggaagagaaggacaacataagaaggcgtggatgacagactttcagttaaactaacaaagaaagaacactgcagcaccatctatgcctacctttttctcagcgtttataaaaaaaaattcatattccctacaaagcaaaactatggtataacaggacaactaagactgccctggcaccagagaaactacaatctagatgtgctctgcttccagtcggccgagaagcctgcagcaaatcacctaaacacttaaggtctttgtgtgccatccacacccaactgcaactagagactttcattagcccctttctgtctcagagctttcggtggttctacaagtcaccagcctggatctctaacaatgtgtctctccaaagctgttaatacattcacatccaaaatatctccagccacgaaatcctagtttagaggttgcccgtccttgttgaagaaacatttctacacaaatacctgttgcctataccagatggccataccaatacccaaatactgacaaacgtttaaaagaatttacggtactcccttcactttagaaatgttaacagttcaagtccaacagaacttaaaggaaaaaaagagaaatgttaacagtaagtaaggcatttatttaacataatctcaactaaagtccaactaaagagcttccccaggcaaacactccttttgcacttcattttgaagacaaaagaatgcacaagttaaaatcctaatattaccattttattaaaaataacttttaagatccaatctgtggccaatattcgatctggatgcaaaaccctggcttccagacaggccagccaggggcactgctctgaaggtcattacttaagtatcccagtctcctcagtctgacagacctacccctgcccagccaatctccacataacagctagttgttcataataaatcccatcagatccccgcttaactactccccttcaaaggctccactgccctcaggaaatagttcaaccaccttctgtagaaaggccttctaaaacctctctccgagtctgtctgctaatctctcccacttgacactccccaggtctctggccagctgaacttcccgggcatttcctgaacaatgcccctcaataaaccacatgcaactctc

SEQ ID NO: 109 - DNA, 4128 bp, Homo sapiens
gcggcgaaggcggcggctgtcagagctggagggccgggcaccgcggccatggagggtcaacgctggctgccgctggaggccaatcccgaggtcaccaaccagtttcttaaacaattaggtctacatcctaactggcaattcgttgatgtatatggaatggatcctgaactccttagcatggtaccaagaccagtctgtgcagtcttacttctctttcctattacagaaaagtatgaagtattcagaacagaagaggaagaaaaaataaaatctcagggacaagatgttacatcatcagtatatttcatgaagcaaacaatcagcaatgcctgtggaacaattggactgattcatgctattgcaaacaataaagacaagatgcactttgaatctggatcaaccttgaaaaaattcctggaggaatctgtgtcaatgagccctgaagaacgagccagatacctggagaactatgatgccatccgagttactcatgagaccagtgcccatgaaggtcagactgaggcaccaagtatagatgagaaagtagatcttcattttattgcattagttcatgtagatgggcatctctatgaattagagaacagagctcggagctctggaaatttggaggcaactgatatgtgctcatgtctgcatctgtgtgggttggctgtatctcagggacagagtctgcagcaaaaaaggcagtaacagagaagaattttgaaacaaaagattttcgagcctctctagaaaatggtgttctgctgtgtgatttgattaataagcttaaacctggcgtcattaagaagatcaatagactgtctacaccaatagcaggattggataatataaacgttttcttgaaagcttgtgaacagattggattgaaagaagcccagcttttccatcctggagatctacaggatttatcaaatcgagtcactgtcaagcaagaagagactgacaggagagtgaaaaatgttttgataacattgtactggctgggaagaaaagcacaaagcaacccgtactataatggtccccatcttaatttgaaagcgtttgagaatcttttaggacaagcactgacgaaggcactcgaagactccagcttcctgaaaagaagtggcagggacagtggctacggtgacatctggtgtcctgaacgtggagaatttcttgctcctccaaggcaccataagagagaagattcctttgaaagcttggactctttgggctcgaggtcattgacaagctgctcctctgatatcacgttgagaggggggcgtgaaggttttgaaagtgacacagattcggaatttacatttaagatgcaggattataataaagatgatatgtcgtatcgaaggatttcggctgttgagccaaagactgcgttacccttcaatcgttttttacccaacaaaagtagacagccatcctatgtaccagcacctctgagaaagaaaaagccagacaaacatgaggataacagaagaagttgggcaagcccggtttatacagaagcagatggaacattttcaaggtactgagatgggtgtgattattgagtttcgtatgcttttcgaatatggtaggatgttaaatgtggtaaaaagaatggctcttaaatgtgtttcatagatcatatattaagcttgactagtgagaatatttttcatccctctatttttagttatacatatcttgaagccatttcttctgttttagaatgtcagcatatgatttgctaggtctttttttagatgcatgacttcagtttattggtatttttcagcttaccagataatttgtattgttcatgatgagccatgccatgtaatgtttttccttttttgattgatcttagtggacatgaaaagaatcctttaatttctcagcaaattagcagaacagagtgtggttttgcaaatccagcttcctctcatggggaggcgtacggttttgaaagtggttcggactctgaggatgaacgaaggtttcctgacatagttttggatgacttagccaaccgtagattccaagtgaaaaagaggccccagaatttcatctcgaaaatcacctatcctaattcttgtccgcaaatattttctcctgctgatatgtttgccatggggctatatggactgacgaggtcagaaatacttgtcctggatctggctgtctattatgctgctgattttaattcagaaagtaacaccccaaattgtttgttatgtgcctcttccttttaacacagcttctaatgaagtatctttggcccgtgtgtatctagctatccttgagttaaaatgagatgctgttataataactttgtcctaggagctgtggtggtgatgagaatggaaactaatttgctttgttcacagtggtgtaaactttgtgaaccagaaagcatgccatttgtgttctgtgtcacaaatgctcatacagtgtcttaaccggttggatgttttgaacagtaatcagaggaggatttggggcaccaatgtggagaactggccaactgtacaaggaacttcaaagtcctcttgttatttggaagaggaaaaagcaaagacaagaagcatacccaacattgtaaaggatgatctttatgtgcgcaagctcagtccagtcatgccaaacccagggaatgcttttgatcagtttcttcccaaatgttggaccccagaagatgtgaactggaaaagaataaaaagggaaacttataagccatggtataaagaatttcagggattcaggtttgtcgttgtgcatgtttctgtcacaccagtgttcattcagtaccccagctggggttctatgtgcatgttttttataataataagagagacagagaaagtctaattagttctctagtatctgcggaacctatataatggaaatgaatttctgtttaaatttaaacctgaggatctagatcttaaaaagccctgttctatacatagtcatagcacggcattatttttagtagttctgtttttctccaattctttgtctcattccctcttcccttcttttcttcatgtcactcacagtagaaggaattcagactctgaggatgaggactcaggttctgacagaagcgccaccgtttttagtagagcacaaaaagcagagcataggctagacggcaactgccaaagaccttcactcttgctggaattagctaccaaacgggctgtaaaatcaccggactcccatgcagccaggagaagcagtagtgcttcggatgagcccaggtgcccctgtctgcatgagcctgcctgctgcgggtctggcctcagacaaccctctgcctgcttctgctgctccattagcctgggacctgattgcactgaatcaggaaacctgactcacttagtggacttagtacaaaagcgtaatgtataacacgctgctttctgtgcaactacatcagcttggaagtctgtaggattcaacattcttctttagcacaataatgtgtgagacaggatatatttacatgtggcagttcttttgaaaagccggttcaaaaaggcttgttagaaagtttacctaatttcacggttttgttgtgtgtggagatgtggaaaaaggaaataactttcaggtggagactgggaagggcaagtctagggaaaatgcaaagggaagattccttgagctcttttataaaacttcagagcaatttattttccctttttcctgctgattacatatacctattgcataaagtgcatgatgcacaacttgtgaaactttcaaagattattccttcttcttcaggggacacttaggccactgtggcaaatggaatgagaaagggataccaggggccaggcggggtggctcacgcctgtaatcccagcactttgggaggccagggcaggtggatcacttgaggtcaggagtttgagaccagcttggctaaaatggtgaaaccttatctctactaaatatacaaaaattagccaggcatgatagggggcccctgtaatcccagctactcggaaggctgagggagatgaattgcttgaacccaggaggcggaggttgcagtgagcagagatggcgccactgcactcagcctgggcgacagagtgagactctgtctca

SEQ ID NO: 110 - DNA, 802 bp, Homo sapiens
agggatagctggtgtgcgtgcagcggaaggcgctaactgccctggatgtggagacccgcggactggacgtgagaggcgggcaggggcagttggggcagctgcccctacaacactgaagaattggaataggaaagagtgtgggggtaggggacggggactctttgtctgcagttggaatgcgcggaggggcatggtggaatgtgtcgcgtcccgggaccggacgacaggaggcatgttctgcgctagcaccgtgactttgttcccagcgtggggactgtgggagagatggagagagactggtacagaaatggtgagacaaggagagagccataaagaggaagacagagagaaagaagacaaatgcataaagaggttcagagacgtgtgactgtggagatcgaaggcctggttttagggctagcgaacaccttctccctttggttttggtccacagaagactggtgatacagactccttatcagtgtaattgtggggactggtcaccagctcttgcttgagcttttccagaagaaacttcactactgaaatattccaagaggacttgatgctgccacaaagagaagagaatgaataaagttgtcggctttgtaagagccagacaaacagagatacccagcactaatcaactttgtggcaaatccctccacagcctaagaaggcgcagcagcagcatctggcctcgctgccactgggaggggagaagagaatggtggcactgaaggacatggcggatggggcagtaacaaccacgcttacactgctgggccgctccaacaggtag

SEQ ID NO: 111 - DNA, 3000 bp, Homo sapiens
agcctttgatggggagagtctgagatgggacccaggaacatcaccatgaagctgtccaggatggatgtgggaccctctgtcagaccaggccagttctcttaatgtaagatcagcaggccaaggtcctgggatatgggagctcccaggaagtggactgggatgcctgagggatccaagaattagcagtgtcctgtgtggtctcgctgagggaagccaggcaaaatctagcggctcagctgtaacagccggagctcttggctcccaagcaacaggaaacaattctggcttatttaagcagaaaaggactttatcaaaaggatcttggggaactcacaaaataaccaagagggctgaagaatacagttggtgagtcgaccaaggaggctgcacagcagtcaggaccacagccaaagtcaggcaatccagggatgacctcgctgccaaatccaggactccctggcatacactgccaccttgggacgtggatatggtccctgtcgccccaggaactggaatgccattgacttggcgactgccaccatccaccagaatggacttctgtgctccttgcatctctgtattattagttcccaactccaagcctttgatgggggcatctgatggattgagcctaaggattctgatggtgcctgttggctgcttccgtgatgtctggagttgcaaaatgtgccagaaagcagaaggatacaccgctattcagagaggattttcttagggacttgaagaaattgacctcaaaatttcagtagatgagaggactgtggctggcctgtgtctttggcactggttgttggagcccaatgaaaaattctacattgaagactaagggaaaaagaggtttcattatagagctgggactgattgcattttcaaaaggtggctgcaacaatatcccacacacttttctgctgtataatctgccacttctccatcaagtagaggagacaatttctcccctcctttgaatctgagtgagttctgtgactgttttgactgatagaatgatgtggaagacagactgtgtgacctgaaaggtgaggtcacagaaagccttgcaacttccacctggcctgtgaagaacacttgctcttgggatactccttcttggaacccagccaccatgctgtaagaagcccaatctacatgcagacaccacatataaggcatcgtagtcaacagccacagttaagttcccagccggcagccaacatcaactaccagtcttgtgagtgagctatcttggacatccagcttggttaaaccttcagatgactccagccccagctgacacctgactgcaaccacatgagaaaccaggaatgaaaatccaccagctgagcccagtcaactcatagaactgtgagagataataataagttgtggtactaagccactaggattggggcaccatgcaataataggtaaccaagacagtagcaactttggttagacacatgagccatgggatgacacataattaggtatatttttaaaaacttggattcagctttagggcaatgtgtccctaacatagagaggcactatttcagttcacatctgctgcctctgatcaaaacactctcttgcacttccagagagagagagagagagagcaaatgtgtgtatttactgacaggtgtccctttgtgtccccatctgtgtgactgtggagctcagtgtctctcacacattctagtatgatacttggtgccatatttgcaggtcctgaggtaagaacccatgctgttgtcttcagagagtttcatgggttggactgtgccatatatgggcaaaaatccacccacacgttttcttttaatcacctttatggatgtataatttacatatatacttttttcttattactttttatttatgtaatttattcattttttgagatagggtctcactctcttgcccaggctggagtgcagtggagtgatcatggctcactgcagccttgacctcctgggcttaagcaatcctcccacttcagccacctgagtagctgggaccacaggcacacaccaccactcctggctaatttaaaaagttgtttttttttttttttttgtagagacagggtctcactatgttgtcaaggctggtctcaaactcctgggctcaagcgatcctagtgcctcagccttccaaagttccgggattacaagcatgagccaccatgcctggcatcttttgtggatgtgtaatttacatacgtacaataatatgtacctattttaagtatacagtttgatgagctttgacgaatgtagcccacgaaaccaccaccataatcgaagtatagaactttttttttttttttttttgagacgaagtctctctcttgtcacccaggctggagtgcaatggcatgatcccggctcactgaaacttccgcctcccaggttcaagcgattctcctgcctcagcctcctgagtagctgggattacaggcacctgccaccacgcccagctaatttttgtatttttagtagagacagggtttcaccatgctggccaggctggtctcgagctcctgacctcaggtgatcccccctcctcggcctcccaaagtgctgggattacaggcatgagccactgcgcccggcctatagaacattttaatcaccccagagatgtgccccctgtgcagccagttccctcctctcaccccccagcccctggcaagcattgatttgctttgccactatcaatcaatttttgtcttttctggtatttcatatgaatggaatcatataggatagatttttatgtgactacacactattttagcataatatttttgaagttcttccatgttgttgtgtatatctatagttaatttctttttctcactgaattgtataccactgtatgatgtatcacaatttgtttattcattctcccgttgctggacatttggactgtttattgtttggggctactatgaataaaactgctatggatgtttatgta

SEQ ID NO: 112 - DNA, 2618 bp, Homo sapiens
ccctgctcaacagcgtgctcctggtgatactgccacccgtaacgggtactggctttgctaacatcctgacgagacgtcggggagagacgggaagtggcaggttgggcaagatagaggaggaaaggactctacctcatggcttgtccagaagagggcagggccacccctgcagccaggcctcccgggccctggaggtaggagggggacgatggcctctaagagcactctgagaccaggagcctgttctctcgggcctgaaggcttcgcttccactgttctacgctgccgccctggcctggccacctcccctccactgtgtggctggcttttctctgccttctgctgcctgatgggatctcccactcacctccacgaggatctgagaggaaagggtgctgaggagaggagcgtggagtgggcaggctcttgatgccaagccaagaatctgcatggctcatttgaaacttcgcagtgccctttatctcttgttctcttttatgtataagctcgtctttctcccatacagttgtaaaccccaaagggtagggactgtattcggttccttatttatatcctgtaagacagtgactctcaaactcatcagaatcacctggggagttttaaaaacttgattcctccagaaaccataaagaccaaagatttaaaaatatcaccatattaaaacagaatgaagcaaaatccttctgtaaagctaaacaaacaaacaaactcatgaatcagtcagaagaaattataaacaaggggaaaacagtatttggaatatagatggaagacacactaatttctttaatttgcaacaaatgtctataaataagaaatatacaaacaactcaataaatgctgggccaggaatctgaactggcagaacatggaaaagaaataccagtgaccaagaaacatatgaagagctgctcatccttcctcagaaataaagagacgcaaatcagaacaatgccagaccacttttcatgaatctgattagcaaaaattataaagtttcatgatgcccattgctgatgagagtatggaagcagatgccagtgaatgcaaacttggtggattttggcacctgtgtgacaaggtggggcggtggttctcacacctgcatgagcttctgaatcacatgatgaacttttaaaaacatagattctctgcgcccccatcccatactgccataaggcacccgcgtgtaactaagggcacaatttgtgaagttcgaaatggtaatagagaccagactagtaaatttcaactaaaggaattttgtcaacatacatcaacatttttaaaacatgagtaacctttgacccagcaattctactgatgggagctgattctgaaatttcccacagaagagtatcaacgtcggcaagaatggatgcccacagcagcattatttgtatagcaaacaacctcaatgtccatcaataggaacctggataaataaactgtggcacactcttagatcttttaaagagatttagtaggaactccatttgctgatatagagcagtctctgagttatgttgtgcaatgaaaaaatcaagcagcagagcagtataaatggtgtaatccattttccacataacttttaaaatgacacaccatatactttggtaaatgcacaaattctttttcaatggaaaatctacaagaagctgataacagtggcaactttgagggaaggatgagaagagaggttcttacctttcattcagtactgcttgattttcctacttcctactttgtgcattgattagttttagtggagaacttcagtaagtgtcatctgaaaggtggagttatgggacaattttggtttctcctttagagttttctgtaaaggatattcaataattgaagattctcaggccatataccagatacaccaagtttgggtggagatgctggcatgggactctagaaatcagcttgtcgtgtgattctgctcatcagtcaggtttgagactcactgcagaagattctggaagaaaaatgctctcttctctagctcaggggttatgaggatgagagggtggggtggctgcagcccttttgtttccatgaaaggagaacctgaatgaccttgtgcaacctaaggtcaaagaaatgcatggctggcaagtaaaccacagagaggaacttgtccgctggtacatcagtaggccacagaatcatgcctttcccgaagaaggacgtcctgtgtctagacttttcagttatgaagccaatacgtcctctttgttgtttaatgcagcttgagttaggtcttttgtcacatgcaatattaagaatcctaactgatagacctccactgagacaagctgagtatgtctttatctcttgcagactgaaattgcctaatttataaagtatttcatgatgtttgcaagataaacccttgtctgctgccttgggctacatctgatgattgcctgcaatatttctgcctctagaaatgaactgtcaaaccaagaagtatgtccttggaatgcatcctccactttagcaaaagaattatgtgttttgtttgctcttcatcatgtaactcttgaataaatttggatgcaacagattaagggcataaccaggaaata

SEQ ID NO: 113 - DNA, 550 bp, Homo sapiens
ggttcatgatgacacaggaccttgtctgaacataatgatttcaaaatttgagcttaaaaatgacactctgaaatccagtcagtgtgcctcactagacttttcgatttcaagattttctgcagaaaatgttttgaaaactttgaatacttaaaaatggcaggtgtagtattgcactttgctagttgctcagatacccttttttatttgtatagatattctgagttcctttttttttctacatgttgtacgttgtcgaaagctaaaaggaaacttatccttggatcacggaaggcagaggcatttggtgagatggaaacaaggatgtgtaaaaatgagacgaccacctctcggattaaaaaaaaaaagtgccagagttctagggttctaagtgatgtccaggaaggaggaggaataatatttatggagcatatattatggaacacaaatattccctctgtatacttgcatttttttctatcaattgacgcttacaattatttttgcaagttggaaaaaaatgcagtattaatttcatttgcaacaaatttaa

SEQ ID NO: 114 - DNA, 599 bp, Homo sapiens
accccccgcgcaccgccgcccggcttgtgcccgccaggcagcagcagccgcagccctaggagagagacgcgagaggccggagccgggggaaaagtcaaaagccccttcacgcacagcctgtgttaaccatgtacctcagtcccggcgcttcccccacaaactgagagcgacagggagaatttccgcacagtttcatccttggacacttcaggactgagcggtgcagtgaaatctttctggataaaagaagtgggctaatggaaggagagacagaccaagtcccaatgacattgcctgaccattttcaccttcgccatcagcagtctccctcacagcattggtgtgggcaggtaagaagaaagcaaggccctgaaagaatatacattggaaaatgagcagtaatttgatactcttgtggaagagcatgactcttcgccccagaaaggccaatgacacctttactacagcgtaaagatcaaagccagggactgtgaaactgcctcatgatgtttctcccatgagacctgtgtctggatgtttatatggaacaaaacatggaacagaggcaatagtacttgatgtgtcttcagctggggctt

SEQ ID NO: 115 - DNA, 1751 bp, Homo sapiens
cctttcctagtgtccccatctttgctgccttctgtgagtttgatcatgtggactccatggaggttggccactgctgggcaatgcagccaaacaaagtgagcaaaagtaggctggagggctccgtgggtgactggggctaggctgcctctggtgccccaagaaccctgaagccaccttgcagctcttctgaaatgggttgggggatccagctatctgtaattgtgaagtgaagaggatgtgactgccaggtaatgctaaccccgaatccttggtgcctgtgttatgcaccatatgctgaatttcggttccagctgtgtgctaggctgggtctgatctggcaaagaggaactggctccacagctctgggcagaatccactgctgctcccacacagagaagaccaggggaaccgcagtcccactctgagtggaaacccttgacacgtgttacacacaaacaacacttggggtggaacaagaggtttacaatgatctgtctgggacccataatacaattcagcatctctttagagcttcagtctatcaaacattttcagactatttcatttaaccttaacagttattgaaatgcttgggggggaaaaaaacctccacatttgagatttccatagcagaagcatcaccagcagcctcaacagccattcaaaaagatatcgtctgcaggcttgttacctcttatcgtccctccattgtattatagaactcttattcttagagagattgcctggaaagaggtaaagtatgcatagacatggtcagccccatttgcagctgaggaaatgagactcagagtggcaaagtgactttttcagaatcatagcagtaaatggtagcattaggaagctaagcctgatcatcctgttcttgtcctgttgaggagatagtgagagcaaaggaaagtggcaacaatgaaggaataaaacccagctcgtccccctgttcctcatgcccaacccttgccaagacttcaggtaacagaaggaagagaacacatggatgggcacatgctgggcccggaagagctgtgcatgtcccacagaccacgagtgtggagcccatggccgtgtgaagggggtggggtcccagtcctagaagcaggatcatggaagtggccttggaggacctgacgaggaagcctatgatcttccaggtacttttaggtgatgtggatttagacactggatgtggctgtgaagcgggcttttgcttttttggttgtccggcatccatttaatcacgccccagcttcctgcttgggaacttccactaacgctgtcagtccatggacttctagaggagctgaatctaccgctggctcaggaacaggaacctgacctgggcctaagctaatgaatccatcaaatttaccttggcaaagtgattgcctcaggaatgggcagtgacccaactagagccaataggacttttcccaggtatcctgaaacagacagtctttttctcatggatgtggacctgagacagtatagttctgggagttgctgacaaccatcttatggtcatgagctgatttgagattggcttcaacaagcaggaagtggaacagatggagataaattggatcctgaattgtggaaagcttacaaagggcttctgcttctgactacgatggagtgactggtatcagatggccctcttgtcaggaacaaccataaaagctatacttcacccagctttttgatagcatggagaaatgtcaaggcagctgggattg

SEQ ID NO: 116 - DNA, 560 bp, Homo sapiens
cacatactaacaaaaaaaagaattcaacaaaatgaggagagaaactatcatggcaccatcctcaagcatgaacaatttctaagagtctggagaaaagcaggagggaaggcaaaccacaaagaagaaacctcaaaatagaaaatgccatgatcatatcagattccttatggatgactttcgcctttccacctggatagcccagatcagcttcaacctagaaaacattcatcagcagttttagttgctgcagcacagctctatttagagttatgcacatcccataagatttaaatgtaggataagaagaaaatgtagcagcagcagcagcagcagcagcaagaaaaaaggggactcccctatggctgctgcagctgataaagatgcatccaagaaaacttccaaggaatggtcaatgtgtggcacagctaactcagtgaaggccaaactgctgaagaatctatttgtcttaactagctgaattcaccaatctgtttcccaaaaacttgttttgtgaaatattttcctgtaatatcttcagtgaataaaagatcttattctta

SEQ ID NO: 117 - DNA, 745 bp, Homo sapiens
agactgctgtgctagcaatcagcgagactccgtgggcgtaggaccctccgagccaggtgcgggatataatctcgtggtgcgacgctttttaagcccttcagaaaagcgcagtgttcgggtgggagtgacccgattttccaggtgccgcccgtcacccctttctttgactcagaaagggaactccctgaccccttgcgcttcccaagtgaggcaatgcctcgccctgcttcggctcgcgcacggtgcgcgcacccgctgacctgcacccactgtctggcactccttagtgagatgaacccggtacctcagatggaaatgcagaaatcacccgtcttctgcgtcgctcacgctgggagctgtagaccggagctgttcctattcggccatcttggctcctcctgtaacaatttcttgagatgaagatcctgaataccaaagagggccgctgacaggtctaggagtacacttctagcacctagcagagagaggcttcactacatcatgcttcctgacatctctccctttgaagagcagtcagactcctgctttgctcttcagacttaatttgggggtttaacaggtgaggttgctgggggaactcttttacaacatctctctgaaagaatccgggctgccagtttcatttggtttgggtgtcagtagcatgatggaaagacaaaaaaacacaacttgacatctgcagaaatgggttcaaattttacctgcaactcaccaattctgtggc

SEQ ID NO: 118 - DNA, 500 bp, Homo sapiens
cattctaccttttcctacaatgaatccaccagcagaaattcctgtacacatcttatcaacaaagaatttgaacctcaaagagtggctcaaagaggtcaggaggcaccttcaacacttttattggagatctccttgtctagatcatcagattctcactgtgttacctaggctgcagtgcagtggtgcgatctcaactcactgcaacctctacctcctgggttcaagcaattctcctgcctcagcctcccaagtagctgggattacaggtgagtgccaccacgcctggctaatttttgtatttttagtagaaacaggtttctccatgttggctaggctggtctcaaactccttacctcaggtgatccaccttgcctcagcctcccaaagtgctgcagttacaggtgtaagccactgcctggcctaagatatttattttaaattgtatttatggttagaaaaaatattcatttatagtgatgtaaattatctgattgattaaa

SEQ ID NO: 119 - DNA, 562 bp, Homo sapiens
gaagattggaggggatgagtcaggggcaaggaaggattaacagattctgcctcaagtcctggtgaaccaactcctctccccaagacagacacatactagtgaaataaattggatttaaatcatcacctgaggcaatcctgaaagagaaaagcagtcctagaaaagagtggaggaaaagaggacagccccattctctttgtgaccacgaagactgccgccatgtggttgggagccacgtaacttcttttagtgccagctgagattcttctgccctggaactagttcctccgagttattgccaggcctggagattgaattcctgcagctggaaggtggggaaagcaaaatgttgtgagcacctaccatatgccaggcactgttcagtgaactggttgtacaggagtgaatgagatcatcttgattttgagaagtttataatctactcaagggaaacacgtgtaatcaactatgtttcagacataacccctcaaaaccaaagcagaacctcttcaaggagctgagagatgcaagcctggtacagggtcagcatgactcaaaaaga

SEQ ID NO: 120 - DNA, 641 bp, Homo sapiens
cactagttgtaccaataactaaccccaaggaattggactcagaagagcaatacaaattgcagccttgccacttacgagctgagagatcttagccaaaataactcaatctgtctgagttgtattttttatcagtcgactgaagatgaataatattcaggctacaagtttatcaaagagttaatagagatggagtccatgttgcctcgcctggtcttggactattggcctcaagcgatcatcctacctcagcctctcaaagtgctagcattcaaggtcaggagatcgagaccatcccggctaaaacggtgaaaccccgtctctactaaaaatacaaaaaattagccgggcgtagtggcgggcgcctgtagtcccagctacttgggaggctgaggcaggagaatggcgtgaacccgggaggcggagcttgcagtgagccgagatcccgccactgcactctagcctgggcgacagagcgagactctgtctcaaaaaaaaaaaaaaaaagttggcctaaacagggacacacagtgtggtccagagacctggtgacagtgtgtgaattgttaccagttcacagagcagtaagtattacaaaacttgggagtaggtcattagaaattttatagggatttcagcaatgt

SEQ ID NO: 121 - DNA, 644 bp, Homo sapiens
ggggattgggcagtgcaccagaagaatctaccacattcccgaggtttacttcaagatgcaattgggcctgcctgtcaagcctttgcagtaaacattccatgcatatctaatgagtgacacaaacacagcttggtcaaatccaagatgggtgttcctgatctgcctgtagctctcctccaacccagactcctttcaaactgtgcctccaccatcttcaatatggagcttccaagattgccctgctgccctgcatcaagcctgcaaaagaggatagggggtcaggccactcatatttcattggcccaaattcagtcacatggccacactcactgcaagggaagctgggaaatggagtctagctctgtgcccaagaagcaaagaaaaacagatttgatgaagacttagtcaatctctgcaacaatgaaacagataagaaggcaaaagaaaaagaattttacaacctgaggagggagagaaaattcagttaacaaaaagatagactacatgccaaggtagtctgcagaattctacctacccaaattatgtgttaaattgtgaaagaagttatgataaaaataggatgagggtgaaatttgaaaaatgctctggggacacatagcacactccttccctggtgacacagt

SEQ ID NO: 122 - DNA, 1747 bp, Homo sapiens
gtggccctgaaaatcagatattccccccttcctgagagttagttttatttttattattgaagattgtagcagtctattgctacatgtgcagtcatttccaaactatttttgcaaagactgtattccttctgtgtgtcatcactgaagtctctgttccttagtttgtgtttaatagtttgacatagatttccttgaaaggagttaaaactagcagaaaaatctctctcccagtctttccagtctttgtagattggttctgtgctgggcttttccattaatacttagccaggcttgtactgagcctaacaatcaggcccaaaagcgtagggtctttgcagatcttgtctgagcatgcttcttgctgtgtatgcacgtagttttctaaatctccctgtatgtgctgttgaatattctaatttcccaaagaaactcctttgcagctttttctcacagaacatagatggttttttggatatcttgaccatagtctttcgacccaggtgtttgcggttgttagttcaccttacacttttttcaagcattgcctactgcttacgatgagtgctctgtcaatcctttaagtagccccagacaggctaccagagacttaaacaagaatttgtaagttctgctcagcttcctctagaaatggggatcagggtccaagacagaatgcagttgctgatttcaagactgctgcaacaccagggagcttgtgggggaagggcaagcagaaatgtcacaaagctttcttgccattttaaagttgcctgttcttgactcagcatttgcttcattgctataaactttttactgtttttcagagttctgataaaattggctatgcctgttcctgctttaaaaaatatatatatattttttagggattggggtctcactatactgaccaggctggtcttgaacttctggcctcaagccatcctctcatttcagcttcccaaagtgctgcaattacacgcgtgaaccaccacacccagcccctgcttgtttttcaatgtgcctactccaccatgttgctcaagtatgtatattttctaaactaccttgtagtgttgtgatgggaaataaatccctgagccttttgaataactcagagagatcaaaaacttagtttatcctattcgaaggattagaaaaatgatatatctttcactttttcagggataggctcctcattagaaggctcctatgtgccgatgctgtacaagacatttcatttctcttaatgtttacaacaagcttgttgccaaggctgatcttgaactcctggcctcaaacgatcctcccagctcagtctcacaaagtgttgggatgtctggccaactaatgactatcttaactcttgtgtttcaatgtttatgccttcttttatcttgactgattgtatgactatgtcttctagaacaatgttgaacagaaatggtgagagcagacatccttgctttaatatttcaccattatatatgatgttaggtatagatttttctcacagatgccttttatcagattgaggaatttatattcctactttgccgaaaggtttttgtagtatgagggggtgctgaattttgtcaaacactttttcggtaataattgagatgattggttctgcagtcatcgagatgtggattttctcctttattctgttcgtgagtgattacactggttgactaatgttaaaacaaccttactttccaggaataaaccctattatcttttttataca

SEQ ID NO: 123 - DNA, 704 bp, Homo sapiens
tctgcaagagtcctgctcgttcaaggcctgcatacaggaaagaagcaggggaaaagcgttagaaacagcttttgttctacagcattttaaaatataataggtatattgaaaagtctgattcagttacaatcagtgtatggaatcacaagaagatccataagaaacaaggtgctggatttctccgttgtgttcgtctttttccagtgccatcaaccacctcaaagacactggttatcagaggttggatttatgcaaacttgggccaaaggacagttagaagacagtaggtgccgtgctgggcagtgaatgaatgaaccttgccctggggttaacactccagtgggatgaacagacaaaccccacaagcactgcatacggatgtttagcagcatctctggcctctgcccaccagatgccaggagcacaaccacagttttgtcaagcaaaagtgtctctggacattaccaaatgtcacctgagtacaaaaatcacaccagttgagaaccactgctctctgatgattcactatgatctgtgtaataattctcacactaatctttgctagagacaaaaaggacttgctatataattttagtacctttctactggtcaaattttaatcatatttcaaaatgaatagcaaagaggtttataatcaagttttataaaaattccaaatgtaataaagttatatttgtaactta

SEQ ID NO: 124 - DNA, 444 bp, Homo sapiens
aactcccagatgccataaggttgatttttcagtgacccttcagaaggccagtccctttggctcctacgtggcactacaggttccatacacctgggatgctgaggccaagccagagcttctcggagtctcgggctacggcttttccctagtgcaatggagacagcaggagacaggtccctaagcaagatgcctggatggtttttggagctgtccatcctacccaggtggggctcattaaccataccaccttggtgagcagctatggagcacatcctaaccctcacgggctaactacctgagatagcctctcaagcttttggagagcctcatacttgtcttgggacctaaacaatgaatgacaggccagcaagcgctgatttcatgctttgtgtggtcaggatgatgtgctcaaggggctggtggaaagatccgatttctctggtg

SEQ ID NO: 125 - DNA, 554 bp, Homo sapiens
aacttaaagaagttagatagatctgtagtcccaaagtacttacagagcaatttattaagacttgggttcctgagaaagttttattctattactcagttattgtcttcaatctgccattcactgaaaggtttctttggccttaattcaattctctatctcctacgctatcagtgtttttgttgagcacttttctatccagacagataacaggatttggtgacagctttcaatttcattactgctaaaacttttgtaggtatacaatttctctgtgtaggctggtccctgactgtgatttatttagctcattatttattggcctgtaaaactggcccaactctgcaaaataactcactaattcttcccatgtgaaaacctctgaagatatttatcaacacacattgataaaagaagttgtgtttttccttacttctttatcagcatcattgctttgcccatctttgatgatggtattatgaagaaggatttgcttctgaagtataggtatgattgctacaaataaaatatgcctcctacaaataaacaaaaacctt

SEQ ID NO: 126 - DNA, 428 bp, Homo sapiens
caccgctttgctcccccaggaacaccagcttgaatttcctcagcggattcccgaagtctccgcccgtggacattgtggaactagaggagcggccgccgcctcagcctagagacctcccggaccgatgctgctccagccagctgacgaaaaaggcgagcggaagggcggccgccgccgcctcccggcagagtagcctagcaccgagcgaggcccgcggctgggaagggaaggagggcggtgtcggcaggagccaggggtgtcctctggcttcccaaagctagggccgttccctccttccgcactcggctcccagacctggggaagagaagctgagggtggcggagccggaaccgcagacgtatctgggacctctcacgcgcagcgcctgagcttccacagctgccgccgccgccgcagcccaacctgct

SEQ ID NO: 127 - DNA, 589 bp, Homo sapiens
agaaagtgctaggcacgtaggcgttcaggagacagtcacggtactcgtttccagacagaagtcatgaggaacaagagggaaggtgctttcccgtgtgcagcgcttggggagactcacacagacagaggatctggcatgacagggaaaggaggaaatggcttctgttaatctctccttcagcttctcccgcccttcccatgcactcttcctgtttccctttccagttctcacggtgactcaaggaacaacgtgtgaaatgaaagacctcaggtgctgtattggctcttgacagctcttcagaagaaaatacctcctgcctgttctgttcagtcctggtgcaggtgagtcactgccttgccagccaggcaagtattttaagaaacaaaatctaagccagaaccagcagagaaatacgagggatggattagcgccattagctttgatggtgtcttgttgtcatggtgctaggaaaatcactatcatttacagtcccactcaccagctgttttgctagaatttttgacatgagaggctggtggccaccctaacacaggcgtgggacatgggtgtgcacacacacgtacacctg

SEQ ID NO: 128 - DNA, 790 bp, Homo sapiens
tgcaagcggggaaccttgagctacctacgccagcgttctggattattttccaaatttggttcctgataatctgagaaagctatgcgctcagtaagagcagggaccttgttttatcaaactttgatctttcattaagcacacagtgggcattcaacaaacttgtgtaaacttggaatcagatttagcccaggccggtgcggtggctccttcctgtaatcccagcactttgggaagcctaggagggcggatcgcttgaactcaggtgttcgagaccagcctgagcaacatagcgaggctccgtctctacaaaaaatacaaacactagccggccctgtggtgcagacctgtagtcccagctactgaagaggctgaggtgggaggatcccctgagcccaggcggtcgaggctgcagtgagctgagatcgggcctctccattccagcccgggcgacaaaaaatccagctaagtaaaaattggcaagatcctgtgacaagatcctgtgacaagatcctgtgatcaagacaaagttttgcccccaaaggacttgaggctatctgggaattccatgtttgacagaagcgctgacagcataaccaagcaaacaagaaggtattcagggacgctgaaacggatcttcaaagaagactcagtgggtgatttttaatttctgtgtagtattatagagcttaatgcagaacataccaaaaccttggagaggtaatgatagggtcatgcatttcataaggcagagtaatgccctgcaacaacaaaataaagtcaaagagttcta

SEQ ID NO: 129 - DNA, 576 bp, Homo sapiens
ggtcactgaggaagaatataagttagcctcgtagtgaccatgtggaagtcctgacctcgcttgcagacttgacctctggatgtgacaagaaatgctgaatcagcaaatagagtgaacgaacaatcaagatgagatggctgctgttgatgtgattctctaggttactacctttcttcctgctgcaaatgctgcatgacactaagcttacaggatctagaagcagactacaaaaaaagaagaaattcactctgaagactgaagaaacactaggctgatcttaagtttccgaaatacactctgtaacactacactgattctttgaatctcttgcaaaaagaatcaaaccaggacaaagttcaacagataactggtcaaatgcttaggaatgtctatgtccaccaagaatatggaaccattaatgccatgcttcaggtaaacttgttacaaaatttagtcttcgataaattagtctctgcaaatgatttaccattgctctacattagtaagctgaatgtttcactaacaaataagaaaataaaatatttcatgtttttacagctaacaacttagtaatac

SEQ ID NO: 130 - DNA, 964 bp, Homo sapiens
aaatgggccaagggccccgggcttggaagggcaggtggcgcctagacccagcgttcccgctccacaggtctccaggagttcgcccggcgtttcctctgcagcgggtgctactctagggtctgcgacctcccgctggactgcccagttcaggatgtgacagtgactcggggcgaccaggctatgttttcttgcatcgtaaacttccagctgccaaaggaggagatcacctattcctggaagttcgcaggaggagctccggactcaggacttgtcctatttccgagatatgccgcgggccgaaggatacctggcgcggatccggccggctcagctcacgcaccgcgggacgttctcctgcgtgatcaagcaagaccagcgccccctggcccggctctacttctttcttaacggtggggcggggcgcggccgcgtgagtgagcggggtcgggagaggggtggggctcgtgcctggctgacgtgcgcgcccccgcagtgacgggcccgcccccgcgggcggagacagagttgcaggcctcgttccgggaagtgctgcgctgggcgccgcgggatgccgagctgatcgagccctggaggcccagcctgggcgagctgctggccaggcccgaggctctgacgcccagcaatctgttcctgcttgcagtcctcggggccctcgcatcagcgagtgcgacagtgttggcgtggatgttctttcgatggtactgcagtggcaactaacaaaggtatctttcctccttccctatcctatttccatcctgaaaataaagaatatatttcaactctagattgtttcatctccgaaggtggtcactactaactcaggtaggaggaggtgcagcaagcccacacatgcccagatgaatatggcccgcataatgacagtgataggcatagctatcccagtgcaagttaggtgggaacccagataccccctcaggttact

SEQ ID NO: 131 - DNA, 394 bp, Homo sapiens
ctctgttcacggaaagggcctgggagctgcaacacctcaacagcaacaagcacacctgctacctagaacttggtttctaaaaaccatcctcctctaaaaggaaacagagctctttgaagaaacgggtctccctatgttgcccaggctggcctcaaactcctgggctcaagttatcctcctgcctcggcctcccaaaatgctgggattgcaggcatgagtgaccgcacctggccacctttccacatttaagagatccctgggatactgcgaagcaggagtccatctccagacatgaggagcaggtgggctaaaggaaacaggactggggagtcttggaggggcagagcaatgcccagggacacagaaacttttgaataaagacaagagagaccga

SEQ ID NO: 132 - DNA, 1191 bp, Homo sapiens
cttttccgtctctttctttttatgtcaccaggggaggactgggtggccaacccagagccccgagagatgctaggctctttctgtcccgcccttcctctgactgtgtcttgatttcctattctgagaggctattgctcagcggtttccgtggcaacagtaaagcgtgggaattacagataaattaaaactgtggaacccctttcctcggctgccgccaaggtgttcggtccttccgaggaagctaaggccgcgttggggtgagaccctcacttcatccgttttgtctgcagctcgatttcttggttccctgactgggaagcgaggtgaatggcggatggtcaaggcagctccttaggcggcttaaacctgccctgtggaacatccctgcaggggactccaaccagcccgagcaacacggatcctgagggcgctcctggttaggcatttgccccactgggacgcctcgccagagcactgtatggcaggcccccatggaggatcaacgcagtggctgaacaccgggaaggaacgggcacttggagtctggacatctaaaacttgaatttctagtaaaccagcaccagcctgaagatcacattctcatcgaaaggtggaaagaagaaaaactcgagccagcctggaaggaccctaccttgtgttgctaaccaccaagactgctgttcgtacagcaaaaaaggatggactcgtcacaccagaatcaagaaagtgccaccccctccagagtcatgggccacagtcccagaggaaaaccctgccaaactaaagctacgaaaaatctcttttcatctattctattactcttctttctttcctcgtgctattgctgaccatctagttattaacataaccaagtcaatttcacctcaaactattgcatttaatgcttgccttgttataccctgtggggacttgccaagtcaaagacagctctctacttcagaaaagtacttctgtccctcctgactctcctcagactggacattagtaaactaggaccatttaatccagggagatttcgataaagaccccagtgccaaccaggagtcttgtcccctgatgtagagtttttatgccgtagttggtccaacgttctgtggaccactaaagagcaagaatggactgccccaaccagtttttgtaatttcctaaaaccatacattcgttttacta

SEQ ID NO: 133 - DNA, 3325 bp, Homo sapiens
aatttgggaacgagatgcccggggatgcaaccagccccgcgctcggaggcggcggtcggagttccgtgcgcagagggcacacaaaagcctcgaggatcattgcctcgaccccatcccccaccgcgcggcgacgccccctacgggctgggacacctccactctcggactgctgccgggtttccctccggctgcgaccctggaggatttgatggaaatgctacaagagaagcaggctctccccttctgaaatgatgagtgataatgaccatacaggtcaacttttccaccacttggagggagcctgtcaaagaacaaaggcaacagagaagagagcagagctgaggttgggtgagagggagaaattcctgagtgcttgaatcccacatgccggaagccgcaccacacttggacttctcaatacaggagccactgagaaaccaagtcatgctgaagacctggaaatcccagcaggctgcaaaccagctgcaactacaatgggtcagcccttttgagatgctgctgactacccacttatctgccaagttagccagtgttaagccatggattcaccacgctcagataaaacctgcccctctgggatccctccagaaaaaaacaggcatgctgttgtgaaccctaagatggccttaagttaatattcaatgcccagccaaagaccctaaataagaagtcataaaggaaacatgtgcttttcaggttggtattattctccccaaaacccttcttgcatgcaggatgtaatgaatcagaaatagttgttagtaatttttttttttttgagacagagtctcactctgtcactcaggctggagtgcagtggtataatctcagctcactgcaacctccacctctcaggttcaagcaattctcatgcttcagcctcccaagtagctaggactacaggtgtgcaccaccatgcccaggtaatttttgtatttttaatagatacagggtttcaccacgttgctcaggctggtcttgaactcctgacctcaagtgagccacatctgcctcagcctcccggagtgctaggattgcaggtgtgagccaccacacccagccatgaatcagaaatactttttaataggcttaggattgttctcttggattccttaagggatccactttaattcttgggtgttttttttttttttaatcatggtgctccaacaagcgggatgccagtcaggtaatcctgagcacttcagattcaggggtgatgtttgcatttcccatcattatcccacaatgcaccccttagcattaagtagccaaaaaggcagacaaccatattccccatgatcgaaaaattgatgaatagaaaaaaggggattaaaaccagcccaattgtcccatagaaatgatattacggtttttaaaagaaacataaaaattaaccttcctgtttttaaaatttaaaacttacatttatctcatctgaattccttcctcaaaaaacagacactcaggcaaaaacaaaaacctaaaactcatcagatcactgtatccagacagagacgccagacccctcatccatcatgattgcttctatactcctccttaattcctattttcccacctttcctgctatacaaaacccccaattttagtcggtcagacaaacacatttgagactttatctcctgttctccttggctgcaacaccccgttaaagttttcttccctggcaatagttactgtctcagtgattggcattctgtgtaacaagcagcagaacctagactggaaccctggtgtttcagtaacattaccttgtagtaaatgctgttgtgtcatgcccagattcactttaccaagcccagatcccacagattaaagggctcagctccacaagacttcagacaccagccacaaatggggtccccaggtgacccacacttctgcccagtggactataaattcaagggttctgtgactttccctacccagctttgataattcactagaatcctcacagaactcaggaaaatgccatacctactattacactttattatgatggacacacacgagcagccagatggaggggtactgaggaagcatctgaatgcaggaggctctgtccctggagagttgggatgagccactctcctggatgtgttcaccaactcagaagctctccaagccccattgtgtagggattttttatggcagtttcagtaagtacacatgattgattaaatcattggccattggtgattgaactcaatctctagcccctctcctgctctcagaggtggaagagcaaggctggaagttctaaccttctcagtacatggttggtttttcctgtgtccaggtcccatcctaaagctacctaggccccctctgcccaacaagagtcttctcattagcaaaagagtaatttccaagggtgttaggagctctatgctgggaaccagggaccaagagtaaatatatattttgtattttaccacaggtaccaatcaccctccagatctaagaatggcttcaggctggggctgcagtcacctctttgcccagcttctcccctgccctattctgcttcacttgcatccttaaaggttccacccaagagctcttctacaagaaagcacctataaagccagacacattggcttatgcctataatcctagcactttgggaggccaaggtaggaggatggcttgaggccaggagttcaagaccagcctgggcaacttagtgaggccccgtctctataaaaaataaaaaaattaaccaggtgtggtggtgcacgtctctagtctcagctactcaggaggctgtggcaggaagatggcttgagcccaggaggttgaggctgcagtgaactaagatcatgccactgcacccatcttgggcaacagaatgagatcctgtctctaaaaaaataaaaacaatttacaacagtaagcacctgtacacaagccccatctccagtcctgtttctagggcttccaatttaacacacctagaggctgggcatagtagctcatgcctgtaatcccaatactttgggaggctgaggcaagtgaagcacttgaggtcaggagttcgagaccagcctggccaacatggcaaaaccccatctctactaaaaatgcaaacattagctgggcatggtggcacatgcctgtaatcccagctactcgggaggctgagacaggagaatcacttgaacccaggaggtggaggttacagtgagccaagatcacaccactgtaccacagcctgagcaacgaaagaagactctgtctaaaaaaagtaaaaaataaaataaaacacacctggagctttcta

SEQ ID NO: 134 - DNA, 392 bp, Homo sapiens
tccttggaggggcttctgggtggccagccgtgtattgttgcttggttgtgcttttagggttgtctggcttgtgtgggtgctgggtttgtcggtgcagagagcacagctggttccaggctggcttcagaaggctgcaggcagattcctggggagagggtgacactatagcgccagttcttcttacagccttgttctgcactttctaaaaatattcctgacaaacagctaatgggcattttggccattctattgccaaactattgctgccatttcaaatggaatgcttctccttcaagcctgttcatcttgacttatatgatggggatagattcatccgtttcatgggacttcacaacagcccactcaccagaggctctttgaaaacaatcaag

SEQ ID NO: 135 - DNA, 781 bp, Homo sapiens
gaaacagactgcaggacatccttggctgagggagccctgcccaactcagatcactgtggtcaccggcatggcagagaggctctgggtgtcgggatgttcacaggaggcccaaggactgtttgagattccattgatcctgaaggcagtggacagctgcttttcaacaggagagtgaagtgctcagactgggggacggttcaaggaattttaaaaatgtgaacgctgagacactttgaagacagtcatgactatggcctttgtgaggggtgacctcttgtgctatccctgttggaagtttgcttcctagaacatctgggaataggattattgctgacgcaagacgataaagaatgaaggagaggtcaggagttcaagacaagcctggccaacatggcgaaaccctatctccactaaaaatacaaacattagccgggcgtggtggtgcatgcctttagtcccagctacttgggaagctgaggcaggagaatcgcttgaacctgggaggtggaggttgcacagccttggtgacagaaggagactcagtctcaaaacaaaaggaatgaagcttaaagtattttcagaaatctgaggggaacatcacctgtgctttattggttattttgacaagtgaaatagaggacaaactgctttgatttgagttgatgtctacacatgtgaactcatgagaaacagcaaagcccacaatccacatggacatcatcatcgttcgggaacaggcatggtctccattctttccatgcacacgccccggcttcaaaaa

SEQ ID NO: 136 - DNA, 1646 bp, Homo sapiens
cagtggcttaaggggtgcaggggtctggagaaatgagactgggctgtgggtgagggtgtaggtctgtaccccttaccccgtctttcttcaggaggcccacagcccctaaagaccatctgagactctggcttgccatttgtcacatctcccttgccgcacccacagccttcagggacaagtctgtgagactcctctttcatctctacccacgggttttggccatcagaagcaggtccacatatgcggccactgtttctgccgttctgctagaggagtgggatcagctgcagcctgcgtccctggggaaagcaagagttcctgacggagactctgcagtttgtatgcccgaacccatattcactttgaccctgacccatcctcagcttggccttggggctctccctcatctctgacccttccaactacaccccagttgggcctcctctgctggggttcctctgggacttttgacctggttgcggggggcgggtggagaacctccctttcccctagatgaagcccagaaacagcctgagctggttttggttcctcttcttcacacctacatgatgaaatgagatggtccacgtggacgggctgtgtcgcctgtgatgctctggtcacactgaagtcatgatgtgtggtaattgtctatggagaggggtcatagaaagccaggctctggggcttggaccagcttcaccgtgcgctatagcagcttcccctcccggctggtgtgcagggtggggctggaggtatagtttatgaccagcctctgtggatgccccagcccaggccctggttctgttggaaggaggctctcagatcgagggtcgcatagacagggtctgctctaggtctgccaggatcggcctttccagcaggatgggtccctggcatacccaccccaggacctggaatcttcttgttcctggttcttagccatctaatttttgttctatttggacctttcattgatgagaattagcagcccgtccccaccccccagcccctgccttaaagaagtggacattttaagcggctcgagttggtcttcgagttcaagaggacaaatggaatacagaatgacgaacctggcttatggccaggagcccccagttccttttttttttttttttctggcaagtttgtgtaaccaaaaggccccagttcttagctcaacatgagagtgtaaaacccagcgttcaaggaatgtgaaccaatacctggtatgggcaaggacaaggaggagaataggaagcagaaggaatagaaggacccagactaactccagaggaaaatggtgagctaagacctttactgcatcacaaatcaataaatacttattgagaagctgctacatgcaagattctcctgcctgtaccactacgcccgaggtttttgtactgtgacactgagggacagtctgccaagctgctcacggcccttcagtgagtgggtgggggcggaggagagggtctgtgttctgaggggacattggccctggagacagggtgtgtaggagattcgtgaagggggaacgaggcactggtggctggctgaagagctccagagcccagatggtcctaggactcctgggctcctggctagaccctgagtgagggatccagatattggaatgcctg

SEQ ID NO: 137 - DNA, 3059 bp, Homo sapiens
acactggagcaggaagtcggcctgtggccggccatgttcatgagggcgcgtcccttggcacccctgtagccgctatgtttcccacgcccgtggcaggcctgagagattatgtttgcggggggtgctttttttgtagcttctgtgttcgccatatttgaaaggggcagacggccatgttcgtgaacggcgcttcccttggtgcacctgtggccgccatgtttgagcgaggaaagccaggggtctgtgcggggatgctgcaggacacgagaaccagccaagacctatggcccctgcagccaccgagggctcgagagcgcccctgtggacttggctgggcccttcatggtgacatccaggaatgcggctgagcgcgggtgttgacctcgctgtttgctggaatgtttgggttcttggaccatgtcagtgacggctgtgtcaccatggccttgctatccccaggaaaacctaacatgcaccccgcgcctgtcctctgggactcccatcctcctcctttgtctgacccctgagaggcttaccgtttccccagggcagccccggctgtggccctcggccctgctccaggcggccatgtcagtgtcctccctcggcgctcccaacaccctacctggctctgcgatggccaccctggactcctaaacaccccagaaagggaagagatttaagaggaaccttgattcctgccattctgcgcagtcgtgggtccctcctccacctggggccctcaaggggatttctgtccgcactcccagccagcgacccctcccagttcctgcagctggagcggccctctctcctgaacattcgggcacctgcgtctgtcactgcagccagagggctggagtgtcttcggtcaactcgccatccctgccacggctggaggccacatgtcccagaacctaccttgctgggatgggggttggggtggcagaggctgaacgcgtgtgaggtttgggggaggacaagcggagcggggatgtgtgggaggtcctggtgtccaccgtgaggatggtcacaccccatagctttgttgatgctgtggctgtagcaggcccagtggctccgctgagcctccctagcaccagtgcccagtgaagtgtggggggctggacataggtggcctcagttcctgggactcccccaaagctctggtttcccccctgctcccaggcttcaggtggacgagttagtgaccacccccactccagacctccctcccctagccacccccacagttataaaaaccttcattctcatatggaaccccctttcctgaaatccgtagagtgactgactgctttcttgagtgaatctggactgggccacatgatgatcgctgtacagagcagctgagctcctctgtctcagcctccctgagttcacagcaggctctgggcatcatctccgtgtcatcctaaggccacgggcggggttcccaccaaacaggagagcagctctcccgagatgaagccttctgatagccctagaaccaagaggaaccgtgtggggttgggtggggtgtttactgtgcactcctgatgttccctcccagtgaaggacacccacctgggacactgtggcccctggccctccctccctcccctcggtggcagagagaacttcctggtgggtgacagcccatggtccacccttgccaggtggattcaggcaaaatacgccaggctgtgtgctgaaggcatcccatctcttcctcgtcccctctcggctggatcggggtggggcagcgggtggtgagtgtgtctgtcctgccagttcagcctccaactggtctgctgtggggcaggagcccacctggctctcctgcagagctgcatggcctgccttgcctcacccgtgacaacagagactttggttctccatctgcagacgcatttgtcttgtttcttattcggtccagaactcgggtgggaagaagggtgatgttatttgggtcccctcaagaccttgacaacagatagtttttaatatcacattttaaagccgccaactttctctcctccactttggtatttccctgatttttaaacagaatgtcggctctggaggcagaaagcttgggcttggatctgggccctgccacgcagtagctatgtggccagggaatacatagcttccggatctccgatccctacagtaaagtacagataaaaatacttttcattgatgtgtttgaaatcgaatgagatagttaatgaatgagtaagtgctctgcaaactccagagcggggtgcgcgttctgatctgtttcatagaatctgacacgtaccctttcccaccccagcgtctctgaattgggatgcatctgacagcaagtgtggcatccgggctgcagttgccgttgtctgctcacatgtgaattaaaaaaacaatctcagcatatgaaatctctaatcgcgtatgaacttggtggttattcctggtgccgtgtggataactgcagcctcaacaccccagtccacaaaccacgtacggaccaactgaggaaggagtaggggttcttgttgttgcagaaaaccctccctcaacttgctctagaagataccagcattcatacttggagtgggcatcagcagcttggaagacacagcagtgggcccctcttagcaggagtgccccatctcatggctcccgacgacgacccagagggtgatgctgcgtaggggctcacggacattggcactctaagtcagagatgctcaggtgaagggggctctgatggtgaggacattcagaaataacagagattggctgggtacggtggctcacacctgtaatcccagcactttgggagggaagccgaggcaggtggatcactggaggtcagcctggccaacatggtgaaaccccgtctctactaaaaatacaaaaattagctgggcgtggcggcatgtgtctgtaatcccagttactcgggaggctgaggcaggagaattgcttgaacctgggaggcagaggttgcagtgagccaagagtgcgccactgcactccagcctgggcaacagagcgagactctttgtctc

SEQ ID NO: 138 - DNA, 918 bp, Homo sapiens
gtcatcaagctgcgcgggggcatagacgtccgggtcgggcgccgcggggcggaagacgagggcggcgaggtcgggttccgggcgcttggagaagatggtgctgcggcggctgctggccgccctgctgcacagcccgcagctggtggaacgtctgtcagagtcgcggcctatccgacgtgcggcgcagctcacggccttcgcactgctgcaggcccagctgcggggccaggacgcggcccgccgcctgcaggacctcgcggctgggcccgtgggctccctgtgccgccgcgctgagcgatttagagacgccttcacccaggagctacgccgcggcctccgaggccgctcggggccaccaccaggtagccagaggggccctggcgcaaacatttaatcctgggctgtgcggggccgaggccgcttgcttttccttccgggctctacagtggcatcaatgtggaggggtcattccgggcactgcgcgcggcttcgaatcccgactgggattgttggcctgcagacatcccacgcataagagcctaggccagaccgcccgctccgttgaagtcttgtgattggacaagacacagtgtggagacagccctaagcctaacagagatgaaggtaggctgggtccagacacggcacctacggagagccacggaccgaagccagagagcctttcctctgcaagtgggactgaaactcttgacagatgctgctcaatctgactggtatagcaggacagttaattccagggacgatatggatgaaaagacaaccctacagctgccaaattcctttgattaaatgtgtgagctggttgataggcatgagtgtgatacttctcaggcaagatgtgttaagaataccggggactgtaggcctatggtaataataaacacgtattttatgaaa

SEQ ID NO: 139 - DNA, 1424 bp, Homo sapiens
agatgcaaaccaaggaggctggaagataagagcagagccatcaggacacgagcccctcgcgggtatgaaacaggagtcgtgggagcaaattagtaggtgcactgcatggagggacggaaggggcagggaggagcatctgaatgtaagatttcagagaagctcattttgtcagcatttcagagcttcctgtgtgcagcatggatctaaagctggtggatgcaggggggtgaacaagacaacatcttcacttcctgcatgctgatggcagaagtgagacatcagcgaagaaacatcacgatcaccaaattacgatgaacaccatggaggaaacaaaggacactgtgacaccaaggaaggaagggaggttacttttcatagtggctgtaaatagaactgaaggctgaaaaacagctgttaaaatggcttgtttgtttgaagatgaatgagagtacacaataaaaggaaaaaaatttggacacagacacacacagagggatgaccacgtggagatgcagggagaggatagcagctacaggccagggcgagaggcctcagaggaaaccagtcctgctgactctttgaactcggacttccagcctccagaactgaaccactgtcttcctttatcccaggatgtctgcaaggaagaaaatgtcctttttctagcatttagaggccaccaacattgaataaccacactggggtagacacagcggcgaagagattcctgctgttcccatcacagcagccttggagatgagaagacagatggatctgaccagaagtctggagaacttcgagaaaaaaggaggaggacacaaaaggaaataacaaaaaagatgcatccggagcaactatgaggatggtaaattggtgtctaattctgaaaatcataattggtataaatgctatgtactgtggaaggagggatgaagggtagagggaataaaaaagaacatgaagttagaatccttggcatgaaagcctgccatttatacaagcaaacaaacaagatcagggactatcaactggctggctgaattggaccaataggcaggtttattcagccccacacttcaaaaattaggagatctccaaattaaaatctgggaatctgaccttttgtaacaaatcagaggatttgcaacaccaagagcatcatcacaggcaacgaccagcttggatgggcagcggctgcccctgcaggtgggtcaggtgctcttccgttggacacagtctccaccactccctgtcgcttgctccttgctccccatcagcataactgtttgggccttatagcatatgcatttatcactccctactaggacgtccacaacatgaaatgagagaacgatttggtaagttcaacaaaaggcatattatgcagccaccatacattctttgtggaaagagaagtggcataa

SEQ ID NO: 140 - DNA, 278 bp, Homo sapiens
gtacaacaagctctgtggttttatttctcctaaatgggaggaaacatagagaggaagaaaagtatgcaatctcagttgcaaatggaggcaggggctcaccatgttctctgatacgattgtaccgcccattggtaagaatcagaggctgaaaagattctgttactgaaactcaacacttagttgatacctgctacaactttaactactcgttgactgtttacggcttttgctgtaagttggagtatggtgacaaacacacaagtaagtttgcaaaggca

SEQ ID NO: 141 - DNA, 1756 bp, Homo sapiens
ggagaatgcgcgggtcgagtgctgtagttcgatttttgcgtgtgtgcgttgcttgcggcctttgtgcctttttattctttgcttacctttatgatataaagaccttatttcttacaaggaggaaaagaccgctgacttcagaaacagcgggaaccccagctcgtccccggtaattcaagaggaaacgcttgagcaattactgatgttgtaaactgggatcagaagacatacatggtatcgtatcccaggcaaggcacagtggctcacacctgtaatcccagcactttgggaggctgaagaaggcagatcacttgaggtcaggagttcgagaccagcctggcttacatggtgaaacccatctctactgaacatacaaaaattagctggacatgatggttagctgcacctctactccacgtgttcctcccttcaggtcccaggctgatggagtagcctctgtgtgtttgggatgttgtcagtcataatggtggacacaaaagagattatgacaaaccgtgtattgtctcctacaatttctgctcacagaagtggacaacatcacttctttccacatttcattgaccagagcaagtcatgtgaccaagcctgattcaaaataggctggagcaaggaggagcagcaaacataacattcccagtttacagctgaggaaattaagcttcaagttgcccaagtttatagaatgagtcaatggcagaggttgaactcagatgacaaaattggggtctggacgtgtgcaaggacttttccaaagtcagctggaaaggagctgcttagctgagaggttctggctccagagtctcctgtgaagttgcagtcaagatgtctgctgggaccccagtcatttgaagccctgtctggggcaggagaatctaggtccaaaatggccgttgcaggagtccttatccacaccatgtgggacctcttcatagatgttcgagtgtcctcatggcatggccactggctttccccaaagtaagcagtccaaaagagggtaagacagagcccacactgtcttttatgaattagccttagaagtctaacacggttacttccaccacattcattagtcgttaggtacagctcacattcatggggaggaaaatcagggcctgtctttagataggagatgtatcaaagaatttgtggacatattttaaaatcacagcactactcttgatgtactaagtcagtgactcccccaggagtctcacagagaattgactccttgcccacctatactacctttgtgggtagagactccagtagtgtgctggttaatgttcaaccagtggctttctagaaaacaaaatgtatggatacatatatatgttctaagttttactgatatgaagaatgtgtagcacagaatttataaataataaaatatacagtattatttattgtaaattccataaaacctgttgtttttcacaaaaggttttagtttatttttcccaaatgcttgtattggtaacattttctgtattacctttttatgtccagacaatcaacaaaactgaaaaagcccagccttgtagcatttgccagttattgtgtaaatgtccccactatggtggatttcaggttaccactatgatatcacagaatgcagaattggaaggagattcacagcagcaccccattatactatattttcaccatacagatgcagtcgatgtaaattacctgaggagcataaataataataaaatgaagttaaataattcggaaa

SEQ ID NO: 142 - DNA, 709 bp, Homo sapiens
tcctcgttagattgtttctgtataaaacaggtttatatatgaatacatacattaaagtaatatatacaagatatattctaaagttgtttaaaaatgattgtctttgggggttagatttagagatcattttcatttgttggctttgaagggcaactgaccaacttttttatacataaaggatataaactacaactattttcccactctgtgtagaatgtggaacggaaacagtgtgtggcacactttaaatgatgctaaacttctacagtgtgtaaactggcttgttcaagaggccaaagtgcttctgttgagaaacactgatgaccaatctcctctttgtggtcctgtgatactgtgaaatatatatttgatcttcctccctgtttcccagcatacaattcctaaaaccctcagaatctgcaaaataagatttttttttaatgctaatgattgactgatggctggaggctcctagagagcctcaggattggggctgattctcagggctttcagtgccacctcccaacctctgagaaaaagagagagagagagaggccaggagttcgagaccagcctgacaaaaaatggtgaaacaccctctctactaaaatacaaaaaattagccaggcatggtggcacatgcctgtaatctcagcaactcgggaggctgaggaagaagaatcacttaaacctgggaggcaggttcaat

SEQ ID NO: 143 - DNA, 2585 bp, Homo sapiens
agaagtgccgagtcccggccgggggcagcctcgccgccgctcagctcgggaatccctgccccccaccagcacctcagtgggggatactgcaagttcaaggtggtttaaggcgtgaatgaatgaaggagcaagcagtaagccccgacagcaaggccaccacagccctcgccccacagggacgcctgagcaaggacccaagcaggggacaagcaggctcaccccgcccttgcggggctgaccacgaggccccgtccggtggaacacgccatgacgatctgaacctgccccagccccaggactctgagtgcagcaagaggggagccgggctggagagtggggagcacggagactgtggcctggatggtgccagagcaaacaggagagaggctgcccaacgcagaggctgcagcacagaccagagggtcccggggctgactgggtgggggcagctcccagcgagaggcccctgggatttgggtaagtagaggcacatgcagactctggccacagggcacctcgcgcacgaggggagttcaccacacaagctgagcggagggcggacgcaggagagcagcggtttctcggaagccaagggcggtcatggagccccacgccacagcgcttcccacggggccacaccatccggtctgcggagggggctgcattgccgggaaggaccatctgattctggattccagcctcaccctgggccaccgctgagtgtcccaagtggccccttagcccccagggccaggcggcatcccaatcccctagggatgtctgtgctcagaatgtggcacacacgccccggcagggccatcctcctcctcctgcacccgccacagccgtggattcggggtctctatcgtgggcagaaattcacacagtcaaggtgagggtcccaggagcagctgtgaccaggccccggctgccagggagagggggtcttcagccgacggggcagacaccctgagatggacccttgtccaggggagggccctgccacccacaattccttggcattcctgcaccagcaggacgggctgagggaggcgcctcaccagtgccagcgcccagcatcactgtgccccggtggagggggaggcccttccgagcctgggcctgggtgtggatgagggcaggtctctcacctctctgacctcagcttcctcaactgggaaggggggccacagcacccccttaggggtgatgaggaagtgggagctcagggaggaccccgggcagggctgcctcctcacctctcttcggcctttggacactggagctcagaggaccaagtgaatgaatgaatgactcgatcaatcaactgatccatgaatccatggacccctgaacagctggacagctgggctgtgggcaggacaggggactctggctgaagccgcgttcatatgtgttcagctttgtgagtggggcgaggttgagggcttattcagtgggggaggtgcacggcagggccagtacccttggagggtcaggccacaggggcggggacacctgccaggatgcccaaccccagaggcagtgggagctgttggggagccgtggtcccagtcagcggtggcttgatgagggctgctcccacttcatccgcaggattccagccgcagctaccccacacccgagctgtccctagtcgcccaccgcggccggacaaagccccagcagccaaggtgctccgtggggagggtttcttgggtttcttgaagccagtatttcccatagtatcttacgtcccagcagaggcctccactgtgcccggaccagcggcccactcagtgagtcgagtgtgcacctggcacccctctttctggaaatccacgaacaatgggctcccagcagaggactgaggctgagcaggccacttccctggagctgaccccacagctgtgtaggtacagggtggccgtgaacacttagggctctctcgggctgtgcgcttcttgttcactgcaaggagcagggtgttggctcctgaccaagccctgtcactgctgcccagccacacgtggggccccttcacccacccctgaccacctcatgcaggtgaagccactgtggaaacagcctggcagtcccttgaaaaatgaagtcataaaccccagcaattgcactcctgggcctctgacagagcttgcacgtcccctccaaagctcgtgttaagctgtgagccccagtgccggaggtggggcctggtgtgtttgggttctgggggtggatccctcatggctgggtgccatgaacccactcaccacagtgagttctcacgagatctggttgttgagaagtgtgtcatacctcccccacaactctctgtcttttgttccggctctggcaatgtaacaagcctgctcctccttcgccttctgccatgactgtaagctttctgagggctgaccagaagcccagcagatgccagcaccatgcttcctatacagcctgcagaaccgtgagccagctaaacctctcctcataaatcaccgagccccaggtttatctttacagcaatgcaagacctgactaatacagcaccagctccccaaaataaaaagaaatattcaaac

SEQ ID NO: 144 - DNA, 377 bp, Homo sapiens
ctccgcctgcattctgcccctgtggaggagacctctggttctgcaactgcctgggagagtctaagtcggtgatggagagttaactggcctggtggacacatacctaccatgtcctgcaatctagcttaaagcttacactttaagaaacagaataacaagaatagattctagagctgagtttaaaccctggctccaccactgataagctgtgtgaccttgggcaagttgttagctggcacccagacacattgagaagatggtcatctgaaagccaggaaaagagactgctccagaacctgaccatgctggcaccctaatctcagatttccaccctccagaactgtgagaaaatacatgtctgatttttaagcccccaa

SEQ ID NO: 145 - DNA, 647 bp, Homo sapiens
aacaaaacactgaccttggtccacagacaacacccacgtccacgtggtgggtgggactggctccgtcagaggatgggaagatgagaagtgcttgtcgcaggcctggagatggggaccacccaggcatgcaggggatgctgcctctcctccatccaacaacaagcctgcgtgtgcccagccccctctggtacacgcattgctccccatcctcggcattgatcaattgaaaataagaccttggaagaaccccttgcaaagctgacattgtacgagccaaggcagtggccccggagagggtcagcgaggggcctccactgtctgagtccgctcctggcaacgcctgctctctgcactcagaggcccggtcccggcagctgccacgttgctcagaagttctggcagggggagcctgaaacccctgtctgctggcgacactcccggagcagcaggaaatctctacattttattttttttcttaacagacaaaagtatttgactccagaatgatttccaggaattacagtatgagaacttagtctttgagatttttattttcttcttaaaaaaataaaaatgaaatcaaagcagaagacactggttgagcagacagcacactagcacattccacttcgcaacaaaacctgcgt

SEQ ID NO: 146 - DNA, 2810 bp, Homo sapiens
acgatggagatgagcggcacccgcgggcggtcgctgaagacctcggcctgctgcaccagcgcctcgcgcacgctgtggaagtcgctgaggaccaccaccaggtagtggccgataaagaagctgaagatgctgccgtacacgcgggctagagcccccagctatcaatacattacagcaggatgagaaagacccaggcctttgacatcccaggctttgacaggcccaggcttgacagtgtcttggcacaatgttgtgggaagaataagcacaatgaagaggtgcctcaggaaggtattttcaacaacaaaccttcaacaccatgaactgctacttctaacggaggtccgaagcactaacacagccatttcctgtctctctttagcagccttgcctaatccacttacagcatcttgccaaatcatcatccaaattcccttcaactttactcttccatatgtgctcctagtcttatgttcatgtgggaaagaagcttgtgattttgaaactccatttcacagtggatgtacagatggtctttataaggtagctactcggttctagaacacagaatgtggaacagaagaaaatccaattagtaaccttttttcttttttttttccaagaggacacactcagccacccacctcatgggactgctatgagaatgactgaaataattaattgtgaagagctttgtgcccctgggagtaagaacactatgacacaactggagaaactggttattttaccaaggcttaggctggaatggtgtgctttcctttaaagaatcaaacttgacttatggagccaataaaagcctcttgggaaaactggcctcatacatgtctacacagtccctgtatagggttcctgacctgtgatatattataaaacaagaaatttagttccaatgtatccaagctgtcccttcggaaggtgatcagaagagagaaatgagtttggaaaagaaaaggaatagctgaacaagagcaagtgatttcagaaatctaaaccctgagaaaacatgggtaacagagaagaacttctgctgtgatatctacttctgcagggagtagagaaacagaagtagaaggtaaatctgagatgagcacagagatatcaagtgaattgcccaaggtcaccaactagtaagcagtgaagccagcatttggtactttggtagctctgactcggcaggctgttctacccctctttgggaaaagcgtcgcaaatgagcacacagcttcagggtgaattcttacagcaaagaaaaggaaatgggatagcacagccctgctatgtcagaagaaccaacatcagacatcagtggattctcatagcaacatctccccactgcttcctcttgacacacaggaaaaatgttccagaatcaactgggaagactggcatttcatttataaatgtaattcccaggctgggtcggtaactcctccaatctttccaattacgttcatttcagatataggggacagaaatgctccagaaaagaactagaccatatttggaggaggagagaaggagtacacccttcatctgtgttgtgaactatgtggaggagagtagtatgttacagtacagagagtcttggggaggccatgtgcatgtgtcttcaggcctccacctcctttcaacttgaggagctctgcttttccttctattttagaggggttacccaaaatctcatctgaaatctgggttccatggctaaagaagtttaaaaactgatagtgccatgacaaagccctggatcagaagtcacaaaacaagaatccaagaatctctctctcagtttggccacaaacaagtcatgattaatcctgggccaactacttccttgggaaacaccaccatctctcagtcagcaaagacagaaccagagagagagactctgcaagttcaggaagaaaggttccaactacttttactctccgttgcatctcctaatgtcaccacttcctcagagcagggtttagtcactactacaaaacattgctcaggaactgcagagccactagcctggcatgtggtgacacattcccaacacaattctctaacattctgatttcccttgcaaagataaattcaagcgaacttagaactcttaaagatcagattgagattgaatgccattggctttctccccatacctatgctcctacacatctcttcagcccagcacagggttttaaaagctcactgcttaacacagggctatctcctctgctggttatgagctgcaaggatagagtccatgtcctgtttgtgttggtgttcctggccactagccaagaacctgcagcccagccctagaatagcagttgaatgaatgtggcagcccacacactcaaagacaccagaattatcttaccctttcccagagagcttcaggtacctttcttttcctaaatgagtcactaatgtgtctgtataaatatggtttccatatatgtcacagagcccaaacatttcatctgacttactgtggtttactttttgtgactgcatttttattatatcttatataaaaagggggatataacagaaggaaaaaacagtaaagcaaaaacccatatctagcttcagagcattacatatccactggaagccctaaagcaatgctccatgatcgcatggcctttccgctgcataaccctgaggtcattttttgatacataattctcaaagtatgcagtgctgaaagaccttgaagagctttcttaaatgatgttatggttaaaatttctatgattgcagtccttgaaatcataaaagaataaatacatccttgg

SEQ ID NO: 147 - DNA, 2228 bp, Homo sapiens
gatgcacacgaggaagaggaagggatcctcgcaagctttgaaaggcgccgtcaagtcaaataaataaatgccctacaacaccaacccaggactgagatctgcatgctggaatgacggtggtggtggtggctttcagtattccccaggttttgtccggagcaccggcacgccctctcttgaagtccgctctccgcacagtggttagacgggaagatccggagctgtccagtgtcttgggtaatgcacggcatcgcctgatgtctgacgctagaacaccacgtaaagtcaagcagagggaagtgaatgcgccctaggcccctgcaggccaccaagaagagctagagggagttggtgcaatcctagagatgccggcaggtgcaccaatctgtggcacacgtacgctctccaatggaagacaactcaagaccacaccaagtttgtattaaaaaagtactgttgtgttactttttaccaacctccaatcattatacaaaatgttaaaaaatacacaaacacacacacacactcacagccatagaggttatcgcaaaagatcaacccagaatctttcagaatatgacagatgcactgagaaggcagataaattgattcaatatacaaaaggcctctttcctatggaatttcattagattaaataaggtgttccctcctcacagcctcatccttatgagcaatcatataaataatctatttaaagtccttgaactataacttgtataatttttagttttccccctttgaaggggcctaagagaaaggtttgagaaaccagctcttgaggggggcaggggtgaggggtaagaggtcctgtgcctttcattcatcctgggagcttctcaggattgcagcatttccacctgagtgttcattcttgtacattttctcatctttctcctgggttcctaggatcttggagattacctagtccaatccttttacttcagaaacaaaaaacctgaggctcagaaaggctaagtcaaatgcctagggtcacacagggaaactgtgggagttggatccctgagtcccagtccttaaactggttgctacatgacattctagaacctctccccaccaactccctttttaaagacagggtctggttctgtcacccaggctgaagtgcagtgacatgatcttggctcactgcaacctccgcttcctgggctcaagccattctcccacctcagcctcccaagtagctgggacaacaggcacatgccactacgcccagttaatttttctaattttgttttgtagagacagatttgccatgttgcccaggctggtctcgaattactggcctcaagcgatacgcctgtttaggcatcccaaagtgctggggttaccggcaggagcaattgctccgggccagacttcccttcccccgcccacacccccccaacccggcctagatccacaggcactgtaatcacagctgacacactcgactcggaatcagcatagagagcactctgaaaattgtcaaatagggtccctgaaacttgtataccatacttctcctgaagatcttgaagcatctttgtgtttgctttttttttttttaacttaaaatatggcattcaggttttatccctctccccgacgccatgtttcctttctgtattagtcacacacgtgatcctaaagtctgtcttccccactttaactggggagggctggacaaggtggaattccaattgcaggagacaggatgtgacatgggtgaggtgcccaaggctcaccgactgaaacttcgatggctcttccctgtttccttgtgcagggccccccttctctccactgctcacctggctctcctcctcccttcctgcctgctttgcagctcttgctactattttccttttctttccctgctcccaccctggcccaatttatttcacagaaatatcacagggccagccaggcacagcggctcacccctgtaatcccagcactttacgaggctgaggagggcagatcacttgaggtcaggagtttgagaccagcctggccaacatggtaaaatcctgtctctactaaaaatacaaaaatttgctaggcatggtggcaggcgcctgtaatcccagctacttgcgagggaggctgaggcaggagaatcacttgaacctgggaggcggatgttgcagtgagccaagatcacaccattgcgctccagcttgggcgacagaacgagactctgtctc

SEQ ID NO: 148 - DNA, 251 bp, Homo sapiens
ggtacttctaaacttcgtggaagagccctgtttcataaatctgagacagccttggtctgagggagcaaagacagagaattcacgtgctgcccaggcatagccacatagcaggtggacatccctggacacttttctgaccctcattggattttcctggaagtacggagagttacatccagagaactctgaacattttggaaggaccccaatcctgcaaacaatgaatggcaataaatcctgggactggaaag

SEQ ID NO: 149 - DNA, 1284 bp, Homo sapiens
taagtcagctacagcaccgacctccaggagttggtgcagtggcctggggtggcagccggtgtgcctgattgccctggtcgggcgttcagggcagggagcagaatggccactgcagaagggatgtgcctgtgagtggtttgtccccagcaccaatctgctgtttgcggacatactatgggcagtgggtgctggccaagagctgcacgtaggttttctgttgactgtccatgcagggctacatggcccatactgtcagccccagctgtggaagtgggggctcatgaatggagtttctcatccaaggtcagtcgcgctggtggacggccctggctggaggcctacatcaccatccagggactccccacagtggccctcctgttgccctggaggctcaggtctctgaccttccatctcccatctgcaaagcactggacactggggttccgggcagatgcacggagtggcctggacatgcccatcacagccctaggataacccagacgggccatcgagacctatccacactctgtggagaccaatggaggaaacagctcagtttcaggctgtgggcgtctgaatcaaagcggggactgggaacaaggtgctcagcggacactcagcaaacggcctgaacgccgacgcctctcccgtctctgtctcctgtcttcacaaaaggaaaacggaatgcctttctggcatccacccagctttcccggatcccctgccagttgtcattttcagataacttgaattttatattttatgccaggatttttaagcccccaggatcttttcacatctgcacagcttggcttggaatcctcagctaggaccatccttcctccccaagaaccagggcctcatctagaaggtagggcagggaaatgagggtccacatgtggtccggcccctcggcatacagggagatgaccaggcctgggaaatgtgcccttcgacgggctggtgacaaggccaaaaagctgggcaaacacattgcagagatcctcccaaactaaaaccactgagagtacaagtgcaaaacattcccttttaagccagtaggggcttgacagctggagaacttgaaaacaacagggcacagttcacaaaatcaaaactcatggaaaactctgcgcgggtgagtcagagtgccagcgccaagtttcctggcatgcaagaggaggctcccccgctcaggcagatttttttaaacatctttttaataaattgaattgagacctaatttacataaaataaaactgacccatttaatatccagtttaa

SEQ ID NO: 150 - DNA, 4888 bp, Homo sapiens
gcaaaatcagccctccctcctcccgctccttcgccgcggccctcccctcctcgcgctgctctcgttcgcttggctcagctcagctcagctcagcgcagctccgcggccgccaagccgaggcgggcacggtctccgagtcgcggacgccagctccgagctccctctctccgccgcgcctccgccaggtcgcgccttcgtcgggaccacttcgggcaggagtcgcgtggcgaaggcctgcggccgcggcacaaagttgggggccgcgaagatgaggctgtccccggcgcccctgaagctgagccggactccggcactgctggccctggcgctgcccctggccgcggcgctggccttctccgacgagaccctggacaaagtgcccaagtcagagggctactgcagccgtatcctgcgcgcccagggcacgcggcgcgagggctacaccgagttcagcctccgcgtggagggcgaccccgacttctacaagccgggaaccagctaccgcgtaacactttcagctgctcctccctcctacttcagaggattcacattaattgccctcagagagaacagagagggtgataaggaagaagaccatgctgggaccttccagatcatagacgaagaagaaactcagtttatgagcaattgccctgttgcagtcactgaaagcactccacggaggaggacccggatccaggtgttttggatagcaccaccagcgggaacaggctgcgtgattctgaaggccagcatcgtacaaaaacgcattatttattttcaagatgagggctctctgaccaagaaactttgtgaacaagattccacatttgatggggtgactgacaaacccatcttagactgctgtgctgcggaactgccaagtacagactcacattttatgggaattggtccgagaagacacacccaaaggattaccctcgtcgggccaaccactggtctgcgatcatcggaggatcccactccaagaattatgtactgtgggaatatggaggatatgccagcgaaggcgtcaaacaagttgcagaattgggctcacccgtgaaaatggaggaagaaattcgacaacagagtgatgaggtcctcaccgtcatcaaagccaaagcccaatggccagcctggcagcctctcaacgtgagagcagcaccttcagctgaattttccgtggacagaacgcgccatttaatgtccttcctgaccatgatgggccctagtcccgactggaacgtaggcttatctgcagaagatctgtgcaccaaggaatgtggctgggtccagaaggtggtgcaagacctgattccctgggacgctggcaccgacagcggggtgacctatgagtcacccaacaaacccaccattccccaggagaaaatccggcccctgaccagcctggaccatcctcagagtcctttctatgacccagagggtgggtccatcactcaagtagccagagttgtcatcgagagaatcgcacggaagggtgaacaatgcaatattgtacctgacaatgtcgatgatattgtagctgacctggctccagaagagaaagatgaagatgacacccctgaaacctgcatctactccaactggtccccatggtccgcctgcagctcctccacctgtgacaaaggcaagaggatgcgacagcgcatgctgaaagcacagctggacctcagcgtcccctgccctgacacccaggacttccagccctgcatgggccctggctgcagtgacgaagacggctccacctgcaccatgtccgagtggatcacctggtcgccctgcagcatctcctgcggcatgggcatgaggtcccgggagaggtatgtgaagcagttcccggaggacggctccgtgtgcacgctgcccactgaggaaacggagaagtgcacggtcaacgaggagtgctctcccagcagctgcctgatgaccgagtggggcgagtgggacgagtgcagcgccacctgcggcatgggcatgaagaagcggcaccgcatgatcaagatgaaccccgcagatggctccatgtgcaaagccgagacatcacaggcagagaagtgcatgatgccagagtgccacaccatcccatgcttgctgtccccatggtccgagtggagtgactgcagcgtgacctgcgggaagggcatgcgaacccgacagcggatgctcaagtctctggcagaacttggagactgcaatgaggatctggagcaggtggagaagtgcatgctccctgaatgccccattgactgtgagctcaccgagtggtcccagtggtcggaatgtaacaagtcatgtgggaaaggccacgtgattcgaacccggatgatccaaatggagcctcagtttggaggtgcaccctgcccagagactgtgcagcgaaaaaagtgccgcatccgaaaatgccttcgaaatccatccatccaaaagctacgctggagggaggcccgagagagccggcggagtgagcagctgaaggaagagtctgaaggggagcagttcccaggttgtaggatgcgcccatggacggcctggtcagaatgcaccaaactgtgcggaggtggaattcaggaacgttacatgactgtaaagaagagattcaaaagctcccagtttaccagctgcaaagacaagaaggagatcagagcatgcaatgttcatccttgttagcaagggtacgagttccccagggctgcactctagattccagagtcaccaatggctggattatttgcttgtttaagacaatttaaattgtgtacgctagttttcatttttgcagtgtggttcgcccagtagtcttgtggatgccagagacatcctttctgaatacttcttgatgggtacaggctgagtggggcgccctcacctccagccagcctcttcctgcagaggagtagtgtcagccaccttgtactaagctgaaacatgtccctctggagcttccacctggccagggaggacggagactttgacctactccacatggagaggcaaccatgtctggaagtgactatgcctgagtcccagggtgcggcaggtaggaaacattcacagatgaagacagcagattccccacattctcatctttggcctgttcaatgaaaccattgtttgcccatctcttcttagtggaactttaggtctcttttcaagtctcctcagtcatcaatagttcctggggaaaaacagagctggtagacttgaagaggagcattgatgttgggtggcttttgttctttcactgagaaattcggaatacatttgtctcacccctgatattggttcctgatgcccccccaacaaaaataaataaataaattatggctgctttatttaaatataaggtagctagtttttacacctgagataaataataagcttagagtgtatttttcccttgcttttgggggttcagaggagtatgtacaattcttctgggaagccagccttctgaactttttggtactaaatccttattggaaccaagacaaaggaagcaaaattggtctctttagagaccaatttgcctaaattttaaaatcttcctacacacatctagacgttcaagtttgcaaatcagtttttagcaagaaaacatttttgctatacaaacattttgctaagtctgcccaaagcccccccaatgcattccttcaacaaaatacaatctctgtactttaaagttattttagtcatgaaattttatatgcagagagaaaaagttaccgagacagaaaacaaatctaagggaaaggaatattatgggattaagctgagcaagcaattctggtggaaagtcaaacctgtcagtgctccacaccagggctgtggtcctcccagacatgcataggaatggccacaggtttacactgccttcccagcaattataagcacaccagattcagggagactgaccaccaagggatagtgtaaaaggacattttctcagttgggtccatcagcagtttttcttcctgcatttattgttgaaaactattgtttcatttcttcttttataggccttattactgcttaatccaaatgtgtaccattggtgagacacatacaatgctctgaatacactacgaatttgtattaaacacatcagaatatttccaaatacaacatagtatagtcctgaatatgtacttttaacacaagagagactattcaataaaaactcactgggtctttcatgtctttaagctaagtaagtgttcagaaggttcttttttatattgtcctccacctccatcattttcaataaaagatagggcttttgctcccttgttcttggagggaccattattacatctctgaactacctttgtatccaacatgttttaaatccttaaatgaattgctttctcccaaaaaaagcacaatataaagaaacacaagatttaattatttttctacttggggggaaaaaagtcctcatgtagaagcacccacttttgcaatgttgttctaagctatctatctaactctcagcccatgataaagttccttaagctggtgattcctaatcaaggacaagccaccctagtgtctcatgtttgtatttggtcccagttgggtacattttaaaatcctgattttggagacttaaaaccaggttaatggctaagaatgggtaacatgactcttgttggattgttattttttgtttgcaatggggaatttataagaagcatcaagtctctttcttaccaaagtcttgttaggtggtttatagttcttttggctaacaaatcattttggaaataaagattttttactacaaaaatgaaatttgtttggacttccacttgagacagtaaagagagtattagacacccagtaaaaactgccatataaagaa

SEQ ID NO: 151 - DNA, 850 bp, Homo sapiens
cggccgccccggcctccacgcaagcacccgagcgttactttcgtttccgcggcaaacgtctggaggcccgggtgagggaagaagcggcggcggagggttggggattactccgacgccgcggcagccttgcccgggcgtgctgggggagggcgcgcgaaccccgaccaggggggtcaccgggactgagcccggcggcctccggaatgttccccgcgcggtgccagtccgctcaccgcgcccttctccgtggccgcgccgtccagccaagtcctgccgcgctccgtcggccccgcccggatggccgcgctctggcgccccagctgtgggtcccctggagtcgccgcgctccggcagctggcccgccgtccgcgtcgagcgcgcccggctggagggcgtggactgttcgcgctgcctcctccccctgccccggcccttgccggggaggaggaccgcgagagcgccgccccgccgctcgtgggacctcgcgcccggggtctgagtcccggagctctcttgcgggctagaggatcgcggactttgttttcaagcgagtggggcggcctacgtaaaagaggaaaccgaaacctccgcgcgcacgagagggagaagggtctggagggaagcactgggtggattacagcgggggcgctatccggaggattcagagctctgcgggttagcataggcaagttagcattcctctaccttcatctgtaaagtggggctgttgaggaggaaatgtgattattttgcagccctttaaaatggtaattgtgaagtctcgagcaaagttggaactgcatgctattcatgtatattaaaaatcaaataataaaattatatgcacatc

SEQ ID NO: 152 - DNA, 524 bp, Homo sapiens
gcgagcaggcgcgtgtgacgtcgggaggcgccgcggctcctcggccgccccactcggtggtcccctgtctggatccaaactgctgactggctgacccgagtggtcacatttgccctctggggcttttgaaaaccttaaatcaaaattgcttttgaatctgacaactcctgaggctactttcgcggcctcggggctgtttcatataaggacgcgagttttcctgatcaggtctgtcggccacgttacgatttccaatttgcgatccatcagttacttccattgggtcttcagcccccagggactgtggatcctagaccccgcggagaagcccgtggactggagctgtgtcagctctgatggaacaaaaacggaggcacagagaggtcaattgattggtctaatgacacagatctagcaagtggtggaaccaggactgaatccaggtaacttgctcctgatgtttgtccattggtgctctcatacttttttccctctctcttcctgttagaatgtgcttccaggac

SEQ ID NO: 153 - DNA, 366 bp, Homo sapiens
aagttcccttcttgcttttaaacagcttctcagctccttttgttttaccactagctttgcagagacttgttaggaatttacagcttgtgattgcttcacttttttggaaatggctctatggtttcaaacaacattaactttaaaaaattaacaatgctgagcgtggtggttcacacctgtaatcccagcactttgggaagctgaggcaggtggatcaccggaggctggtcttgaattccggacctcaggtgatccactagcctcggcctccaaagtgctgggattacaggcgtgagccaccgcgcccagccggtttttcaagtataaaacataacattgggtcaagccagtgggctggaccatcca

SEQ ID NO: 154 - DNA, 442 bp, Homo sapiens
gttcgagcgctggggctgcggttgggaaactactggaggatgtggtgcaccagaataagagaataaaccaagaaacaggaagacgtgatccaggcaacaggatattccagtatagtgttggaaacagaagcccagtagtgaaagctacagctgccatatacttgcagtggaatcacaggagcaatcacaggtctttaatttaattctggagtgtgagcaggaaccagttaactacattcattgtccaacccccactggtttgaaagaagactccaaattcttggcatatgaatcagctgttcggtagctccaccttatccctgcagcgaagcagcagaaccgccaatggcggcacctcaggattcacactgtgggtggtgaggccttccgctgaaggaggtactggtggatgctctcagcatctcgctttagccaggcagca

SEQ ID NO: 155 - DNA, 1210 bp, Homo sapiens
gcgaacttgcagacgttgcggccgcgcgccgtgcagttgaagaggtagcagccgagcacggctgccgggggcgcggggcgccggggcagctccaccacggccacggagcagcgcggctcggagcagcaggccgccacgcattgccgccagccccgcacggccgccggcgcccgcaggaagctggcacccgccgccagggagtccttggtgcggatgatggcgtcaggcattgcgctgtagccgccgctgcccgggcccgggcagtcctcctgggggccgccgcccgcgcgcagctccagctccagctcctcctgaggccgctcctgctgcagttgccggcggaactcctccagcagctgctccacgcccgacagctgcgcgtgcagttcggacagcggcgccgcgggcggcaaggccgcacggccgcttggcagccacaggcagagcagtagcagcccgcgcagcgccccgtgacgcggcggtagccggcgctgcgagcccgcgctctcctgggcgacggaggccatggcgacgagagccaagggcagcgagccgaggcggggctgagcgcgggaggaaggcggggacgcgggcgagcgcgggccctgggcccctcctgcgcggccgcggctggctctaggccccggcctcacagcgcggcgcccccgaacccggctgctcccccgaggtcgcgggcgccggcgggaaccgcagtagcgggagacatagccggcccagccgggcaccgctccttgccctcgccggagactgcccagcgccctgcgcctctccgccccggcctgcggcgcgctgggtggcgacgagtcggcctcggcgttgatcagcaccaggtgtgtgcgaacagtggccgcggcggggtggagccttggatgaaccgttgtccacattctgttttctgagtcaaagaggaggaagatctgtccatcgaaactgagctgccaagatccactgccgtgtccttcggctttctgctcacaagacatcctggcctgcagggtgaggggttctgcccccatcaaagagagatcagctctggccttgacagatattgagcccccatcctcttccacttgcaatttcctggtcttacttgctctgccacatcctggccttgcctctagacgtcttgcggggtgagatgaccttcctatttgtatttttacatgaaaactataaatgcctctaacct

SEQ ID NO: 156 - DNA, 663 bp, Homo sapiens
ttttttttgtcgggaaagggcttccccgtgtaactttacagcagttatcgtagataagacttgcaaattacagatgtggacggtgagggaacgggaatttcactgaaagcgcctgagaaccagtaagagacctgcaacagctttgtgctccactggcgaatgcttcctcccctaatacacattatgtgtgcttggagacacaaggagtaagatacagcccctcaagggactcgtcatagggagaggacacagctttgggaataaaggggccacaaaggaggagagaggagtttgctgaaacttcccaagctcccattccagcagttcctgaagggtttcccctctcttctaggctggacaatggaggaggcttgaaacagtagctggcaagtggtagaagagatggagcagagaagcaagaagaagcagactcctcactccttcaccagggtggatttgctggtttgaagcagacctgagttgggagaggagagaggcgagaagttttaattggatgaaatatttctttagactggtctatacttttttctttatatctaaaattcactggaagagctatgaaatctgtccaagatttcgttcagttcaggaaaaaccaaaaccaaaaccataaccaccaggtaatacacatgtgactcagat

SEQ ID NO: 157 - DNA, 221 bp, Homo sapiens
tcaggttgcctcgctgacccatcttgtcagtccctggatcagcccagcacttcctctgaggccccatctggcctcatccaggcactcttggtatacaggtcccacccgtctgtattcttttttagtccattcactaatgcacaatgagccatggtctgtgctattttgttttttgccttttctgtttccttttgtataataaatgtttacacggaattgtt

SEQ ID NO: 158 - DNA, 2199 bp, Homo sapiens
attggccattgtctcctaggtttcttatagtctagaataaatcatttttcattacattgacttttgacaggctggaccagatgtcctacccttttggaattgtctagttatttatttgtagtatgacatttctttattttattcctgtatgtacatcaaacttgaagttagatctaaagtgtcagtcaatttaagtgaaacattttatatcttaggtaatgtatacttcatgttgcatcttattagatgtttttaaagctttatatatatatataagttgaatcttgttgactttctcaaaatcctgaggaatctgcagtgcatcaacatctccacagtaggtaccataaatggttaacagtttctgtaaggcaactttgcactagcctattttgagcatagaacacaactttgaagattaaatcccatccagggactgattggtagaagacaactagtcagggaacataggagggaaatacttaattgccataaagtgggtagataccagtccacaaataattctaaattaactacgaatatgctgtttcatgtttgtagactcatagatgttttgtgttattagtggctgttctggattataaactcccatgagaggttattttaaaatcagaatttttaatttttaatatttatcactactgcttatatcctcactttaacctacctaatgctgtttcactcaaatgtcttttctttcttccctgtaacagttgtgcagaagattctgaccttatttgaggcttacatataggtttggagatgtggaaaggagtggaaaaagaaatatgtaagctgaagtgccaaactcacactgaaataaagggcatggcctaccagctgacaaggagtgtctggtttcaagatggcaaatgaccctaaacatgatagacaaatacgttttacataggtacatgcacagataggcacatataaatccacatttgcaagcaaaaagtggaacctgtaaagcagaatttctgaggaatctctaaaagactaatactatatggaatttgaagaggaaacccagagcagaagcacatagtgaagtactgccacaaagatgtgtgacgccactaaaggtgctctagacccacaagaaaggaaaactgggagcaggacaactatctggatattgactgcacatgccaatatctcagtcagactaacagaatcagagctttaggcagagaaatgaatggttggagagagaaggcaatgcccaggtgccctgctttgaaatgtcccgcccatccccaaattagtctgaaaatttcaaatgttgtataaattcccttcccatcaaaagtgtcccataaacagcagtggtagaagagttttaactgagtatcacagcttcaatgatgagtatagaaaactccaaaaatctgaataccaacacaatcaaaaaagaggtacaaaccacaagtggaagaaccatctcaagaaataatgaagcattcatggaatacagattagcaactctttaaaacagtattgccaagagaaacagatggcattgcagttgtcagatctcattaaggtcttatatctgaaacagttccactgtcttccataactttcataactttgaacattttggctcataggcgaaagggaattgccttatttcgaatgagactttggactgtggacttctgagttgatgctgaaatgagttaagactttgggggactgctgggaaggcatgattggttttgaaatgtgaggacgtgagatttgggaggggttggggtggaatgatatggtttggctgtgtcctcactcaaatctcatcttgaattcccacatgttgtgggagggatcggtgggaggtaattgactcacggggccaagtcttgctgttcttgtgatagtgaataagtctcacaagatctgatggttttaaaaagaggagttcccctgcacaagttctctctctttgcctactgccatctacgttaagacatgacttgctcctccttgccttccaccatgattgcaaggtatccccagccatgtagaactgtaagtccattaaatcctttttcctgtataaattacccagtttcaggtatgtctttatcagcagcatgaatatggactaatacagaaattaaaatgatgcctgacacataattgcttaataaatattagctattattatttgacatt

SEQ ID NO: 159 - DNA, 2461 bp, Homo sapiens
cttagaagaaggctgactattcctatgggagagaccacacagaaactaaaaatacttggaagaggagaggggctcagttgagcccaaccttccagccaactccagcagggtggcaagtatgagagtgaggatatcttggagcctcagcaacctgtgctatccaatagctatcagccacatgtgactactgagcactcaaaatgtggagcatcctgcatgattctatagcactcaacaggtgtctgccaagcggacagactacagacccctctggccgcatgatgctgagcttccccttggacacatgaagattaagttagtcaagcatggagattcctccctctccttcacaaactccagatgtttggcatctccccaatatcctaagacctcctggactgggaacaaaatgagcgtagtgaaagaggaagcagctttagagaaagcaccacagggaacaaaccaataaaaaagcaggaaactcagcacaagcctgatttatgtcactgcacttctctactctcagccccattcccccaaactcccagcaagcacacaagcacacacaggcacacacatgcacatgcgcacacacacatgcacatacacaacacacacacacacacatgccttctgccagcagctctctttctcactctcacttttcttttcaaatgctggcatttgaaaaaatcccctattttgtttcaccctccttttctgcctccctaaagagcttccgaagaggagttttgatggtgcatctgagtgttaatagattcgggagtgtgaagctgttgcctgaatctcattccctgagagtgcctttctctttttaatagctgagaaagaattgatcaagcctctgttttagtctctgtttctaaacagaaagaaagaaagaaaaaggaaggaaggaaacaaggaaggaaggacatacaacgtaaaaacaaaaacatttttacgacgatccctttttcaacagctaggggcaatccagtgtgttcagttgtgttagttctgtgtctgtcaggagaaaaagccatgtagaagtgatgatttagttttcttggtgggaacacaagggaagctagttgaaagcaatggttgtggggtcttgaatggacaggcaagtccggtagtcagaagaagattttgattagaaacagaggaatttcttccaggaaaatacattgtcttcatgacaaaccaaaaatacaccaaatgttctgaaaactgccctttaaaaagaaagaacagattgttcaattgaaacactttcctgaagccaattgttgcaggctgccagccaccttcagtaccagccacccctccgtcctccccagggccggtataaggggtgcatgagagacacgtgcatgcagaagactccaccatgatgcctggctcccattgcactgtcccagagcggcgtagtggcagctggggttagtgctatctgtcatgaaagggcattctactccggttggcagagaacactcacacacggggaagctgagccatcagtgcaggagttaattcccgtttgcaataatactaaggatgtcgcattcatatatactcaatgagcactaaaggaatcataggaatatgctctcacaggagataatgtagccacagtagataaaggaggatgtcctggaagaaggggaaccttttttaagccaagggagaaaaccactgaaaagtaaatctttgcatgtagctgtgcagctctgcagatctaaaatctgtgctttttaaaagtatactctgtggagtagcagtccacatcaaaaggtcacagtttaaaagttttgtattgtgcttgggttatcccttaagatgttagttatatcatcacaaaagaacaagagtaaactgtaatttactatttttggagtatttttttgttgttaggcatttgaaggatgaggtgcacagtgcccaagagtatgtcacagcggcaatttccactttatgcagaattaatactcaattacttatctgcttacctggaccttgagtgaataatagattcctaataaagggtttttgagcaaatggacaaattggatgcatttatgttatagcagccacaacagcaaaagaaaatcaaacacttacaaaacagaagtcaatcaagttttaactagaggagacaccaaagtatcatacagtggaggaaaaattcaaatgttctgcgccaagctcctatcatgccaattgtacatgtttgtgcgtatgtagggtagctagggttggatgtgtaatcatccctaaaattcatttggtgaagaaaaatacattttatttgaaatcattgtctatttttattcctgccaatattttgtataacatagaagtctgccccagagtgtaaataaataatgaggaaggtcacagatctaaatatactatcttggttcaataataaaaagagaattttttcctcgtaaga

SEQ ID NO: 160 - DNA, 301 bp, Homo sapiens
tgctgaatcataaggtacgcccacaccgaacactagtgaattgctcttcaaaatgatgtaccacagtctacactctcattgtcggtgtagagaagctgcctgtaacctagtcaggcattatattacctagctttataactttataatttttgccaatcttatggtcataaaatcatcttataagcttctctctgcttggtgaccactctgctgttgatccaccaacctccagctggtactgagcatctgccatttttctgctttgaagaggcagcataagcaagaggactccatatagttc

SEQ ID NO: 161 - DNA, 1674 bp, Homo sapiens
gtgattgtcagcttcccctcagcaacacgcacatggtgatgcactcagcagttccctaattagcatttccagacacagtgaccacattgcagtgacacctaccgagatcttggtgaagatgtagaggatgagagacaggacagacatgtacacctggatcctctggcccccaaatcgcttcttcagatactgcggcattgtgaccacacctgctgcgatgtacacagggacgaagacccagccaagggccaggagcagccaggttgcctgggagagtggggagaagaagaaggtatccaggtcctggatgtagacagaggggcggcttcccacccagaggcagtgctgtgctgtgggaggcccccgaacagagaaataagagacctgggacctgaccccagtcctcccgtgtgaccttggatggatccctctgtctcctccagaccttgatttcctcatctgtgaaatggattctcaattgtgaaatggattctcgattcaccatgtagcctcccaggcatctctaaggatcctcccagcactaatgccagagacagaggtgggttagaccctcagtattctggagaaaccaggccagcttccttacgttccactcgaagccacctacggcaaggcctccggcagcccctgtcccagccaggccgatgaacaagccactgcccacattgctggacatcagagatgctccaatctgcaaggcacagttgggtcaagggtcaggagtcaggagtgatctgaatgaatctggagcgaggaccatgagtagtgaggagctgatatttgttgggtacccactgtatgccaggcactgcattcataaatacatttaattccacagatatccgcagggaggggtattagtcatcccaggttacagaggaaggaactaatgtaaggaaagatgaattcatggctccaggtcacccagtgagtaaatggtgaagtgggaaaaaagggaaagtgggaaggaagcctggaagtggggagtgtggacctccgccctgaggccatgggtctgagggcctccaaaggaaggaagctgaaggggatagggaagccccacaggagggaaggaaaggccctcccaccaccccagggatagccaggcagagggaggagccgagggactgagcacaggccaggtcgacctctgagttagttctccaggggcgcagccaagcacttggaggcagtagagagcaatgatgatggtgagcatgatcagggcagtcagggcctgtgcagcatctccaggaaccagctggccttctgagtttggggactcatttaatcctcgccacaaccctcagtgctacttttatccccatcttacccatgagtgaactgaggcacagataggtaacttgcccaagtctcagaactagtaagtgaccaaatgagaattcaatccctggctgtctggctccagtaacactacacaaatggtgcttgccacttaatgagcacttggtcaatattctctcttattattagatgggatctctgactgggaggggagaagggggagaggaaggggctctggagcctgggaggaggcttaaggagacctcggggagagggctgggggcagctaggggcagagccgtgttcctttttgtatactatgtcaccacagtaaaatcacttcctcta

SEQ ID NO: 162 - DNA, 543 bp, Homo sapiens
gcctgcctagacggtgctgggagcgcgtctccttgaacgttgtcccgcctgggattgcgaggatagagacttgctctgttgcccaggctggagtgcagtgacacgacttggctcactgcaacctctgcctcctgggttcaagcaattctcctgcctcagcctcccgagtagctgagattacaggcatgtgccaccacacctggctaattttgtatttttagtggagacggggttccaccatatcggccaggctggtcttgaattcctgacctcatgatccaccagcctcagcctcccaaagtgctgggattacaggcgtgaatgtaatgatttttaaaaagaaaaacatggatgtaaagaaagtaaagcttcgttttgaacagttatgatggtaacaaaactcaaaggagcaactaaagcagtgctgcaaccacttttgtctgtcttagtaattctgattagtgtacattcctcccccaccaaccattttgagagaaatttgtctgaaaacatgatttatgaaataaacataagtgctgaaag

SEQ ID NO: 163 - DNA, 4140 bp, Homo sapiens
ctgttggtttagtctgaaagctactattaaatatagtaaatattgtaattttattttgctgaagtttttcagtcatctcttgttgaatgaagctcattcattagtagatcttcatgagtggctcaggggtacataattgtctaagttatgtgtttgaagctgtttttctattatagtgttttatactgaaggacagcttgactgaatataaaatcttggttcacactttcagttttttgaaaatttattgtcttgctttatatatattttttgagaaatctgataccagtctaattattttgcccttgtaaattatttgatcacgtatccctgaatcctcgaggattaaaaaatttttttcggcctggctcggtggctcacgcctgtaattccagcactttgggaggctgaggcgggcagatcacgaggtcaggagatcaaggccatcctggctaacatggtgaaaccccatctctactaaaaatacaaaaaattagcctggtgtggtggtgggcgcctgtagtcctggctactcgggaggctgaggcaggagaatggcgtgaacccgggaggcagagcttgcagtgagccgagagtgcgccactgcactccagcctgggcaacagagcgagactccgtctcaaaaaaaaaaaaagaaaaaaagaaaaatttttttttcaagtttaaatagttttactgagatgtgtcttggagttaacattcaaagtttacttttccagttaactggaaatccctttcaaaatgtagattcagatcctttttatttctgataatttttcatggattataatgttaaatattctgttccattgttttttatttcttcttcaggggttccaattatatgtgagttatttatcttttgttcaactttctctttctgaccatttttccttcttttctgtatcgtatttatttgtttatttttgcatctatccagtgtctaagttttcattagtctgttttcctttggacaccttgtaatttagtcttcatttataattcccccccttccatttctttcttgaattcaataatctttaaatttactcgtggtttttttaatctatttctgttttttatattttgaatttccaattcacggtgctttttcatatccccaaatgcttatctgaggattttattcagtttgatatgttgtgttacaattttcttctgatttaatggttgctttttggtagagaattttcatcagccaatgcatgttaattattgtttgctgatttctcatactaccattatatagatttagtccatttccttccattcatttttttgaatttgaggggttataagattcctagttcagaaggactctctctgtcagcatagaaaatacaatttctttagggggtgttttttttaactttatagtagagggagggattatgtatgttccagttttttgttttttgtttttgtcttgcaggaccctgaatttctcctgttgcttcttttccccttcaccatccagttgccaaaaggcaccttgcctattctttttgctctctccactccctgaagctatcctgtaataagtgttgtgatactaagatactttatatttttgcacctaggatagaatttctatctctgctggtgattttagaccaattttaggcctgccactagatccgtttttctttattctgtatgttcttctttggcctgcccttgcttgctacaaaggcttatggtagaaatgtgaaagatcactcacttggatttggtgcttttaatttttttacttataagtatttgacatttggctatatttttcttcttgttaggctgagggtgtattttgtatagatttatttattcttcttgttctgtatcgtttatgacggacataggtagctgccattttattttattaccgcgaagtcctcacctattcactcttaaatctacctcattgaagacttcaataactatttgttgttggaagccataatgaaactgttgatcaaattacccaatccaaatcaaattaaccaaaaagactttcttcagtcttcatattaattaccttccctgcagaacagaacatggttgcccattatgtgaaattccttttacttctttggtggtcctgtctgttttcttatgcctaattgttgcttacggtatacttgctgtttgtttgtttgtttgtttgtttcttttatacactcattaagtgagttctccatctaaatatcccataaggcacttcagaatcaacatatccaaaaggaaacatattttactcatctccaaatcttttgtttctccagcaattcaagttttggtgaatgaagctatgaacaatccagtaatccaaaccagaaacttgagagtcatcttttttacacctcccactttgcatctctcacattgaataagcaatcatgccctgagccatatactttcttagcatctctgccatcctccctatcctctttggtatggcctctcttcagactgcctccttagctctcttctggatcactataacagcctaacaattgtatcaccttcagttttgctctttcttccatatgactatcagaattatttctctggaagatcatgtcaatcactccttctcagtggttcttcattgcctataggaagaaatccaaactccgtagcatgagagaaatgtttttcataatgactttatcctgcctttctattgtttctttcatatcatgcccagctcagccccccattcaatgaaaatcatactaaactactttaattccactaacatgttgtgctagttaagcctctttacctttgttcatgctgtttttactcagaccactccattccacaacatacacttgggggatacctactaattttgaagacccccttcagccctgatgttaaccttctttgtggaatcattattgacatgatggatagaattggtcagatgcttccttgttcatcagttgtactaggcacagcattctaatgtagcacctattacacattttaaaatttgtttacatgtctcccctcatgtaagtttgtaggactggtacctgaaatatactaggcttaccttactgacattttgaaatataagatagctttccaaggcttgcttttgcctcctgattcaggactctaccattggcatcatcaggaagaatttctaatagtattattgatcagagtcttctggaagtttctgcaggttacacatcaacttacttttccctgacaaaataattctgcatctagaaacacaaacaagtagtcaaagaagttatattggaactaagagatgaattaccaaaggaaaactgaaatcaagaaacatttgatgaaattcaggcaatgtcttcaggtgccagaggacacagaaatgtcccgagaaccattcacatgatcttaaagaaacttctgctggttgtcttgtacctttgaagcaggtgtgattgagatggataccttaatttttttaaagtaaaaattgttcattctcttatgtactttagcatactggtattcttatcaaaatatgaaacagcatcaagtttaatattaattataaaacacatggtatatttatatttctgctctttattttctaaagttaactcagttaactctccatataggtatttggacatgggctgtaaccactttttagaacaaatactgtgaagattgttttattacatgacattttatgatgtgagattaacacctttgtgttagtaaacatcctagattgttcacttcaatatagatttttaaaatgtatagttatacttgtgcaggatactagaaaatgaaaatgactgttcacacatgctttattattcagtaattttacaagaaaatattactgtttgaaagaaaatcatgcatgcctaaaactgattctgttccagttttataagttagtatactaattttaagacattgtgtatatttccttcacttaatttctattttctactgcatttctaccaatataaaaaacaaagaattcagttggttcctttctagagggaaaatttgttgtgagtatagtactgggcatcacatgctgcttccctttgtggctttgaataaacccttattttcttgtcc

SEQ ID NO: 164 - DNA, 1491 bp, Homo sapiens
gcggctcactcccctcggatggtctttccacccgagtttttcccgggaagaggctctcaagactagccagtgcaggaggaggagtcgaactctggatagcctgtttataaagccctaactgtgccgatgttgaccgttttctgaaactcctcctccaaaacccacgccaaaccacaagatgaaggaaattcacacatcaggatgccaaaaaccatggaagacttctgatgttctgggagggttgacaaagatggaccttaaattctagaatttaggtattcatggttgagatcctgaagaaaacattttctgctgagcagaagcaatttaataattgcctcccttcatttcagaatccagaagtgtctgcagccaaccaaagagggaatgtttgatggacagaagttggaatggaaggagaaaatggcttattttagttaaaatgttttacttttggaaatttttttaaaaacttattttcacatatcacataaatacattgttaggacccctcccagggccatagaagtggcctgcacagacatctggttttaaagtggcagtacagaagcaagctggtttcactgtccccacagaaaaccaaaaatatacagagctgtgattttccccagcaacagtccagaactcatatatgaggatgagacagatcctagggccataaagaaaaaaacttctttggaaaaaaactccaagcagatgttaaggtcgatcacaagacttctaatcacatactgagaaaacaaaagcatcactgcaggaaatccctttaaacttttgccttatggcaaatggacatatgctcaaaggtgctgaacacatgaaataaggctgtaaaaatctactaaacaaatgaaaataattacattgcaaatgcttttttccttagagcacttgttttaagaaatgtatttctggaatacaagctagaagtggttttgtcctgctgctgagggttaaaggcaaacttaaggtctccagcctttggtgtgacacatgagagcgaataacaaaaagaaggtcttgagttttttgatagttaggcatattttcattataatggtatccagatatgtgatatatctgatatataatacacatatagacacatatatgtctctctatatatttgtatataggtagattttattatatgtgaaatctgcatataactataatgaaagtctcaactgttacctcaataacctttaacctgactacaatatttaaaagttcaatctcactaccagaacacaccctgacacttctgattctattttgctttatgttttgcatattgtttgtcaacttctatcatatgacttagtatgtttattatttattgtcctctctctccattgaagagaatttttgattccttaaagaaaatatttctcacatgatcagttttttaatttacaaaatatctcaatgtcaatgtacccatttcaaatatatgtgtgttaaacatta

SEQ ID NO: 165 - DNA, 1798 bp, Homo sapiens
aattgtgccagtcacttcacagctgtcgccttttccagcaccattgatagcactaactcggaatttgtattcttcacctgcttgtagatcagtgactgtatatcttgttttcacacatgcctctgcattcaccttgtgccagtctcctaagtcggccttacacatttcaataatatacccaattatttccatgccaccatcaaacactggtttggaccattctaagctcacagttgtctttgatgtgtctgttactttgaccactgtgggaggacctggtgggttgacgggctctctacatttaatgagtcttgagatgccacttgcaggtccaactcctgcagcattttcagccatgacatggaattcatactcattgccttctgtcagaccagtgactttgaatcttgtttcagagattggtcgtttgctgatcacttttacccatcttgtgcttttcttttctcttctttcaaggatatactgttgaatttcactgccaccatctgattctggccttgcccatgtcagggtaatgctgttgcctgttatgttgctaggttctggaatgccaggggcatcaggaacagctgtaaaacaaaaacaaaaccccaaatcaattagatgcatttgcttggaaggttaaacttttgacatagtaccgcttagtaaaaacgcaaacttactatattgtatttgagcaaccactggatcagaatcaagtggcctgccaacaccaaacttgttaactgcagaaacacggaattggtattcattgccgtttattagtttaatggcagtgtaactttgggcttcacatttatcctcaattagtgcccaggcaagtctgctggtttcccgtttttcaatgatgtagtgggttatgggagcacaaccgtcattgagtggggcatcccaccacagagtcatcttctccccagtaatattggtgaatcttattggcccaactacttttcctggtgtatctataagaaaaagtttctagagttagtttctttttccttgtccattaaaatacaactaggcatgtctctaatccaagttcataaattgtagcattaagaagctattttaaaagtaccttgtactttcactttaatttctgcttttgcagaaccagatgcatttttggcttccactgtgtatacaccacgatggtcccgagtagcatctctaacaaataggctggtggatccaagtacgtcggttatttccatattcatcctcttttcgatttccactccatctttgaaccaagttactcgaggcactggtcttccttgtaccaaagctttaattctaaggctctctccggacttaataatgagaccatcaaagtattcagggccaaactctactattggtggaactataaaagaaagagaaatactatgtattagtttggcttaataaagacatacataaatatatatttttcagtagtgccatatcacaaggccaggaagagtagtgacttctactgtgctaccaaagcctattttgaaagtaggattgataattgagaatttggactatggggttaaatatttgcctattattattccctttgtaatgcctgtcatgtttttaattttgcattgctctttgtaaaaaggaaagtgaaacatttacagatcatgtacttcctaatactgctgcacagtcacacaagttcttttaagaggccatcagctgcattcaagcaaggggatgattgtgttgttggatgtatgttgtattttaataacttcagtaaagatggacacttattctcgag

SEQ ID NO: 166 - DNA, 1600 bp, Homo sapiens
tacacacacgcaatgacccacgagaaagggaaaggggaaaacaccaactacccgggcgctgggctttttcgacttttcctttaaaaagaaaaaagtttttcaagctgcgcgggcttcctgtgcgcggccgagcccgggcccagcgccgcctgcagcctcgggaagggagcggatagcggagccccgagccgcccgcagagcaagcgcggggaaccaaggagacgctcctggcactgcagataacttgtctgcatttcaagaacaacctaccagagaccttacctgtcaccttggctctcccacccaatggagatggctctaatggtggcacaaaccaggaaggggaaatctgtggtttaaattctttatgcctcatcctctgagtgctgaaggcttgctgtaggctgtatgctgttaatgctaatcgtgataggggtttttgcctccaactgactcctacatattagcattaacagtgtatgatgcctgttactagcattcacatggaacaaattgctgccgtgggaggatgacaaagaagcatgagtcaccctgctggataaacttagacttcaggctttatcatttttcaatctgttaatcataatctggtcactgggatgttcaaccttaaactaagttttgaaagtaaggttatttaaaagatttatcagtagtatcctaaatgcaaacattttcatttaaatgtcaagcccatgtttgtttttatcattaacagaaaatatattcatgtcattcttaattgcaggttttggcttgttcattataatgttcataaacacctttgattcaactgttagaaatgtgggctaaacacaaatttctataatatttttgtagttaaaaattagaaggactactaacctccagttatatcatggattgtctggcaacgttttttaaaagatttagaaactggtactttcccccaggtaacgattttctgttcaggcaacttcagtttaaaattaatacttttatttgactcttaaagggaaactgaaaggctatgaagctgaatttttttaatgaaatatttttaacagttagcagggtaaataacatctgacagctaatgagatattttttccatacaagataaaaagatttaatcaaaaaatttcatatttgaaatgaagtcccaaatctaggttcaagttcaatagcttagccacataatacggttgtgcgagcagagaatctacctttccacttctaagcctgtttcttcctccatatggggataatactttacaaggttgttgtgaggcttagatgagatagagaattattccataagataatcaagtgctacattaatgttatagttagattaatccaagaactagtcaccctactttattagagaagagaaaagctaatgatttgatttgcagaatatttaaggtttggatttctatgcagtttttctaaataaccatcacttacaaatatgtaaccaaacgtaattgttagtatatttaatgtaaacttgttttaacaactcttctcaacattttgtccaggttattcactgtaaccaaataaatctcatgagtctttagttgatttaaaataa

SEQ ID NO: 167 - DNA, 838 bp, Homo sapiens
agagccaagacccggccctcaagtcctcctattagggcagcactagggctacctctttgtcagcagaacctttggatagccgctgatggggtgagtcagctttctgggcccggcagaccttttgggaatccctggcttttggggcacaacatcctggggaccaccaaaaagccctttcacctgagctttgggaaagaggaacagctccggctgtgggtggctcatgtcaccatctggaagccagctgggccacagcagacgcgctgtaagctccttggaggcaaggattctgtctgcttcacctctaaagcttcagcatggcatgtgccctgcaaatggcagtgccagtggacatatgctagatgagtggatgaaggaccatcccacatcagctcatcgtggagtatgcagctcagtcctcccgcctctcagggacaacttggatcttcaccgttcttcgccactaagaattccagtcatctacattcagagggaagctgagcaaactggctcctgcccacactggaaaatttctctgcctaaaccagcttccctaagccgaggggagagtccaagatcccgaagatggcagggccgtgcaggctcctgggattaagacacaaacaagccctgttctcaggctgacagtaaatggttcagacagtcctgatgacttgtgcattgtgactgacacgggacacagccacggaagtggagtcacggtacccaaaaccagagaggtcagaggccagacacttatctgggctgcaggacctggtgcccacctctgtgggtctttctcaaagactatggcagaaacttcctggttccaagggac

SEQ ID NO: 168 - DNA, 760 bp, Homo sapiens
gggaaggtagaaggtggggtctgccggacgcgtgttcctgccaccaggtgcccgctccccgcgaggccggctcaggagcagaaggaagcccggtgccagccagccttcctgaaagaccaagcccgcgccatccggcttcctccagtggacgcctgcaggacccaggaacactacatcaacactgttggcggggacctggacacagaagactcctgtttcaagaaaatacaatcatctctcaaaggctgtaatttatatgcattttaaaactctaggcattgaaaaccacccaagtgtcccaaatagaagggtaatatataatcaatcactcagtgtaatattatacatcctttaaaaatgttattgggaaatgttttatgatctgtaagtccaaggaatcctctcccaccatttctttccccccgctgttcccccatacccacacttctttgttccaattggcatgtaaatttggttttcccgccaaatgagtcagtcatgatgggaacctcaactgatttgaacagatgtgtgtcaatgttacttggaaaactagatgtcaataaccagggtcacagaaaaaggcagtggtcacaactctgtaaaaatgtatgcatgcacacagacaagaactaaagtggaaccccacacaggaaaacagtgggctgtactccagtgctgggacattgaatgactgtatgctgcttttgatttccgttaatatgggcaactgtccaattaaaaaaaaaactcctaagga

SEQ ID NO: 169 - DNA, 386 bp, Homo sapiens
tatatatatatatatatatatatttagaaaatgggtagaactatgaagagacatttcactgaagcagttatactgagataaataggcacataaaaagatttccaacatcaccatccatcaaatctcagatctcagcatattctgctttaaaagactcatcttgtcacatttcagtaagaggcagaatcgagatttgaatccatgttgtctggttgcaaagacaaagcttttaatgatgatgctacagtaacaatgctagttatttttgtcctttactcaccatctatacctattttgttagtatctcttgtaatttttaaatggtttatcttcatatatcattgtgattgtggtaactttgtattaaatctatatttttatagatc

SEQ ID NO: 170 - DNA, 733 bp, Homo sapiens
ggcctgtcctggggacctggcgaggcccggcctctgccagccaagcctgctggggacgaccgaggtagcccgggctcggcttaggaaggcagcgggactcgaggccttggggtccgagtccgaactcgctcctctagcgccgggcggggagcgagtgggagagcggccgcgaagctccagtgttgaaaacgcacccctcccagctttttgcaaggcctacttgggggcggagagacaagcaagctgtcatgttataagcagccctttgaggggtccatgtgatgtcaaggaatgaagtctctagccaacatttaatgaggaactgaggcccaccaacaaccttgagtgagcttggaagtagctccttcagcatcagttgggtgtcgagatgactactgacagcttgactgcaacttcatgagagtcttctggaccagaaccactcagttaagtggctcccagattcctgatcctcagaaactctgagaaataatgaatgttggttgttttaaaatggtaaattttgaggtattatgttatgtggcaatagatagctaatatataaattatttgaatcaaacaatacgttaaattaaagctcagaagaataaacatctgtaattccttaatttgttttcccttctattctacagaatagaattttacagatgaaccttgtagttacttgtgcaataagagacagtatgttgtattgattaagtgcagagcctct

SEQ ID NO: 171 - DNA, 2008 bp, Homo sapiens
gcgagactccatctgaataaacaaaaaaaaaccccaaaaaacaaaaaaacaatgtcatggtattagttaaggcaagtgatattcgctaccataacaaaaatctctaaaaatcttatggcttaatataattagaatgtactatttgccccggagaattcagacagatgtttgtttctgctctagtcactttccatatagtcattccaagtccagtcttcttccatcctgtggctccgacttcttccaagaccttaaaatcctttctccttccagcagatgcagaaggagagaatgtgtggaggattatgtagaaggatttcacgagcctggcctggagaggacacatcacttccaactccattccattaccagagcttagtctatttccagaagattataagcttcatgggggtagatgctttacttcattcatcactgcatctccaacgcctagcacagagtcctgaattacaggctcaataactatttactgaatgtgaaaacagagctgcttgaagatatatgaggctaattgagcttgtgcatttgttggctattgctgctacagtggatgctgttgttcagtattcagatatcaagaaacaactagccaaagtaaggaggaacgaggggcccatgaagctcagtagagcttgtgataatatttgcaagagaagactacctgccaaactaacttcagaaaaggtgtttctggttgaaatcgtcgtgcccaacattccaccaggttcctcacatgttgaatacatcaaagcctactccacccatctggaatggacaagcagaaatgactcactgtgttttccaattgcactcaagacctgtctccatatgccctcctcctctgcttgagcagaaggtgaaagaggttgtgttgactgtggaatttggccattgaatcttgaagacaaatgctctttgacttcactacaacatcagagggcacttggccaaggaagactagttagaaccagcctttttgcaaacacagctgaggtttttatcctgtcttttcttcatcacaaaagtagcatggagaataatggacaatagagttcaagtggagcaagaactgtccagaatttggggaagaagtcacatatcagtcctggccatgataactggggcacatgtactatatccaagttgatatccttaatttggggaaagttttcttgcctttcccacagcctcccaagccattgacaattcccacattcaaaacattctcattcacatttctgattcactttgggctacaggaacaacagatgttgagtacttctagggagcaaatccattatagatggaggtaggtcttgcaaacagagaggtagagagctttctcgagacctttggaccaagcagataacatcacaaggtgtaccttatgctaagtgcctgatctctaagaccctccaccagcgtcagagagacagcatgctcacaacatgacagctggtcatacaggtgaagaagaacatgaagaccagcccacccctgaaaatgacagatcaaactcagcttcacaatgtctcttattccatcgctaatggtgtttaaaaacacactttgtcttaaggaacaaggggaactgaccacgtgttcatgacggttcatttcttaccctctgctttggcttgaccaaactttagtcaggtatctctcctccacaaagattcctagactttggctgtcccccaagtttaagcaagcactgaaacactaaggagcagaacatctgttaacagctcatcctgaaaatcaactgaccataggaaaaaacactccctattgagatatcctggttttgccacctgctcgcccacactctatgcccttctcctccacaaaggtctggctggttcttctccctccatacaaaggaaaagcttatttctgtttgattttgagacatttgcagatatctgaggttggcatgttcttcctattgcaatagtctttttgagtaaagtctctctttatctaa

SEQ ID NO: 172 - DNA, 496 bp, Homo sapiens
acacaaattaatccactcaaatgttggcaagtggagcagagtcccaggacaggtacagaaacacccccagttcaaggatcttcacacctggatttaggcctacacctgcaactaccccagatggagccatctcagccatgacaacagagaatgtaccactctcacgtgaggaagaggggtaggcagtgctcctgtatcaccagctgttaatgagaccctgaggaaaccacatcatggagatcagcccttctctcctgtaaggaactcatcctatgaaagagcaattggtggctgcaagagctgtctctgggacagctgttcatgtctatatctgcagggtaaccctcatagtcatatgcagtcatatccatagtcatatctggagtcagtctccagtttgactgagtgaatggagaaactaaacatttattactgaataataacattaataaaccatcttaatgatagtaataataaacatattgatgagtattaa

SEQ ID NO: 173 - DNA, 1453 bp, Homo sapiens
ctactttgaaaggggatgcttgaggctgaggtagttttgagggaaagggggaagttctagtttgatttgtttgggagattgctgtcctttcataactgaagcaaatgcttgaaatgtaaaccatgtgtgatacgaatgatctgagagccagtgaccaagtctgcttttccctgagctctcctgctgccgcctctacctttctgacatggccttccatttggaacttgatatgtgtacaagtgatctgttggccactgtttcattcatcctgaccactgtatccgtgtaatgtgatctgagctacaacaggtggtatgggatagaggcaaggaaagcagagagagccctctgaaatgaacactacccactggtgtgtgtagcacatgatagtctgtaggcatgagtctgaatgttgttctcacactcctttactagagtattcgttccctctgaaggtagtttgaacatggaaacacagttctatacctagaaggttggaaagtgtctgggactataagggttaacatgcataattgcaaagattgtccgaaggctgatggaaagcagagactgaatgggattgagaacagatgcgaagcttgatttaaattacattttattggatgctgcagccttaagagacgtgactgctttacagtttgtttccacactgtgggcagctgctgtctgttctgtgtccacagtaggatcctgcccaataaggagcagcctccccacctcattgtgtttgaggcttggcgccttcctcttaactgtagggcttgagtcaggaacatggcttgactcgcagtggggctgctatgtatcctccctggcttccagccaaaatcacattggtagattcaaaggggccaaatttctttcccctctatctttccctttcccctggttttggaaatagagttttctgtctactgatttgttagtttccttttcttctcccctcactgtcaatttctaggtcattgctgctcttaagactttagcagttggaacagggttggttctgtcaatgatgcatgaagcagacttagtgtccctgcttggcttctgctgcccttgtgggagcaaaagctgatatatgtttgtcagtaaagtcttaagtgtaattcagactgctgaggaagaaagccctttccttgctggcttttctccctgaagctgagagcttcaggaaggtggtaggagttttagtgggatgggatgggatgggcttgtggttagcagtttttgccaggatcataggctgcttcacttagagtagtggcaaagatgctgacctacattcttccttttgaaggtgatggagtgtgtgtctatatcctggtttatctctctcccccaccccaaggaagctgattaagcttccatagagtgttgggtgttgccatggaaagagcatagacaaaataaattgtgtgtttcaacccca

SEQ ID NO: 174 - DNA, 552 bp, Homo sapiens
gtttaaattctttaaaaattttaatcttttaaataaatcagatgttagctatgactatattaaatctcatacagtattataatagggagaaaaatggtttcaaataggatcagaacttttaagactttattataaggagattttcaaaacctcaggcttttcatatgtttaaaaaaaggtttgagtcatgggtcttagaggcttttgaaaaataacatttaagttgtcaaaggaatttggttcttaagatatcctttgtttttaatatggtgcacaaagttgacagattgtccctgccgcagtgtccagggtcacctctgggcagctgctcctggcttggacgtatttctcatgaggcagacttttgccagccactctgtgtaactctgacttcctaaatggtgaccgactttttagagactgattcctagtaaaactattttacaagtgatcccactttaagttctgtgagtaagaagtctgatcacctcaggatggtgaaaccgagttcttctggagaacatattggaaataataaagttatgtgcctga

SEQ ID NO: 175 - DNA, 2135 bp, Homo sapiens
ataaatgaaattgggccaggcgtggtggctcacccttgtaatcccagcgctttcagaggccgaggcaggcggatcacctgaggttgggagtttgagaccatcctgaccaacatggagaaaccccgtctctacttaaaatacaaaattagcggggcgtggtggcgcatgcctgtaatctcagctactctggaggctgaggcaggagaattgcttgaacctgggaggcagagggggtggcgagccaagattgcaccattgtactccagcctaggcaacaagagcgaaactgtctcaaaaaaaaaaaaaaaaaaaaagtgaaattgcttacccaaatctacagttaactttcgttttttaatgcttgatgaatttgcatgtcattcttgggcagtggccatgctgtcttctctgtattgttccaatttgggtatatgtgctgccaaagtgagtactgcagaattatttcttgagagaggcacttacatgtgctgattggcactaaagcagtggaatgggaagaagagacttggaaggcagcccagacgatccaggcgtgtgctagatggcaactgaggagcacggtgctaccatctttactggtgtttccacctatgtgccaggggttctgtgagctacctgagaatactgaagtatataatgctctggcacatagttaggcactaatcagtggtatttatcaaggtgattaaaagcagatttaaaaagcagctcacagttgggcgcggtggctcacacctgtaatcccagcactttgggaggccgaggcgggtggatcaccagaggtcagaagttcgagaccagcctggccaacgttgtgaaaccctgtctctactaaaaatacaaaaattggccacgtgtggtggcgggcacctgtaatcctagctacttgggaagctgagacaggagaattgcttgaacccgggaggtggaggttgcagtgagccaagatcatgccattgcactccagcctgggcaacaagagcgagactccatcttgaaaaaaaataaaataataaaaagcagctcatactagggaacttggtaaagcaacctcatgctgttgtaggttgaaagcctggtcagctattctgcaagacagtcaaaaattgtttacagggctggacagcatattgctattgaaaaatagctattaggagaccttgcacaatttgtgaaacattgttaggctcattgtactgtgtaaaatcaggaaagaatttgggaacatactgatacaacaaaaagataggttgtcaaaccctcacttcaccagaaagctaaattaaccagataagtctttctgaaagttttagtgtcttagtttgttcctgcgctgtaacagaataccttagactgggtaacctataaataataggaatttatttctcacagttttggaggctggcaaatgcaagatccaggtgctggtacgttcagtgtctggcaagggcggctttctggtccaagatggtgcctttttttctgcatcttccatagggaatgaacactccttatggtagaagggatggaaggaccaggctttttttttttttttttttggatacagcaggatcttgctctgtcgcccaggctggagtgcagtggcatgattaaggttcactgcagcctcaatctcccactctccagcgatcatcccacctcagcctcttggatagctgggaccacaggcacgagctaccatgcctggctaatttattttttgtagagacggggtttcgccatgttgcccaggctggtctggaatttctgacctctagcagtccacctgtttccgcctcccaaatgctgagattagaggcatgagtcactgcacccagcccgcagcctcttttataagggcattaatccccttcatgagggatattctctcatgacttaatcacctgccaaagaccccacctcttaatactacatcagtgatgggttcaatgtatcaattgggtgggagggggcacattcagaccatagcatctagtcattctggttttattaagatttattagacctgaggcatgaaaaatagcatactggatgggacttcagcatcgatgagttgccttagtaatactgttaataaaaagcactaaatatgc

SEQ ID NO: 176 - DNA, 566 bp, Homo sapiens
agcttcccagcagctttgtttacctaagcaagcctgggcaatggcgggcgcccctcccccagcctcgctgctgccttgcagtttgatctcagactgctgtgctagcaatcagcgagactccgtgggcgtaggaccctccgagccaggtgtgggatgtaatttcgtggtgcgccgttttttaagcccgtcggaaaagcgcagtattcgggtgggagtgacccgattttccagtgagatgaacccggtacctcagatggaaatgcagaaatcacccatcttctgcgtcgctcacgctgggagctgtagacctgagctgttcctattcggccatcttggctcctccccccagatgaggaagctggaacttgtaggggatttaagaacctagccacacatcaagcacttggtaagaggtgaagctatctatggtttggtgactccaagctttcagctttacattattctgcctctcctcatctgcttctgcaggcggtcatgttagcacagatcaaagtcatgccatggtcccagtaccttttttcttttcaaaagttatctcaagttgt

SEQ ID NO: 177 - DNA, 562 bp, Homo sapiens
gcccagtgcgccaccgagagccccgggcagggggccgccctgtgccctgcagggccgcggggccgcgtagctctctcggtgcggcgggtaagtgctgcccggcgtcggggcgtcccgcgccgtcggtcccagcgtgcccggccgctgcctcccggggcaccccgcgctgcgcgcatccctcgggctcggcgcccgccccgggcccctccagccgcgggcgctgcctcggcgcccgggggacgcgcctccgctgcgggagctgccggcctgagtcctgctgcccctccagatcccagtccagctatagcccccaccatggctgagggaggggtaccctcgccagggcctggtgcctacttcagcaggaaagcccgactctccttccgccaccagctgcatgacatagcatcggccaatgactccaccatttgaaggggacgacgaggaggtgaacctccaggaaggcttagcaagcttccttccccagatttctcagcgatcctaatgtccacctccccaagtcctttctaaccttctcatcaaatgtgttcatagttgctaa

SEQ ID NO: 178 - DNA, 2129 bp, Homo sapiens
agcgggagatccgagcgtctcggctggtggaaggggcgaggagctttgcagttgtgtgcgagtgtgtacagggacagagtcctgagcaaggaaacctagaagggagagaggaataccatggaattgagtcctgtctggtagcactgacagacacagtggccagccaccctcatgccaccctgtcctgccatgggaaggaacagcagctctagagttcctatgggaactctctttccttctcactgaactctagcttcatcaataactcagtgcctctggccaagtttttagcctctgggacaacatccactatatccatatgaggcactcatgtaacacggtgattaagagtacagatgctgaagccagcagcctaagtctgaatcctgactgccaattattaatataagttgtggaaccatggtcaagttactcaacctctttatgcctctgtctcctggtctacgaaatgaagctttgaatctgctgttattaagttgctggtgctgaaataacacttattatttatgatctaactgaaatgggaacactggaaacttctttgaaactgaagaaaaaaatgaaaaagaagtttttacaatcaaaactgccatgaagactgctttacccaaaattttggtccacagctttcattgaattacttatcagggcaaacaaagtttagccatgtgaacacgttccaattttgttggaaataatttggatccagctatctttatacaatggtgagttcgtattgcatctcatggctaaaatactgaggtaaaggcttttggatctttgtgtgtgtgtgtgtgcatgtgacaaaaacaagcaatggggaaaggagtccctatttaataaatggtgttgggagaactggctagccatatgcagaaagttgaaactggagcccctccttataccatatacaaaaatcaactcaagatgaattaaagacttaaatgtaaaaacccaaactataaaaaccctagaagaaaatctaggcaataccattcaggacatgggcacaggcaaatatttcatgacaaagatgccaaaagcagtagcaacaaaagcaaaaattgacaaatggaatctaattaaactaaagagcttctgtacagcaaagaaattatcatcagagtgaacagacagcttacagcatgggagaaaatttttgcagtatatccatctgacaaaggtctaatattcagcatctacaaggaacttaaacaaatttacaagaaaaaaaaacaacgccattaaaaaatgggcaaaggacgtggacagacacttctcaaaagaagaaatttatgtgggcaatgaacattttttttaaaaaagctcaacaccactgatcattagagaaatgcacatgaaaaccacaatgagataccatctcacaccagtcagaatggctattacttaaaggtcaaaaaacaacagatgatagcaaggttgtgaagaaaaatgaacacttttatacgttggttggagtataaattagttctacccttgtcgaagacagtgtggtgattcctcaaagacctaggggaagaaatatcatttgacccagcaatctcattactgggtatatacccagaggaatataaatcattctattataaagatacatgtgcatgttcattgcaaaatagcaaaaacatggaatcaacctaaatgctcatcaatgacagacttgataaaggaaatatggtacgtatacaccaaggaataccatgcagccataaaaaggaacaagataatgtcttttgcagggacctggatggaaccagaagccattatcctcagcaaattaatgcaggaacagaaaagcaaataccacatgttctcacttgtaagtggtagctgaatgatgagaacacatggacacatggtggggaacaatacacactggggcctgttgcagggtgcggagtgggagggagagcatcgggaagaatagctaatgcatgctgggcttaatacctaggggatggaatgatctgtgctgcaaaccactatggcacacatttacctatgtaacaaacctacacatcctgcacatgtacccctgaccttaaaataaaagttggaaataaaaaaaaccctaaacatatacctac

SEQ ID NO: 179 - DNA, 4215 bp, Homo sapiens
aagggaatctggtgatatgtagcagaagccaccagggcctgctccaccagggagaacgcggagcagcagagtcagcggaaggagtgccagtgcgtacacctcctctctgtttacaaagcaaagctgcttgtaagaagtgcgcttgaggaaagagtgcattttacatttcatcacttcatcactctgtttattaaaatctttgttgacttgatatatacattcagaaaagtgcatgtatcaaaagctcactgatttttttatacactggaaacacttgtgtgaaataccactgaaggattcactttaaaatggttgtgtattaatgcaaatttcacctcaacaaacaaaaaaagccccagaactcaagcagccccgcagagcccccttgagctgcattttgttggaagtgtcggggtggaatcaccagggtcaacggtttcccatttccactcccgctggcacgtccgcagacccctgccggtcccacacgcaccccaacgcttgctgtcttctcatttctgctgggtgggtggtagtatgatattgtggctttactttgcatttccttgatgtttaatgaacctgagcaccttttcatatgcttctcaggcatttgaagttttataatagttttaaataggggtcttttttccttacatgaaactttgatgagagtgatcatttcttttttattccccaaccatgatccagttcagaaaacatcaaggaccttgctgcctctccaggaagtgtagcaaaaggcacctgcctgctgtgctggggaagagcagtgggccaggttagccccctgtccctggtgtgctacacttacaggtgggcattgggctgaaggactctctggcccttgctgttgggtcggggatgcagtcagaaaggagcatgaagggcatctgtcccggcagggccatgtggccagaccaggaagggctgctcaaagaagaacaaaggcttctctgccctgatggagatgctgacaccttcagaaagacgtgtttgtggcatcggcgtcatttctttctgtggctaccaaggccgagaacttctctgtgctccacctcatggccagggttcttacagccgcaggccttctgtgtgcattagctagctaacttgtttcttctttcattcatccaataagtatgactaaactcctgcagtatcttcagcatcggcaattccacactaaataagtaaaacccttgccttcacagagatcgaaaacaaacaggaaaactgtaatgtcatgttgggtgtctggagctgtggagagaaatgaagggggccctggagagccatggctgtgccaaggccagggtggcgtcctggagaacctgccttggagtggagtgctggatctggggaggggggagtgctgctgggcatttcatggacacataggcaggaggtgggcaggagcactgagagcaagggggagatgggagagggcaggggcctggtcagggtctcagggccctgggcgaggaatttgaattgcagtccaggtgagagggatgggaaggacaaggctttcagtgagctgcctgggctcttagagagtgaccctggctccctcatggaaaagcagccatctggcccttgagttcagcacctctccaagctccttcctgtccctagactggcagggacttccagggacagccttggccccctttccgctctgccttgccatctcccatcgcttgtcatcgcttctgtgttgggtttgccctctggtcctgttccctagagccatgctctggtcatgagtgttacagggccagggcagggcctgtcaggggaacagagtgcagaccccctctgtgggcccctctgggccctcgcatcccactgccttggagaggagagagcaagatagaaacaggtcctgagatgaggtggcggcatacaagctatctcacacttctgcacccttccaggtgcgtttctgaaatgcatcaatgctgtgagatctacactgacttcagggatgtggcaaaccccctatttcttgtaaccagccagcgacagtcattgtggagccctgcctgtgccccaggcagccctgtgcactaagaaagccaggcctgggagacactgacttgtcgtttgcctccaggcgtttttagttgtaacagactagttcttgtttcccatcacctagaatctgttgatctgtctggatcttagttcctgagcctcctgctctgcaagacgcaccctgcacatgcacgctcacgtggggcacacacacccaggtgcccatcatgccagcaggtgcacagttggagaaatcgactccccagaccagactccccagagcgcggggagcggccaagtgtcctcgcacaaactggggtggaattgatacaggggccagggaggtccctaaacactagtgggaccctgaccctagccagcatccaggctcttgacactgttgtgagaaggatttcaaggatgagtcagaaaacagtgaaagtacaaagatttattgcagagtgaagagtacactcttgcaaaaagaaagtgtgggggcagactcaagagagccacagaatggggtttggggctgctatctttatgggtttctttaaccgaggggtggaatattcatgaaaattcctggaaaaaggtggagatttattggaattgtggtgctacccattctttctttcttttttttttttttgagttggagtttcactcttgttgcccaggctggagtgcaatggttcgatcttggctcaccacaaactctgcctcccaggttcaagcaattctcctgcctcagcctcccaagtagctgggattataggcacacaccaccacacctggctgattttgtattttagtagagacagtgtttctccatgttggtcaggctggtctcgaactcctgacctcaggtgatcctcccacctcggcctcccaaagtgctgggataacaggcatgagccaccgtgcctggcccagtgtcacccattcttacaccaaataagggtgtcctggaactgtcatggtgttggtggtgtgtgattgagtgcgtcagtgagcagataatgaggtccgaggtgagacctagctcaaatccagctctgcactgggtccggtcagtcttagccagcttggtccacaccctgtttttcagggtcagggcctagtcaccctatagcctccagttatatgaaactgttgcctggaatgtgtattcttctgtgaccacctgtattattcctgtcacagaatcgtgacacagcagcagccctttcccagtgtgtggggcacagttacattcctaggtgtggaaggaagacctttgctgcattaaattatccccagcatctgtttgctgcttttaacacgagtgacttaaagggacatgggttagaagaaggagggaggagatttgtgccagggatgaaagaaaatggctaaaagatgaatgaaagttgcatatatctctttttcttctgtaaataactcatgataaaagggaataaaatttaggttttccccacttggaagagacatggccaaacggagtgtgtgcttttcctaaaccaccgtgaaggtagcatgaaaaccaggcttgctcttcagagactaggaggctcctgttttgggcactccatctgccctgctgccgtgaaagctctcggacccaaatggcttcctgtgatccactgtggtctgcttattatattcccttcagctatgtttataactctgtcaacagccacagcgtgagtaccccaatcggataacaataacctaaaattttaaatgctcaaaagtcagaaacattttaagtgacaatatgatgctcaaaggaaatgtccattggagcattttagattcagatttttggattaggaaggtggatgtataatagaataactggtaagtataatgcaagttttcaagatccaaaaaagttcaaaattcgaaacacttctgactccaggcattttggataagggatacccaacctatattatgaagtggtagcaagaaaattacattgaaatggaacattttttcagtttatgtatccttttgtgaggtttttatttcaaaatatcacagtccaagccaaaaaatatacgtgggtgtttcagtttatgaaaactgtaagttatgtttacttttctatatgtatatatttttttacctcaataaaatgatagccccaaa

SEQ ID NO: 180 - DNA, 634 bp, Homo sapiens
gagacagataaggtctggatcagaaataaggcaatgaaggatgaaaagaaatggtttggcaagaatttgcaactgattagattaagaagagagaggcaaataagctagaaggaggaatctgaggtgaatccaagattttagactgtcaaagggctggaaaaaatgaggaagtccaaagggggatctgagatgcagttgactttagaaattagagatacccagcagaaagttaaaggtcaggactaaagctcgaagcaaaggtcaggactgcaaatatatggctgaatgtctatcatctaaaagtctgtagagaactgagtatgcaggagtgaaccttgggagggaaacatcagtgcaagtcaaatagaattaagtaagccatctataatcctatttttggccttccacaatttgatataattttatttctttgtacaatgtggtctacattttcagttatgtgtgtaagaattagttgttagtgtatgaaccgtcttcactatgctagtgagtcagctctgtgtaggacaagatgaactggttttcaatattttaatatcccttgtttcttcaaggagatcagggattatacacttttcaaattctaaataaaagaatgtgctttgtttcttaa

SEQ ID NO: 181 - DNA, 888 bp, Homo sapiens
tcgggctgggaatgcgtggcccggcttttgaggatttcctcggtccccgggcggaaatagctggaatggaggggcctctcgattggagacttactggtcaaatatttacttttgttgatcactggaaacgctacctaccacgcattgactaggaccacagtgaggagggaacgctttagatgatagagttttgtttgggggcttttttttgttttgttttattccaggaattcaggaaattgccccagaagtccgatttctgatgtgtaaaacctttttttacagaaaaccacgacttcctggaaaagtcttcaccgtaaatattaatctctttggcatgaagaggaaaacactgcagctaatttttcatgggataacaaaaatataaactgcaatttcttttattttttccctttcgatggtctttttaaacgaggagtaaagatttcaacgccaggtccattttccaaattttgtaccagaaccttgaggatgcttgtctctcgcgcgcttctccgcagaccgaaccctctccggaactcagagctgttcacccaagtcagcggaggaggcctcctgggacttgagcctgagggtggcgaagaaccctaggcagagatcatcaacttggtaccgatgagtgacgcggagcttgaacattccagcgacttgctccagggccactcccagttaagaggctgagtgttaactgcaagaggctgagtgttaactacgccgttggctccaggaaccgaaccgggtttggatacagacccagtcacaccatccatgaaaagctgtttctataatatgaaaaattgttaaatgacgctttagtaaaagccatttaaagatcttttctaataaatttttcatctttccaaacaa

SEQ ID NO: 182 - DNA, 332 bp, Homo sapiens
ggagagccaccttgtgacgccccttctgcctctcaccagcttccccctttctccccgtcctgtacggttccccctggagccagaaggaagcccggtgccagccagccttcctgaaagaccaagcccgcgccatccggcttcctccagtggacgcctgcaggacccaggaacactacatcaacactgttggcggggacctggacacagaagactcctgtttcaagaaaatacaatcatctctcaaaggctgtaatttatatgcattttaaaactctaggcattgaaaaccacccaagtgtcccaaatagaagggtaatatataatcaatcact

SEQ ID NO: 183 - DNA, 571 bp, Homo sapiens
agttgctaaagccaggccagtgagacatagagctgagacaggcaatgggagccctggattaggggaagagaagaggagagaggtccataccgctgcacagtgaggacaagctgatttcctgaggcatcgatgaggctcatggcactggcatgggagaggttggtgcaagagaccccattgattgccaagagctggtccctctctcggagtcctgctctgccagcctggctccgtcttcgaatctgagatgttgaaggagacactgtagactgaggaggaggagaaggaggaggaggaggaaaaagcccatcatcaacacacacatcaaactcaacttcagagaaattaggaagctgggaagccatgtaaaccaaaagcaggagacaccagcagaaccaacgcaggaagccagggaagtgcagaagaacagggcagggggcaacccaggggggaatcttcactgttgccagcaacacacactcccagcaggagaggaccctcagagtgagaacgcagagctggagaagtgaagaaggagcaggtggtgcccggggaagtccaggggtgtggg

SEQ ID NO: 184 - DNA, 815 bp, Homo sapiens
aggcgcacggcgggtatagtggttccgcaaccttgggatgttcggctgagcgcctgcctaacatgggagcgcctgcctaaccctcctgactggagggtcagcggcggggagtcctggccttcaatcggccatcgccacggcagaaactggggcccgggctgcgtccaggcccttccccgtccgtccacaggtctcatgggcgcccggactggggctgatgtagtttcccgacctctgacacataggatctggagattaaagctgctctgctaataattaggttcccacctctcaagatcattaggagcttcttttccaattcctctgttttgcatgcattggaaggatctggagctcaggacccactacctccccggcccactgcaagcttgaacatttgatggtggacacccctccctgactttgtattatgattcacaggctgctccccagaatactgaagaagaaactctaggagtgagacccaacaatctgtgtttaacaagtccccaggcccctggatcctcctggaatccctgatccctgttgctccctggcggagttttctagtccctcttacttgaagcatgtctttcagagcccggcaccacccaagttgggtatctgataccccatcagcctgagtctcttaaaggcctttatacacatatgtctacacatagggatttggatgatctcgggatcccacatcctcgctgtcccctgtccccccacaacatcccacaccaatacctttctgaagttttctagtccctcctttttgtttgtggtccttaaagcccagccccatgcct

SEQ ID NO: 185 - DNA, 559 bp, Homo sapiens
atttctgctctcaaacagtttaaaagatccctgtgcagaaaaagacgtatttagaacattttggttggtgatatgtaacaaacttgagatcttataggataggagaacactaggacactaattaggaactggtcccaggaacaaagaccttctggactcatctgacaagataagaatcatcaagcattcttccagcagaaagtgacaaagccctccttgagctgctcatgagaattcacaaagatcccctgctatatgaccctacttgcccaatactccacttcatcaaggtgaagtgacccaccaagagagactttcagggtctgggcattaccagataaaagatgcctattttattctggctgaaagcatgaacagaataaacaatgagctctgtgaagaatgttctatgaacccgaatcaaactcaaactcctgtgtcactccggtacgcctgatcactggatataaccacgtattggtccagaacctccctctctgttactactccctttggatttatccagtagtcttagacgtcaccagggccaagccatgca

SEQ ID NO: 186 - DNA, 478 bp, Homo sapiens
aggtcttgaactcctgacctcgtgatccgcctgcctcggcctcccaaagtgctgggattacaggtgtgagccaccgcacctggccacaagagagtacttgtacttggctgtacaacgtgtgtgcttcaccctgaattatgaagagttccctaatcaatgagatgaagtcttgctatgttgcccaggctggtcgcaaactcttattgtgacagttctctatctctctgtgaacaaggccaaggaagatttaccaaacccatccaaagctgccccgcccccacttccagctcttggaggtctcccatctggagctgggggctccagcctgctttgaagtcttccgggatcacctttcagaggagaagaattttaaagaatcctgtctgttcgacagggatttaagagagcagttaactactatagataaagaaacacttcaaggagcagctaaaccagatgctcactttaggactatgcc

SEQ ID NO: 187 - DNA, 799 bp, Homo sapiens
gcagctttcccgaaaataaaatgagaatccccaggaaacagggaaaatggaaggcgggcggctctgcaagtccgacctgggtgccccagagagctgctccgggaaagacgtttacctgctgcccagagctgggactgcagaccctgattggcgagggcttggagagtagctgagaaccttcccttcagctactgaagaccagacagggctttctgtatcacgctgcctgacgatgatgagggtgcagtgactaagagtgcagatgaaaggcccagctctccaaccaggtggatggatttgcaaggagcttctatctgggcgtggtggctcatgcctgtaatcccagcactttgggaggctggtcttgaactcctgacctcaggtgatcccccccaccttggcctcccaaagtgctgggattacagaggtggctcttttaattgactcctctccaggcatctctccttccagccacagagcctggcctgatggtcccagggccccagggccccaggtgaaggcctctctcctcccccactcaggtctgaccagctctgtttccatcctggtgtgggcacaaggtctcttgctgcagctgggccagtttgctgaccttctcagctccttctcttagactggagaggcctggaagggtgcccgagggagggtctgggctgctctcctgggctcctcccctccactccaggactctggctggagcctggtcagggtccttactgagttctcagccaagcgccagccctgtgatggcctgaggggtctggtggggaagccccaa

SEQ ID NO: 188 - DNA, 5352 bp, Homo sapiens
ccatatcttggctattgtgaaaaatgatgctataaatgtgggagtgcagatatctctacaagatcctgattttaattgttttggatatgtatctagaaataagagtgctggatcgcctggtaattctattatttttagcttttggaggaacctccatactgttttcatagttgctgtatcattgtacattctcaatgtacagtgtatagaggttccaaattccctacatcctcaccatttatcttttggttttttgaaaatcaacatcctaacaagagtgaggtaatatcattttgatattactatttgcaatcactttttgaatatgacatcaaaagcacaggaaacagaagcaaaaaataggcaagttggactatatcaaactaaaaacaaacaagaaaaacaaaaaccaagcaaacttctacacagctaaggatacaatcaacagaatgaaaaggcaatctataaaatgagagaaaatatttgcaatccatatatgtgataatggattaattttcaaaatatataagaaattcctacaatttaatagcaaaacatgcataatctgatttaaaaatgggcaaaggatttgaacagacatttcttcaaagaagatatgcagatggccaacaggtacattaaaaaatatgctcaacatctttaattatcaggggcatgcagattagtagaactttcaagtaaataaataaataactctacttcacagactaacctataaaatgctgaattttgttatgtaaaatgttacagaaataatttcctcacaattgtgttaattcgtttgtgctactattacaaaatatttactacctggtcatttataaagagcagaaattgatttttcacagttctgcaggctggaaatccaagatgaagtcacctgtagttcagtgtctgcgtctaagagagcactttgttgctgcacccgccagagggaagaaatactgtatcttctcatgaaggaaggaaccgaaggtgggaatagggaccaacctccctctttcaagcctttttgtagtgacattaattcatttatgaggattccaccatcatgacataatcatttcccaaaggatttcacctcctcccactgttgcattggggattaattttccaacacatgaattttgagggacacattcaaaccatagcaactggtatatagtaactaggtggcctgatggtcttcataataaagttatattttactttagtataaaataaaaggtcaaggcttgtaactgtcatgagactgcttcatgtatatctcccctagtgactatcacagttgactgacagctcctggggttcatctttgtatccatcactacctatagtccaaaatccccatctcacagctgttgtcagccaatgacaaagcatagtgaggtgctgttcctgctcaatatggaggaaaactttggcttgataactctccattggcctgccaaaatatgttaagtattgtgctactatctgaaactcattttacctaaccttttttattttctttcctccttcataaggtttacaagtattgtggctgaaggctgtgtctattcctgcttcctccacctcaccttgcaaaagtgtttatccaaataaatccctcacacatctaatcccattttggcaaattcagtttcagaactttgccttcactactagtctcaaggaaaatatattaatacacacacacacacacacatgcatgcacacacacacacatatgtatatatttcccaatctattataggtaaaatatactcttatcacgaataaatccaaattgtgaatgcttaaaatatactttacagaatattaaaatttaaaagcatcacaggaaaaatattaatactgttttcagaatttcagtatgtgaataatatttacattacagtttcatatgaaccttttacttctctatttagtatgccttcatgtcactgcagaggtatgaaaaggagagctctcctagttgtgaaaaaagaaacatgttttattgggagctaagtggaaggttgaacatgtgggaatatctgggcatgcactgaagacaccttttgcatctcccccatccacatagcaaagtgaatgtggtttgtgtccatttatgcaggatactctggaaaaccaaactgaagcaaggttaacatacatttttaaaagaaaactaaaggaaaacaacacatactttattacctatcaaagtaaccacttcattatattttagtggaagctattatttattatcgaattatttgcttgggcaggaggatacagggtttttccatttgggttgtatatgttcctcatgagaaaagctgaagacaaaatcttacccttctgcccaaagtcaattgaatcaacatgtttaccttgctccacggagctgctaacctactggctgggtgttgtgtggcttggcaatggagttctgcatgacaggaacaatggtttttaagtggactaatcagagctattaatgcatatgcagtgaaggcaggaactttgctacatgcagggcttatcattttgctaataacaatgcctggcacagattagcgatgtgttgaaataaaacatattctgggagatataagatagagaaagagagcagcatgtagtagaaatagatgtcgaaagatgaattaagatgatgcattaagcttgaaacgtgaggcagagaaagctgtacataagttgaaggctttgagttaaaagactataggaattagatgagtgggggctatggagaacagagagaatttagagtgtggacaagtgttctatgagcagagactgggactagccaaaacgtgatgatgggcagctagcttggaaagaatgcttacaacgtgaaaattatatatttataaaaggccattacttctgttaaagaacaatagaccccagtgaaaagaaaggaaattgaaaaatagagaaaatgtggagaaaactagaatctctatagacagcgtcaatgcagcatcaattatatgaaccacttttgagcacaaagaactattgttttgaccttggaggcaatttggtcttcattaggtttagctgtaggatagttgatgttcattattccctataacacttgtgatggcaaaaccttcacaaatttatatgatctaggtatgttttcaatccttacaacccaaataaccgatcataactctcactatgtcatttgaaaaaaaaaatgatcatcagaagtgtaattcaattagcaagtatcagtagtggagtataaattattattggttaatactaagtatgattgaaaaatcgtagtagatggaaatatgggaatctttattttggatgaataaactttatgcctaaaacatatgtttataaaaaatactttgtgaataaacccattgtctaatatttaaaagagttgaagtatgctattataagatcttccttaattgatgaaatgatgcaaagccaataatattgctccacttactgaagtatagagatgaagagaaaactttttctttattccatgttctatataagtcaagaactagagctcaagattaagatttttgttttttgttttttttccatttccctgggaacagagcaacagtctttctgggtctaaaacatccttttttcagtacaccccacagcatcctatagaaatatgttgcaatcagttgccaagtcacatcctagcttaatgtcagcaattttctttctgaaccaattttgcactcagcattaagaggaaatattgaagggagacataccttttatgtttgtaaaatttatacttcttgagataaaaaagcaactatatccattgtcgtgggatcttgagaagaaataagaaaatgaaatattatagaaaatattatattatttaattgtcctgttctaaaacactttctaagcctgcctgtttttttgccaaattaaattaatatttggatgtagacagcttttcagagtggcagtatcatagtcaatgaagatgacctgaggcacagttattgctaattggacatagaaaccaccttcactcatatataaaaattattatgtgctacactagatatttcaggagaattgataaaagaaagactgttgtattcatatgcttgtcttcctggctagaggatctgttttaattaatcagctcatggagtttggaaaatatttatagtatacatagctgagtgttcatgtaaattttgaatacattcatacatcttttttttaaaaaaagattgaacttcaaaaccattttcttacatactcagtagaagttgttatgagccaacattttttgtgagctatactattttaaacatctaaagtaaattatttgacatataaaaagacttcttcatttaaaaatatatcttttaaaaataattttacaagtgatggcatctcattttagaagaagaggcatcaatgacagcagttacagtaactcgatgctgaatatgtttttaaatacaagatgctgtgttcagcattgtacatacattatcaaattttattctgataatatgctgcatgatgtattaggctgggttctctcagacagaacctacacgtatacttatatatatatacacatgcatatacatacacatacagagagagagaaagagagagagagagagatctctacatttattagaggaattggatcatgcgattatgggggctgagaagttccaggataggttgtctgcaagctggagaaccagggaagagagtagagtagctttctccaagtcctgaagcttcagaactagggaaactgatggtataactctcagtcagaggccaatggactgagaactcagacagccactttgcaactcctggaatcccaaggccagagagcctggagtttggatgtccaaaagcaccagaaggagggtgtcttaggtccaggagagagtgagctttcctatgcatttttgttttatccatacccctgaccaattggatggtgcccacccgcattgagggtgggtgtccctctattaaatattttaactataattttaactgtgatataggcactgaattcttgttgctaataatctggtaagatccatctgaactatgaagtgagtacctggaggaactcctacattttaggctttcaaaggttacaggcttttcgtgtgtgtgtgtgtgtgtgtgtgtgtgtgtgtgcgttttgagaaaaatggaattcaaacactgtgattagaatgtatgtttacttatatagaattaatgaatgtatataataataattactgtatataattttaaaatataataaagtctctttatccatgt

SEQ ID NO: 189 - DNA, 573 bp, Homo sapiens
acagataaaataagaatcagtatggaacacacctaccactaccatcagaactgggacttctgaagccagagaagacccttccatgattcatgactgaaaggtctgtgaacggccaaaagaagattacagggagaagaaccaccatgcaccctccaccagtatcttgggcagatgggcaggagctctagggccgcttctcagtgttcctcagatggagaatcaacctcaggacaaatcaagtctggatccttctgggctgaatcctttctaggattggtacctatcatgacatggtcacattcctccactcctctatgagaggatggagtcattggacaccaacctaatgctggcaaatgacagacaggaagagccccagcagggcagatgccacagaaaccttaactgggacacagaaacatcactaacaaagacccagcagctgtcttggtgagggagacacagtctaacagtcacaaagaggcacaacggagaccctaacccccggccctctgcagacacctctgcctgccctcccagggaagctgccggccaagattatttcaggtcacc

SEQ ID NO: 190 - DNA, 3506 bp, Homo sapiens
actcacctggcggctgccacgcgcccccgcccaggatccgaggcctggggcatctgaatgaggaccctccacccacatttccacttgggagcgagctccagtcggggaaagggcctgcagcccgcctcgtccccaccctgggaccccgcgccccccagtcccccactcccgcgccgaaggcagggccgcgccctgagccgggaagtcgaggggatggaagggaaaggagccaccggtgagggtcccccgggttctgagcctcccgcgtcgggatccgtggggcgcacagagcgccacctccggccgaggcgcagctcagagcgcgatgcgggggaggaacgcgcgcggaggccgaggtctgagcgtggctagacggctcccacgccgagaaagggcgggtgcgcctgggctggatggatttcgcctccctagaccaggagggattggaccctgactacaggtccaggtgctcgtcagtgccctgccagggggtctacgcgtcctggtaccgggtccagcggggtggcgtgctgtgcagaccccgaggctagacggcctaggcccctggagcccaggagacgcttccttgggtgagcagcggagaatcccgcccggcccagccgtcacccccaaccctgtcgattaaacccctgcccccgtcgcggtcgccctccctccagacaaaggccgttaaggcgcagccccgcgggcggtctttcatccccagctaggccagctctagcatttcaaaggccgaatccggagagcgcttcgggggctctccccttcccccaaatatttggggagcgacgcctctccctccgctcccagtgggtcgcgtctacacgcgcccttccacacacctgcaggccccctccccacgtctctcccttccgttggccgcagccccacaccacgacccccgcggtcaagcatgccctctgggtggtcaggaccaagcgggaccgggacagaaccaggggagccttggaaacgtggaggagccccttaaagccaggccttgtccctccagggggaacttgcggcttgggaggggacacccactgcatggcttctggaaagagccggactcgcagggccaggacgcaggccggaccccggcctcattcttcggccagttatcccggagtggcgcgcatcctgtcttcctgggcctcggactgctcgcgcgcagagggggcccgaggacacctctgtggggttagaggactcggtaagacggtgtggaaggcaaggaggaaggtcgcgttgtattggggatggggtacccgtccctcccagcttgagggatcctgggggtcctcgccgcctctgagggcctagatggctgcttccctcggctcccctgcccggcctggagctacgggtgcgcccagctagagtttagggccacctggggacgtgcaaggggcgctggagcgaggcgggggctggggcggggcgtgggtgcttcacccgcgggggacgcagagcttaggcgaaagcggtgcaggcatctctctaatcgccggccgctattaaaaataaaaccgcgacccgtcgccatggcgaccacaacaacagcggccgcgcgagggaggcgaaaacttgtgcagccgcgcgacagccgccttctggggagactcggggcacgacgcacccggcgtgggactgggacccccctgcccggccccgccacattctccgccggatccccggaagacacaaggagacgtggacccccacaggcttttttggggggattgggcgttgaaaccgcagggctgacttaaccaagaggtcaccgacttggataaaaaacccacgcccgcgcggacccccctccccggccttcgtttccattcaaactcccagcgtcctcattgcagcccctggggagggggacggagggacgaggtgggtttcaggtgctcggcccaggaggggacggtgcgacccgggccccgccggcgggttttgcgcgcggaggctgcggcacctgccccgcccgccctgccgcgatccttgcagacgggggcggtcacatgcttctttctggccaggaatcgagtttcacttccagccgctattagtcggttcacacagttcactgcaaacatttgataatgaggctaaatatactcccgcgtcggaggaggcgtgggcgtccccgcccaggcccgggagacagaggcgctgaccccgggacagagcctggctttgtgcgggaggcagacgcgccccgcgcgccgcccccgaaacattcgcaccccatgctgaggcgcgcgtctgggagtccgtgggcgccccgaggtgagcccggggcccctggcggaagcagcggggagctcccggcgggtgcggggaggtgctggtgggaagcaaggtgcacctggcggcctgggatgtccggtcgcccccggagccggtgcatccggcctctcccggcgcgccccgacgtgcccgcgggctcataattaccgtgagtcaggtgccccaaataggccgagcgaggggggccgtcgcgcagcaggggcgggtggccggacgtctgcccgggactggttgcctcccgcccctccccaagaccctggcacccagggagggcgggaaaggccttggccattcctctgggtaggggactggagaggggaagaaactttcgccgagtccagcgctgccccctcatacccatccccacccaggctgcgtgtccggggcccctccggggcttggcaccagcaggcacgcagcgatcgccgtcgttgttatttagtagtagtagtaacggctgacatttacagcgacgtcgatggcgccaggtgccaagctctttccttgtataatttcatggacactcacgcatcaactctaagcgaagacttggagcggggctcagcaccccaggggtacctctgcaacctcgaaatgaagttgaaaatagcacaggagcccactatcactgtgtgaacattttgtgaatgaagacatgtatgaaaggatgtttggaggcttcaagaaacgaaagccgagagtctagctagaccagagccatccagcccaggagcgatggccacgtgtggccgctggacacgagagacgtggccagtccaaactgtgcagtgcggggcagtggaagccgttggagggcctcaggcaggaacacaaggtgtcgtggcagaaaggaagaaggggccgggcacggtggcccacacccgtcatcccagcactttgggagggaggccaaggcaggaggatcgcttcaatccaggagttcaagatcagcctgggcaacacagcaagaccccgtctctactaaaaccctaaaacttagccaggcttggtggcatgtgcctaaggtcccaggtcctcgggagactaaggcaggaggattgcttaagcccaagagtttgaggctgcagtgaactattatcacaccactgcactcagcctgggtgacagagtgactctgtctcaaaactaaataaataaacaataattgtgtt

SEQ ID NO: 191 - DNA, 598 bp, Homo sapiens
agcccagctacacccgggtgcaacgtggatgtatcagaaaacgacaaccccagaaaagcgggaaagcctctgagaaatgggactgaaatggaactgaacatatttttcagaacacaccatttcctagtcctgtctgagtcatcccagacctctgggagctggccagacttgaagggtagtcctcaccatccctccagtcaagacagacctgtgaaggcaacatgccttttacaaaaggaactttctctacagaataggttggtaactgacactagctatgaaaaagctgtggaatctaacaggacctgctagaacaaatactccagacttcaagtctaacatttagtaaacagatttcttccctttctttaaatgtaatgatgcaacaatgtggaaccaagtgaaactggctttgtgagtcaccttcagaagcggcgaaaggtggcttctcatttccaaagttcacagttcaacatggcctgcataagtaatacaaactgactgccactaatctcaccagaaatcacctctgtcaagaactgtgtgaggagagaggggacagagaaggaaagaaatacgtaccgacttgctctagtcg

SEQ ID NO: 192 - DNA, 514 bp, Homo sapiens
gaaggctgaggtgtgcgccttttttttttttccttcttagtcgtgtgtacatcattgggaatggagggaaataaatgactggatggtcgctgctttttaagtttcaaattgacattccagacaagcggtgcctgagcccgtgcctgtcttcagatcttcacagcacagttcctgggaaggtggagccaccagcctctccctgaataactgggagatgaaacaggaagctctatgacacacttgatcgaatatgacagacactgaaaatcacgactcatccccctccagcacctctacctgttgcccgccgatcacagccggaatgcagctgaaagattccctggggcctggttccaactgcccactgtggactctgaggcctctgcatttgcgggtggtctgcctgtgatattttggtcatgggctggtctggtcggtttcccatttgtctggccagtctctgtgtgtcttaatcccttgtccttcattaaaagcaaaactaaagaaaacagaa

SEQ ID NO: 193 - DNA, 8230 bp, Homo sapiens
agatcacaccactgcactccagcctggtgagagagggagactgcattctcaaaaaaaaaaaaaaaaaaaaaaaaaaaaaaaaaaaagaatatatatgaattcttactgatagtattaaatgattatctctttacattcacagtaatgtcttacaataacagaatgcaggagagcacatatcaatgaagaaaagacaaaatgtacttatccatgaagctgaggttaagaaaccagtgtcttcaagagccagggacagcactgggtctgtgcagagttgagagatggtgatgacatgtggtttccagcattcctcacccagtccagggacactgtgggtgtgcccagcttaagtccagtaactggaaatacaagcccaagttctggagagtttgagctgcagagatatatatgggaacactttgaatcttgactcattggccataaccagcagagtggaaaatacaagaagagaaaaaaacattgaactgcgattttataacatcctttactaggcagagagaagaggaaacaccaggaaagaaaactgtattacgatgtgaaaacttaatgttgagaaattcaggcatcttggggttagtgaggagaagttttaggggcttagattcttctaaacacatgtacagaaatgcatatttcatctgatatcaaatggcatttatagtgctaatctttacctcaagacttcacatcttttggtgattgcatcttttaggtttatagcagctaagtttgcatgaaaacaccagggctgtttcatttcagtcaagaattaatgttcattgattgtgcttctgcatttcatgtaactattgtagaatttgttttagttttatgagggaataattgttccaacttctatataactcaggaatttactctcaaacaacactgtcaattagttacttatctctctggaaatgatctgggaacatggagaggaaagggaggaaggggcaaaatctgaccacttaaatctaagcatattagatcattttatgctagaaagtcctgaatgatgtgactttcgttcttgtaaaacacctctttccatagattcatggcccaaacagtatataaagagtggggaaggaactgcatttgcaaatagttcaaatcattgctccatcttaactacgcagttcacaaagtgtgaagaaatgtgatcatctcaaaaaagataatggggaaaaaatatgttttgttctgtgactttaaagtcttgcaatattttacataaatgataatgggtgctttaataagaactcttgatacttttgttattgtattcaatatatgcatataatacaacaggatgatattgttttggatttggaaatgtattctttcttatgcaatcttatgcagtcatactgcttgaatatcattacctgaatttatctttcttttttttgttgttgttttacactctacttatttggtgcctgtcagtcttttgtcgtcagtttatattctactaaactcaaaaagacaatctcataccttttgtaattgtaggcattctttactagatttttaaatacacttcaaaaattcaagtactttgatttcatgccatcaagtagctgaatctatccccccgtctctttttaaatttaagtgagtagttcaatttctgtcactttctactttgtgaattctaaatcttttaaaaccatcttgccatttttcgtgcacttacccttacagaaaactctgtgaaacactacttatctctacttttatgtttttaactccttttttatattactattccctctgctttctaaatgcacatattaatttgttctttttattctctgtagctcttctcagtgtatgaattcagtttcccatcagtctccatacaattaaaaaaaagttgagtattctgttattttaataagatatctagtgcccatattctaattctgccccttatttttaatataattttattgttgatttaaaatgacaacagtttcaattcccagaaagtgaaaggaaacaaaggaataatattataggcttaatttttatcagtgaacttgtaggtgaagaaaagatttggggaaggaaatgaacatattatattgcaaaatagtaaggaacaatcagatgtgttttctagtctctggaaaagcatgtttcaagaaattcaatgaaaagttcatcatgcttgcttagattgttgagaagcaaaaacactgatgaacatttggaagcaatgagaatgtaattctaatcatactcttttaataatgttgcaaaactctccaaacactactctgtgtggatgtctttcagaatatgatgaatactagtagtcttattctgcccttttctctctatcacaatatatacattctatattgcatacacatattttccaaatattacatataatttcatgtaatttatagacctattaaggcccaaccattttcttggataggggattctttagaagtccagcttaaataaagcccgtatagaaagtttttttaaaatttatacataatcacctaaagtaaccttatctactgaactcttagtacatgctactggaaccttttatcatgtttcttcctggcttgcattacaacactgttgacatatctcagccttacttctaggcttctttgagagcatgactcatgtttgtattcctcactgaggttgaatgaataagagaaactacagtagtaggaaaaaacagtacatgtacatatcaatgaatatgaaagggtcaaatggatctattatagtaagcacaaaatcaactgacaccagcaaagtaaacccaaaatttttaatggtattttaatagatcaagaggagcaagcagatttttgagacagttgtctcctactttctctatcacagggagtaattttaaaagaaaaatggagggtaagtttctttaagagaaaattgtagtttaaaacaggtcatgggataattagaaataatttaatttctttagaggattttaatctttcaactgcttgcaattagatcctaaggcaataaaagaataaggagatttggaaaaccattgtctgtaatctctgaagaaaagtggacattaggggagtcagttgaaaagcaaagctatcaccattttctaaagaggaaaaaggtgaacctcacaaactatagaccaaaaaaataggacatcgagagaaagaatatgaagctagcataggttcacaaagaatgagtcaaatcaaacaacatgcattttttatttataaagcatgacttgttcattgtcaattcatgttagcttaatcattaggcattaatgccatcactgcaatgcatatgtcagcaataaataatcaaagaccaggcttccatcattctgtttaatatcttcaagtaatgcttaagtttgcaaatgctcttttaacacattctccatatgcagcctgcccagcactgcacacaatagacctgttacttccccctcacgagcactcctaatatttcatgtgctcatccaattgacttctcccactggtgcctcatattgaatttgtagaatcacacctgctcctttttcaaaactcttctgagttttttcttaaataattcactgaccccaaagttgtcagatatttgaagactactcgcacaattttaatattataaatgtataatgtaaatgtaattaagatttgtataatgtacgatgtactttggtaaataaaagtatgctgtgaataaatacgtatgatacaattcaaaattttacataaatatgtgataaaatttagctcatattctttttttttttctttgagacggagtctcactctgttgcacccaggctagagtgcagcagcatgatctcagctcactgcaacctctacctcctgggttcaaacaattctcctgcctcagcctcctgagtagctgggattacaggtgcccgccaccatgcccagctaatttttttctatttttgttgttgttgttgtttttagtagagacggggtttcaccatgttggtcaggctggtcttgaactcctgacctcagataatccacctgcctcggcctcccaaagttctgggattacagacgtgaaccacggtgcccggcctagttcatgttctttaaggacaattatgaatatttttatgcactgttaattttcattaagatattgatcaattaatagctatatatgttctataaattaatcctatctagtttcaatcttaaattgtttgcatataccaatctagtttattgtttgcatatattttatagtgtagagattaggcattttaataaaattttaaaatttccaggacatactgttaatgactatgcttcctactataggccataattaatttttttctattgtcaacaatattttggtagggatgatcaggaaataaggaaatgtttccttcatttgttaacaataggtgtttggggattttaaaatgaaaattgaagaagtaaaagacaccatatatttagtttgtttgatttcgtggcttcaagagttcaataatttattgaaatattttacagaccaaagaacaacagatatattacgtttataagcccccacatattttaaaggataatggtttatatatgaaaattccctgaacctacacttcatcaggaaaagctaaataaaagaagtttacatttcctaggactaatggagatttatttcccagtcctcttctctggagacaaatgtaggtctctcttgaaaagcagaaagttttgcatatgaggtatgatttagtgggctagaaacatcttttccaccctccccaaaatgtttcactatgttttatcatactatctgataattttgcactaaagttttctttctgtgttaagaaaatgcaaatatctctgaatgggtctctttgctttagtcatactcatatggctactactgaacaaaatatgttcattacaggatgaagggaatgttgccagccagcaaatccctagagtttgcactacaccaaacgttgcttagcaatttccacgattttctcagtctaatttgcaagaatcaaggagatgtttgtgtatgctacatgaagttgtaaaattggtatttattgtatgtttctatatcgaaagctttacaaacaaaggaaatggaaagttaacaggtggatatgatagtgtggcactactttagctggatggtaagggagagcttctcttaggaagtgttttaggccaggacttgaataatgaacagtatctagttgtacaaaaatctggaggaaagacttttcaggcccaggagaaatgaaaattcttttcatgcatacaagaatgaaagtgaaaattacctactctatgtcctgaagtgggaagttggcttgccagagagtaggtaattttcactttgattctttcatgccttcagttatactacttcttaggttagttcataagggtttccacaatttggttcccacttaaaatttaaaacttccctaacccattcccaccatatattgtgctaatccatgcatatgtgactttgcgtatgctgttttcattgtttaatattcttctcatgcattcgttctttcctgataacgaactcatctttgaaactccccttcaagcatcctctactttaggaggccgcttctcactgtctcctgcctaccacccattgaattgttcaatttttaagctgccattgtcttgtgcagttgacacatttctttgcaattactgatttacatgtctgcttttatcactggtgaggttctttaggacagagacattattaattcatctctgggcacatatgttccaacatattagaagtactacagagtgctattactatgtagtatgtagtattagtagtagttactcacaaatcatttttaaataagtgattataatatctttttgttattatgatttaacacaagatggaatttattttcagaagtttccatgatatatttgttctatttaaaatccaatagccattagaatattaccattatttaatgtaaaacaataaaatattaaatatgatcgttcatatttaatgcaaaccgaactcatggaaatattgtgtaaagatcaagtaatttttgacatacaattttaaactcaacttttcatatagcataccttatgatatattttcagcctacttttaaatatgttggcattgaaagccagttactaattcgctgaattcatgatttctttttaagttatagaagtggaattatgtttgagatattcattgcattacatttaccagaacttgagttcttaacatggaacctgagagtttctccaattcttaagtccctgggagaaatagattagctggatgaggaactgagaggaaaaatggtcagagatgtagcaagagttgggaagaaggaacaatgatttgctttcaaggagattttttcattggtctgttttcagtgacaaacccactgcgataatacatgtaaagtgaaaacattcaggaagttcccttagaaacctcttttctggcagttcctaattctacaacattgtataagtgaaataccatagttactgtcatagtaaattgagccaagagaaacaagggagcaggagaagaaaagaattaaagagagttttgtctttcagtcttcactctgtttcttcttgcttttaccagtcattcaggtttatataatttctttagagaggcttctactatgcaggtcttccttaaagtcattggtattacctggcatgatatgtgagcctttaatatcagtccctttatctctttatttttaaagtttatatcagtacagagtcctggattcttaattaatttaataggttagactttatgctaatattcttcattttgatgctcaaattttccaaaatttggccagcagggttccttaaagctgggtaccttgccctttcaacatgtccctctgattctttatttttatttacttatttatttatttatttatttatttatttatttatttatttagagactgagtcttgctctgtctcccagcctggagtgcaatggcacaatcttggctcactgcaacctctatctcccaggttcaagcaattctcctccctcagcctcccgagcaactgggactacaggcatgtgcaaccatgcctggctaattttttttgtatttttagtagagacaggctttcaccatgttggtcaggctggcctcgatctcctgacctcaaatgatccatcgcctcggcctcccaaagtgctgggattacaggcgtgagctgccacacccagccgtccctctcattctttaagtacttccatgttttctaaggtacaagatgttccatattattttgttatttgtcttccccagctctgaaatctgcctttccttcaaggagccttggttctttctagtgacaaattatatttagaaagaagatctgggtatttgacttgtatattgctattaattggccattgtttctagtctctttcagtagacagagctaagaaatgtaaaaggaaatatttgaatgtatgtatatgtgatatattaagtacatttaaacatattaaattcatgagttcatactaatactttcaataagccacaattcccttttcatgttttcgaaggaaaaatatccattgtctatatacagtggacatagatagtaataatactgatcttgaaaagagcagtcttaaatagatcccattaatagttaaagataacatatcttagaattctagatattagagagattatctagagctgtaatctagatattttatagatctttgctgtgctgttttgaatttgtgttggagtagaacaatcagatgacaaaagctcatcccacatggaaaaatcaaagcattcattacagagagaattttgaaataaatgcatatataaaaaatatatatgcatatataatgcatatgtatatgcatataaaatatatatatataaaatgagggttataaacaatgaaggaaatagtgatactatctatgtgggaacaatactagtatcctccctttggatgaatacagtagctacagatgcaattctggggactctgtttagcaatagcttaactattgcttggctacaagcatggataacttgttcaaagataatgaggagttgtaaatatttaaataaacaggatttgcaacataaaaa

SEQ ID NO: 194 - DNA, 2935 bp, Homo sapiens
gcggccgggagggaccgagcggggagcaaggcctgcggggaggcgcaggatggacgcgttggctgtcatgatgtaggacctcctgacctagaaccatgcccggcgcagggagaacaacgagcttacggaccgggtgcgggggctgctgtgcgagaaagcctacctgctggcccgggagcgttcgccggcccacctggtggctttccctggacgtttaacggcgactccgcccggcctcccgactttttgatgcaggcgttctcttacatgactttcttcgaggctagattctcgaaagacatcctgaaggtggctttcttaattagctgcctcaccggctggcggagcagttcgtagtcgcctacatcgagagggagagccccgtcctggctcagtactggggcttcgtggacgcgctgtagcgggtcttcgccgtcgtgggtaggaaacagtcgggccggatccccggtgtctggggagcggctgccggccgggcccgcgcgagccgcttcactcctacaagcccggctcactagttccaagctgctggactttgaccctcgctgggaagcttgatcgccgcctgttctcgccaatctctatgcctttgcactgcccagcaacccggtcactgcccaggacctgttaaaagttgaatggacctcccagaatcacgccgctgccaccgccgtttctagagacggcttttggccacctttgagaatcagggtcaaacttggaagggcctgcatttgtcacacttcctcggacactaatttggatagttcaggcccagagacggcttcccgggttagtgtgcctgacaacactgaagaaaaattgtgacattttccttccccagaattacttcgttttatacatttcacttctcttctgaaatcacagcaatgccagtttgcgccttttggtctgaggaacgcaggccctggccactaccaggaaaaagtacacaaggcttgcttgtagagatggagttacatggagggacagaaggtcactggtcagtgattttaggtttttatacttctgaaaacaggtaattacagattctgatcagtttatcattttctttagtcttttattttctgctgaatgctctcaagggaacggatccatacctgtttatcaggctcacctggaagagccaagtcatccactcaggtcttcctctggacctgcataatttcctcatttactagattgggtttcttttatgtgtgggcttttaatgcttggtatctctggtcttcctaatatgtaatgcttagcataataattttagccattattcatttttgtagtaggcttcactagcttcctgcttctcaaatcccttgaaaagatgagatttttttttcgtggagttcacgtctagtaagttggtcttgattttttttttctttcagaaccttctggatttcagctttggcaagcttcctctgtttctgagacacctccatcacctgggttacaatcccatccatgattttccccatctccaggcatttttcatggaaagctcctcatgctttttaattccagtttatccatttgtgtggctttaacctccacatccaggtctttctggctaaactgcagtatatccacaatggggccaatggacacataagggaggccctatcacaggaacacgaacacccggagtcgctagaaatcagattccaccggctttgcttcaggccgacttcctaaggaaggcatggtagcatcacagatgctgtttgtctcagtttcctgagaagccagtttcttagagctgtcattcaagagtgggtcaaatttgagatataaaaacctttctcaaggtagactctttggcccctatgcctagtatgtcagctgggcctctgaagctctcctctttgaggtcctggcaggctctggcccctgttgagaaggggaagcagtcatgtgaactcatgtgctggaagaatccactctaccccttccctggcttctctgctgcaatttttgtctttaaacgtattttcaggtgattccagtttgcatacataattgagaaatataagatttggtccccagtagagagccaggtgaacttaagaaggagtccatctaagaaaattgcacaattatctagtttcacttgggtttagcttttatggcttacttgatttagtaatcaaatgattttcaaatgattttgatcaggtgactcttcgtaaactagagaatgaacttgagagccgaattagcacagtttaaaaataatcatttagtttttgttctctattgtgtaaattattgaggtttgactgtcttggctaaactaaggctcatctaatatctttatttttgatatcctaatttcttgccaattaattgaaggtaacatactagcagaccagataactacttatgcaaacctcagataaccactaatttaaacaaaattaaatcctttgccttccccagatcctttgcacatggcctgctatcaacaatcctctacaatgattctcagcatcacctagggagcttatgtaaaatctcaaattcctgggccctatccccagagtttcttatcaatttccttgatggagaactatcaaagcagtcaaagctatcaaaataaaaaagaattctgattgggtgcagtggctcacacctgtcattccagcactttgagaggccaaggtgggcagatcacatgaggccaggagttcaagaccagcctggccaacatggcagaaaccccatctctactaaaaataccaaaattagccgggcatggtggaacacacctgcaatcccagctactcgggaggctgaggcaagagaatcgcttgaacctgggaggcagaagttgcagtgaaacaagttggtgccaatgcattccagcctggatgatggagcgagactctgtctcaag

SEQ ID NO: 195 - DNA, 73 bp, Homo sapiens
ctctgcctcccgtgcctactgagctgaaacacagttggtttgtgtacactggctcagttcagcaggaacaggg

SEQ ID NO: 196 - DNA, 717 bp, Homo sapiens
aacccaaagggctaagtcttctttcttaatttttaaaacaagcatgtgttttgttctttacatgaatcgtcggttctcccagtgtgatcacgacactgtcccatgctgattccatgcacggtgcaactctttcccaagagagattctaactcaggacacctgggagaggacccgagctgcatttctcacagctaccagatgctgcacgctggcaaggttttgggatgcactgaatccagttcagcatgtttactgagcatataccacatagagagcccagatgataaaaaaatgagaagatgggttgtacctgcccttgaggagctaacaagcttgtaaactgaggcccagaaaggttcagccatctgcctgaggtcacacagccacagtttggacctgagccatcaatcatccaccaaaagcctgcattgaccctagaagattccattgcatgttgtcaaggcgcttagtttctctcttgtgtctccccaaaacataaacctggaatggaagagagccacttactctatagatgcttttagctcagaacgcttcaagcttttggagtatgagaaataataacaatcattccattctttcctggagtttgatctcagctgttggtgatattgttgggactgatttgctatctataaagccaaatttgagaaaagacaggttaaaaataaacagggaggatgatggtagtaaaaataa

SEQ ID NO: 197 - DNA, 1365 bp, Homo sapiens
aagagacagcgccgccggccgtggggagcggacgcagtgatttgctccccctcgtgcagcaacccccacacccagcaccaggcccccagaactctccttccagctgaactccctgggaacaagtcagttgggctgatcactgaactcacatttctggacctgaggagcctgttcctctcacgccctcacctggctgagccgcagtagttcttcagtggcaagctttatgtcctgacccagctaaagctgccagttgaagaactgttgccctctgcccctggcttcgaggaggaggaggagctgctttccccatcatctggaaggtgacagaaatgggctgggaaggtccgaacagcagggtggatgatacgttttgggcaagttggagagcctttgcccagattggcccagcaaggagcggttttagattagagacactggctggattgaggagtagaaggctcaaacaacccaaggctttctgcctccgagatgtggcaccatagtgcggtgccctgtggcttcaccgccctacttccacctccgcccagcctgtaatgtttatataagcagcctcaaggaccaagaaccatctgcgaaaggacacacacaggaaattcataaaagaaatctgaatggataaaaccatgaaaaaaagtatgcttcattagtaattaaagaaaggcaaatagagctggaagcatttttcccttagcaaaccataacagaaaaaaataagacccaatattggcaaagagactactgaaaaaacattcccatacattgcgtgtgggagtatacatcggtgcaggcttcctggatgacagttgggtgatatgtgtcatgtggcctaaaagcctccatgtcatttgacctacgaattctatctttgggaatttatcctaagaaaatacttaaggatttagttagtgataagatgttcatcccagcattgcaatggagaaaaatgggaagcaatggtttggttgggaatttattccttttctgctgtaacgaaagtttgcaataggggattgcttaagtaaattattgtatctccatccagatggtggagtaccgcgcagacattaaaagtcatgtaaaagaacatctgactgaaagaaaaatgctccttgaatattaaaaggttgtaaaaatagtgcatgttatgtgatttcaattttgttttttaaaatatgggtgtatgcttgtatacgtagagcagataaaaaagacggaaggcatactaaaaaatgttgagtggttatctttgtatggtggaacaaagtcactgtaattttcatctttggtttttctgtaatttccaaattttccacattttgtatttcatataatataatttaa

SEQ ID NO: 198 - DNA, 136 bp, Homo sapiens
cctgtattcgaaagtgatcgtgggctgcctttgccctggtcattgatagtgcagggagaggaatcaatgaaagcgcttccccgtgtttgaagggtccactcctatcccttccaaactctggagctttcgtacatgc

SEQ ID NO: 199 - DNA, 583 bp, Homo sapiens
ggaagccatctcggtctctttctggtcttcagtgcacagtggccaggacagcctcccccacttcaccgaatcacatttcttcagcagtttccaacagtgaaatcatttctaggacaatggctgctaacacgtgtcagctgaagcactgcagatcgagtcatccaactcaagcttcttcctcttattggaagggataaaccaggtggaagggctcaaatgcgctgcttctggaagcatcctgggtccccctctgctctgctacctttggcttgcacctgagcccagggcagggacaggagcagatcaggagaccccgagagagtgtgagccaggagccaagaccctgcggcacttacctggagccaggaggaaagcccagggacccaaacttctgcaggcggcacttacctggagccaggaggaaagcccagggacccaaacttctgcagactgcgcaggacgccactgacctcgggagcccaggaggacgcgcttcccagaagccacagctgctgagatcgacactggcccagagggttaagagcttggaccttggcttcaggggcacctttgcccagagaaa

SEQ ID NO: 200 - DNA, 2517 bp, Homo sapiens
ttaccttgggcagtatggccattttcatgatattgattcttcctacccatgagcatggaatgttcttccatttgtttgtatactcttttatttcgttgagcagtggtttgtagttctccttgaagaggcccttcacgtcccttgtaagttggaatcctaggtattttattctctttgaagcaattgtgaatgggagttcactcatgatttggctctcagtttgtgttattggtgtataagaatgcttgtgatttttgtgcattgattttgtatcctgagactttgctaaagttgctgaaggagattttgggctgagacaatggggttttctagatatacaatcatgtcatctgcaaacagggacaatttgatttccttttatcctaattgaataccctaagtatttaggaatcttctccatttctttttatcaggtcaaagtacataagtacatattttagggtcttctgttcttgagggttttttttttgtgttttttgttttttcttttcctattggaggtttgacacctatatttttctctgacattttggaaatttgcttcccaaagtcaaaaacataatgcctaacttttcccgatttggccaacatcaactttaagattctgtggttatctttttaccaagagatttgtcagttttactgccccagtcatttcctttttactgattagaattaggcctttgtgtagctgttcacctaattacttcctctaccttgtgaaaaagagcagggacgctaacatttgctgggtacctactacatgccaaaagtacttaatcgtatgcagtaatgtcatttaattttcaaaacaactctccaaaggaagtgtcactctccttgtttgatttcttgcttcccaaatggaaggtcctttgtattaatagtatctgtcaaatttcatacaatacttaaatatgttcttgatacgtacttcaatataaccaacagaatgaggcagtattcgataaagtaaaaaataagatgaatatttctagtgatttataagttacttgaggaaatcatgctgtttattcttttcctttttaggtattctttgtgaatttgctatttgtgtgtgaatatatctgttgcgataatgaataaccatatgaaatggataattgtatgaaaattcatttgtaattcaatagattgccagggattttaggttggttatgaaggtttgttttttttttttttttcttttggagagtggggagattggcatacagtttcaaattgtttatgtggaagttggaagtgtgactaagctcgaagaaaggaagagagggacaaagaaagggaggaggtacccctaagtgggaacctaccaggacattcaaagcaagagcagtaagttctgaatgttctgggacaacctgggtgatatgcatggatatgggctgtggaggctgagcattttaatgataacttagggaaacgaggcatggccatggtgtaaaactctcaaatcccaagccctaatccaaccttaaaatccgagtcttctaaagggctgttttaaccatgaaaggaccataagaaaggcaattcacagaaaatgaagccatgtggccaagaaatataagaaaaacagtaaaagcccttaatctcaatagcaatagagtggatgcaaatgaatataatgagttgccatgtcgttcttactggattggaaaagaaattagaatgtctaaataacatgtatcatccaggatgtggggaaatgggagctcttgtaccctgcaggcaggcatttaaattggtgcaaccgctttggattgctgctttgtagtatctggtgcaactgaagatgaacatgccctgtgacacagcaaccgcacttctaggtcaataccctaattatattcttactgtggttcacaagaaggtatgtaagaggtcattgcctgagcactgtttagaataggggcaaactggaaatcctctaaatgtctgtcaatgaaggaatagataaattgtaatatgttcatataaaatgctgcataaataagtgaaatttataaatatactaacgaatgaatcttgaaaacagagttgggagataaaagcaagctgttgaagaacatggtcagtatcctctcacttatgtaagttaaaaactccaaagaacattatctatattggtaatggcatagacatgtgtggtaaaatataaaaatattaactaaaagttctatacgcttcaggatattgttagtataataaggcaggaagtggatagcattggggtgagacagtggtttggtggttatgtttggttactttagttatgttagtaacattttttttttaaagaaggatctggaataattatggtaaaataatagtatttgctaagactagatgattggtgtactggatttcatccgctattttctaagtttgttatgaacgcttaaaatatatatgtatgtagtaaaattaatgtaaatttgtacaaataaaaataaatggcatgtgatatatggc

SEQ ID NO: 201 - DNA, 546 bp, Homo sapiens
gtctgcctggagggaacccagagtggcagggaaagacctgaactaggggctggccccagatcttgattcgacttttgtaaaatgcagagatgccactgctttctggggctaaggtcttctttttcagggtcggctgaatgctaggaagtaaacctggtgggtagggggagctgtgcagtgggagtagccagccaggttgttgggggcctgggcccagaggggcaactctctaaggagatgcagttgggagctctgagctggaacctgcagaagtcattggctccagccagagccagtcagagtcatctcaagccgagcccagtccaggcatctacagacaaatttggaatctctatatctgtatattccacaaggagggatactatagagaggaaagagctcctccattaaggtcctgactttgcccgaactcactgtgtgactttgggcaacttacttcagctttctgcaccgcgttttcgcttctggaaggtgaggagagggctttctgtctgcctggctgacaccattgttgtgagaatcaaa

SEQ ID NO: 202 - DNA, 2302 bp, Homo sapiens
gcagaagtgccgagtcccggccgggggcagcctcgccgccgctcagctcgggaatccctgccccccaccagcacctcagtgggggatactgcaagttcaagcaccagcctcacagtaacagccggcacacagcacttaggctgcctggtgttccagaagcttctgcaggggctctatgctgcactcaaggcatccctaagaggagagcattttgctgtccccactttacggagaaggaacgtgggctcagggtggtttaaggcgtgaatgaatgaaggagcaagcagtaagccccgacagcaaggccaccacagccctcgccccacagggacgcctgagcaaggacccaagcaggggacaagcaggctcaccccgcccttgcggggctgaccacgaggccccgtccggtggaacacgccatgacgcttcaggaggctcatgtagctggcgccgtatgggacagcgggggagagagaaaatgcacagcccagggaatgtggagacaggcccagcgccaggcatgggggccggaaggagcagccggggagcagggggcagggcctggagtcccgccttgcagatctgaacctgccccagccccaggactctgagtgcagcaagaggggagccgggctggagagtggggagcacggagactgtggcctggatggtgccagagcaaacaggagagaggctgcccaacgcagaggctgcagcacagaccagagggtcccggggctgactgggtgggggcagctcccagcgagaggcccctgggatttgggtaagtagaggcacatgcagactctggccacagggcacctcgcgcacgaggggagttcaccacacaagctgagcggagggcggacgcaggagagcagcggtttctcggaagccaagggcggtcatggagccccacgccacagcgcttcccacggggccacaccatccggtctgcggagggggctgcattgccgggaaggaccatctgattctggattccagcctcaccctgggccaccgctgagtgtcccaagtggccccttagcccccagggccaggcggcatcccaatcccctagggatgtctgtgctcagaatgtggcacacacgccccggcagggccatcctcctcctcctgcacccgccacagccgtggattcggggtctctatcgtgggcagaaattcacacagtcaaggtgagggtcccaggagcagctgtgaccaggccccggctgccagggagagggggtcttcagccgacggggcagacaccctgagatggacccttgtccaggggagggccctgccacccacaattccttggcattcctgcaccagcaggacgggctgagggaggcgcctcaccagtgccagcgcccagcatcactgtgccccggtggagggggaggcccttccgagcctgggcctgggtgtggatgagggcaggtctctcacctctctgacctcagcttcctcaactgggaaggggggccacagcacccccttaggggtgatgaggaagtgggagctcagggaggaccccgggcagggctgcctcctcacctctcttcggcctttggacactggagctcagaggaccaagtgaatgaatgaatgactcgatcaatcaactgatccatgaatccatggacccctgaacagctggacagctgggctgtgggcaggacaggggactctggctgaagccgcgttcatatgtgttcagctttaggcctccactgtgcccggaccagcggcccactcagtgagtcgagtgtgcacctggcacccctctttctggaaatccacgaacaatgggctcccagcagaggactgaggctgagcaggccacttccctggagctgaccccacagctgtcctgctcctccttcgccttctgccatgactgtaagctttctgagggctgaccagaagcccagcagatgccagcaccatgcttcctatacagcctgcagaaccgtgagccagctaaacctctcctcataaatcaccgagccccaggtttatctttacagcaatgcaagacctgactaatacagcaccagctccccaaaataaaaagaaatattcaaacaaataagcgcacagaagtgttcccagcagcactattcacagcagccaaaaggcggaggagccacaggcttgtcagctgatgacagataaagaaagcatggcctgtcatcccagcactttgggaggccgaggtgggtggatcacctgaggttgggagttcaagaccagcctggccaacatggtgaaacccagtctctactaaaaa

SEQ ID NO: 203 - DNA, 424 bp, Homo sapiens
tcctgggtcaagctgagtatctccacgtttaggtgcacaaatactattttgtgaagatcttaaatttgtggtataagaacttgaaggaaatagaactgatttgttacttctaaaagatttgtaagactccagggcctcccagccgtgaataatctgatggttcctgaaatgactggggaagcagacgcttcgtatggcagttgaagagtgtgtgtctatgtgcatttaaaaccttctttctgtacttacacattcacacgggaagacaggctcattcttgtgcacacttgagagttttacaactgatgaaaattaatttaagaatcagatggagcaacttgacaccagtgggctcaggagcccggggagaaaaatacatcactaatggccagttttccatatggtctgcacgggtaaagaaagt

SEQ ID NO: 204 - DNA, 3691 bp, Homo sapiens
ggaattgggggttactatcttggaatctaggggcactccaggctctgggctcagacggctggcttctgcctacccgagccttaacctttcaaggaccagaaggattccagagctcttgccctaggtcctggggcagcgatgactcactgcagcaccccctcccacttcgccaagctgccgtctccgcccacccccaaacaatctcgacagcgcatttcgggagccacggctccgggcgctttgctgggggctaaaggggtttatccctttccttgaatcccagcaggctagaactaccccctcccagtcttcaggcttgccacgctctccacccgatccttccattgaaaggcagagaaggaaggatgtgcttgggaactttaagacccacgaacgacagcgcactgatggagcagcccagtgtctggggcaaagtcctcgaggttcattcattcaggaagcctctgaccagcctttaccatgcgctgagtgagaagctgaggataaggaaagagcaagacccccaagaaaccctgatgtctggctgaaagccgaagcatgacgcaactttgctatatttctctccaacaaggatttgtatattttcgctttctcctcaagtaacacctggacctgctcctttcccttcaaacgctgagggctcagtctccaagttcctttatgaaacagggtgtaccatcagagacgcaggtaagaaacctgaactgcgtggcctcacataaaccccaccacacctctgtcctgggctccttccccgcaacaggtgtaaagacaaaaggctcattgtcctttggagcctataggataaacagaaagaacatgtccttgccggttaatctgccggtgataaagagtattgttttatctcctgccatctccacgttccaagagatgaattctattgtgacacaaagtctgctttgtccttccaacccactgagatgtttaaattggcctctcatatattccttggttgtcacaataagagcaatgagttgttataatgtgttgagaggatctttcccccatgacaaggagaccatcatctacagagatgctatgatgctgagaaataatgtgcttctcttctgctctaattttttttaattaagacttttattttttgagcagttataggtttagagaaaaattgaagggaaagtacagagagttcccatcttctctcacccctttcatctctgtttccatacgtttgctacaaatgatgagccaacagccatacgttattaactaaagttcacagtttacattagggttcactctttgcttgtacattctatgggttttgtcaaatatatgataacctgtatcctccattatagtacaatacagaagaatctcactgccctaaaaatctcctgtgttcctcctgtgcatccctccctcccatcccctggggaaccactgatctttttgctggctccagttttacctttttcagaatgtgaggtagttgggagtcatacagtatatgtgtatatatatatgtgtatatatatgtgtatatacatatatatatacacatatatatacatatatatatacacatatatatacatatatatatatataaaaaatagcctttttagatggatgtctttcccatagcaatatgcattgaactttcctccatgactttgtgtggctcaatagttcatttatttttgttgctgaatagcttctgcttaattttcaaagtgtttaatgtaagaaagcggtatagtccaggcgcagtggctcaacacctgtagtcccagcactctgggaggcggaggcggtggatcacttgagcccaggagtttgagaccagcctgggtaacatgataaaaccttgtctccataaaaaatacaaaaattagctggaaatggtagtgtgcgcttgtagtcccagctactcaggaggctgtggtgggaggattgcttaagcccaggagctagagcctatagtgagccatgattgtgccaccgcactccagcatgggtgacagagtgagatcctgtctcagaaaaaaaaaaaaaacaaaaaaaaaaaaacccagaaacaacaacaacaaaacggcagtatatttgtccccaccctcatctcttcctttatgggtatttccctaattgtgagagattacctgtgttttaaaaggtggcttactgtatgcattgagaaaattaaatgacatttcagaccagttccaagtaccttttgcaaagctagagaaataaaagtgaattctagtatctcaatcacagagtaaaactagagaaggtctgttgggcttcaggcaacattggtgttcttggcaattttacccagaagaatttatattcctataattagtatttcctccaaaattaatgatcgcctgattgatttatttctttcctagcagcactggaggtcccacttacctagttagtaataacatttgctcttaatacatgagtcagttttcttttttccttttttctttttctttttttttttacatttccaaaacagaataccctgcaggaagaatgggatggcagtggaggagctctcactcacatatcatgtaatgtgggaggcagggctatgcgatagtcataaagggtgcaggcttcagaatcaaaggagtgaggttggtgtccctgcttacgccctactagctgagtgtccttcaggtcatttctcctctctcagactcagtggactgtttcctaaagcacagctcataacaggctgtacgtggtaagaccgtcgggaagatggaaggagatcagtcatccctagagagcattaagcacagtctcagccacaaaacacttcctcaaacatgatgcaagccacacagggcatttggcctgcgtataaaggacatactgaggacagtgtagatgctcaagaaattagtcctgaatgatcaaggggggaaagagagggttaatcttatcatatgtgggctctcagagaacacagagctatagaaggaagctgacttaataagggtcaagcatgataggggagattaggaaccgtgtgcaatctaatggaaccacagataacaccttctagtactttttccctttggccctgcccctgctgagacagggccactgctaataactcacattcttctcttctctcctctcaaaaagcccatttcctgagcaagtatatgctttggtaaggtcattagcggtcaacatggttcccaagtttagtgaatactttcagataaaactgaagggtacaaaatcactctttcctctctccctctccttgtcctacctctcacaataaaacgacttatctactaattacaaagacctcaatagtggaagaaatccatatcctacataacatggagagctagctatatacccttggcatcagtttttatcctacttttactttttactgactttcatttactgaacaaagcctcctttgccaaaggcagggtaaataaactcagtcacatcctgtcttccttacatctttgtttatccataaactgtcgaagatacagatgaaaatccactaaagcatgcttgaagcggttacacgaaggccaaataagatgggaatggaaatgcctgatgttaagggaagatactacctaaaatgatactgagctggccagtgtaatgacatgaaaacaaaacaaaaaaa

SEQ ID NO: 205 - DNA, 560 bp, Homo sapiens
gaattttgctcttaactgccatagaatgagtatgtgcatgcatatgcgtgtggaagacagacttttatcattgattttttttaaataggaaaactaaacaacaactaaaaactttctttctttttttttttgagacggagtctggctctgtctcccaggctggagtgcagtggcgcgatctcggctcactgcaagctccgcctcccagattcacgccattctcctgcctcagcctcccgagcagctgggactacaggcacccgccaccacacccggctacttttttgtatttttagtagaaatggggtttcaccgggttagccaggatggtctcgatccctgacctggtgatccacccgcctcggcctcccaaggtactgggattacaggcgtgagccaccgcgcccggtcctaaaaactttcttagtgagaaagagataaatggaggaggaaagcaagataaagaggtttgggatcttttctgggattttgctgaacagggcgtggtgacactggaggagtcagcagattcggtagcagaagaaaggcaagaagaaaga

SEQ ID NO: 206 - DNA, 419 bp, Homo sapiens
tcagggcccgagggatgcatcactgagggagccacgactggtctctgggcctgacggtaaaccagggctgttaagtgttgcccaggtggccagcaagacaaataagtgcctcaagctaaggtaaatgaggaccagagagatgaagctcctggctcaagtggctcctatcccatgattccagctctccagcaattctcccccactcccacctctattcgattctggggccgaaagccagcaaggcagagccactgggaccttccctgcctgagaagcgcatagaagtaagaccctcgaacaggtccaagctgggcccatcacagaaaacagatgtccactgagggtccagcatcgggatttagggctattttttacaatgttactgaatgaataaattcccccaagacttacattttaaa

SEQ ID NO: 207 - DNA, 780 bp, Homo sapiens
agaggcctctcttctgatatccttcttaacttaatctacactggctgtgggttccctttatttttttttctggaatcctagaggatgcacggatacaattcacccaatgtgtccatctctcctctcctaagtgtcagtctataggtttctgacctctagaggaatccctgaagctgtacagctatactttaccggttacgtctagactataaaggaccacagtgttccacctcaggcaggttcagcgacctgcaagtagtgatacagctgggaaagttacagagcctgcgggaagctccggctgcaacttcagttctgaccagaggttctgtgaaccttcaggatttagcaggtttccaggaccggtgggtgaatctacccggggaagttttggtggacaagagctgctcgccagctgtcggagtgggagaggccagcgtgctggctccatccacttcacctaacacctctgaagtgtctgccctgcagtgtggcaagcgtggtgctgagcgcttctaaatccgtcgctttaaagatcattagtacaatgttgtgagagggttagctccatttgaaaattattttcccgtgattacaaaagaagcgatgctgactgcagaagttagaactgggagaagactcatcacccccatgatcatgtcaacaactgccctccttcagttttggtttgttttgtgtgtacactctgtcatctttccattgaggaaactcaggctagaagaaggataaaaacaaaacagaaaacaaaacaaaacaaaa

SEQ ID NO: 208 - DNA, 497 bp, Homo sapiens
gttttcactctcctaggatgacccaggtatagaatctgcccctatggttcggctccaccctctcacctgtctcttgagagcattgtgaaattctgagacacagcaaggacagaaacagagggcatggaagatgctttcagagatcagatccagagcctgacaagtttatttacttggagaagcagattctaggttctagaaaagaaggctgaaaatacaactttaagggaaaggataatctgatgactaattctcatttatcaaaaagccactttgccttagatctatctgtataaactccatgcttcacagtaaaatccttctaactttattgaaaaaagggggccacctagcaaataacaccaagagtattatttctggggttcagttaacccaaagacaattatttatcttactaaaatccatttctaggtctataaacctattgtgtagtacataaatacataggctttagtcctagatagttggagcagatc

SEQ ID NO: 209 - DNA, 925 bp, Homo sapiens
gcctcctttgaatagagtagttccttgcgctgaatattatgggataatctgaaattttaattcttgaatcaaatgaaatctctttgccccgtaggtgcagaagccagggcctttccacctcacagtactgatttcattcctagacagctgggtgaagtagccttctgtggcatcaactgaattctcccagcttcctgtttggtcttccaggggtgaggttgtggtttgatgctgaaaacttaatgtgggcatttctacaaaggtgtagcaccttgattctaatagtggacttctaaaacctacatcctgtttaggtggaaagtatctgagacttgagcacagccatagtctcatccaggtatgacatgtgccactgtgtctgaaattcctgagcaccgagggccgcttcaggcaccaggcactttgccaacctgagagctgtatggggctggactgtctagtctaactaggcagtgaaccctgtcctgaacagagcttgtttgttcataaagcactctaaagcagtgacttttaaatcttgatctgtgcataatctcactcctcccaaagagtcatcaagggagagcaaacacccaagggtaacgttggctcacgttcattttgttgttgttgttgaatttttgcttcctcctatgactaagcagaaagagagaaaagcagtgtttgggggcctcttctcaggctgtgtttaaacccaggtcacttccctcaacaggaaaatggattttgacaggccatcttgcttagagatttccctaatcacaccataattaatgccaaatggtttctttgctaaccttagtagcacttgaataattaacttttactcttttctttttttaaaagatacctgcgaatccactgaaaagtacattaaacaaaacagtatagttttggttcccca

SEQ ID NO: 210 - DNA, 708 bp, Homo sapiens
acatcgcggctccgcgccgcggaggagacttaaatatcccagcgtgcaccgcgccgcgcgtcgcgtcatcgcgcgccctctacgtcatgcgcgcgcgactccgggagacgctaccgcccggcagcgcccgagacccaactggtttggaaaatgccgcctgcctttaacgcctgtttctgactcttgaggttttccgcgtggctcccagcgccacatccatccggaggcgatcccgtggaaggatcgcgtccaagataaaagggcccgagacctatgcttacgtaattcctaatccgtgatcttttatgggggctgaattcccctccagcacagcctgttaccaggtacttttcacaaacgctactagcggttgtgagtccctcccccctccatttctatgttacaaattgaaaacgtgggacgattacctaccaaatttcacatcatggcccagatatcgggtggattttgtggctctgtgatcgacttatacctatgctaaagttaacggtctgagaaggtagattagtggttgcctagggctagggagtgggtttgggggtggggaatagaaagtgactggtcatggttataggcttttttgtagcaccataaagatagtttaaaattagattgtggtggtgattgcaccaccctatgatttgcatggtatgtgaattatatcttaataaagctgtttaaaaagtc

SEQ ID NO: 211 - DNA, 601 bp, Homo sapiens
gatgtactaatgcgccttgtgaagactcactcccgtggcctctggggttcggcattgaaagagagggtgggagaggaaaggaaagagaaggggaaaggactcatttggaagcagtgcatttttatcagagggactgaaaagcctttcgagaatcagtcaagaaaaaggaatgcgcatgagagtcatggtcacatcatgtgattgtagggaaagcctaggctatcatggagggaagagattggataaattatttgaaaagcaagcctgtgaattgctgtggaggaacaatagcctgtctcttatctggagcctttccaaggaaaagcaaaggggaccctagaaggcttcctgggagacagtttaattctgaaaacaaagcagtacttcacctcttgtgtgttgggtagagctgtaaaacagaacacagtcaaaatagtcattagggccacatcaatgtctgcccaaagtcaggcgagcattcccaggaaggtggggggctgtggcagttgcacacatcaacctcctttctccattgtcacacagcagaagagcgtgttccattctactaaagttggggcggggggagttgaataatttattg

SEQ ID NO: 212 - DNA, 3088 bp, Homo sapiens
atctcatttgtggatcaagtcgcccccagtggagacaaatgtctgatggagtctggccaaggccctcctgagccttcactgggccctgcatgagaagcctgccaaggctgaggggccagggaaacggagacgaagccctcagagcaggccaagagggtgggaggtggggggcatttagagggttagatacagagcacccctttacaaataccagctactggcttttcgtattacatgttcattttagatacaacatactgcacacgctcccttaacgtgtgtttacgcgtgggtggtgtatccttccagacgtcttcctcacatctatacataatatgcatagataaaacatttaccaccaaaacccatagtgttatgtacatatttgtctggctgtgtaactttaaataacatacaaatgtatagaacagaagcttgccctctttctgaaatatctaacgtgggatttcaggctttctgatgagacctctgtagaggtcagtgttttgccaccagaggtccttcagcctccatctgttctcccacctacccacattctggcccctggcaattcacagggagtttaggaagtagacaccagggccctatttcctggagaccagcctggtggccgatgtcatagagtgcggtgggcctgggccggccctgctctgggcccgtgacctgcgtgtctgactcgggtccagctgttcttcctgccagagcctcttcctgtgaggcgggggtaacacaaccttctgtggtggctgtgggattaatccgtatggctgcattgtgagtaaagcctggtggaaatctctgtctccactgctttccttttcctgctgttcaccttggctccctcgacacttaatccccctccacatgtgtctggagcgggcagagcgggggcagttgatagaaagggggccgggtagtgccaaggctgttactttcccccactgcctcccttggctaacttgaagtctgaccctttataccagaactgtaagacagtgtgtcagaatggattcagttgcagagcaggaagcctggatcccagcgccggacggaaatgagaggtcgatggtgcaggctggtgtgggggttcctccaccgtcagggcccaggctccttctcaggtctcagtctcactcttcttagcacgaggtcaggtctcattccttggctgcgggagctccagccagcacacgttttaggaagaaggaggaaggaagaaggtaaagggtggatggcagctgcctcctcctctcttggaagctcacagagcgctgggtcacaattccctgggtagaactggatcacacaggcacccctgtcagcaaaagaggctggaaaaagtatttctgaagctgaatcaaattaagattcctgttactaagaagggagtgattgtatgggcgactacagggaccacggccatacacggtgcctggaagaccaagcttgtgacagtgacgaggatttggagagggcagggtgatggggagctttggggggagtgcattaggaaccctgacctggagaggggcagaatgaaacctgcgggcccctaaccctagtgggttgtttgagaaacctgtcctactgtggcagggggctgagtcttctcagggtcatgcatgaaaactgaaattcctgaaggccacacacagccccggaagtgctgactgacaagggcacatgccagtgatgcagttttcttttttgtcttcacttttgttgttccgccgtcttcaacacatggctcccagctcacagcaaatgctgccctggttcagctaccaggaagcaggagaggggaagggagggcaagcctcattctttatggaacaaaagcagtgggcagacagccttccctcacgttccactcactggaatgtggtctggctgccttccctgcaggaggtgggatgcaccctcagtgcagcagccctgccccagccaaaaacgtctcagcacagctgtaagaagaggaagatggctagagacaggcagccttccctgcaagggcaatgaggcaagcctgccaaaagcctcctttggaaatactgtttgattacttttcagagtttctatttaggaaaagggcaaaacctttcaggatcaggagtaggtgagcggcgatcaggcctcactcttcaccgagggccttccctgaggaggggcctgcaggacgctggcagcggaatggggctgtgtggctgctagattaggtcatggcagggagacagcctcttcctggttcttgctagaacaggcacacttggggccttgagctccagggagttcatggaagacatctgactaccctgagccccttgctggagggttctggggagtggcccacggccaccgtcacccatggccaccgtcacccacaggggccgtgaggacatccctggccagcatctaacacaaccacatgggatgccctaagcaactactgcccagccgagggctgcctgaatttctgactcacaaatggtgggcaatgtgaaacgggtattttaagctgctgagttctgcgggagtttgctgagcaacagtagaaaccagaactctcggatactgtgttctgtccttgaaacggtggaagattttatgtgaccagaatggaatgtttgaacaaatattttgagaatagaattttaaaacatttactcatcagcatccaagggtggggagcagtgtcatctaggagactggttctattatttacgtagatgttcttgaattaaaggatgggaatattttttccttccaaaactttttttcaattttatattctgtttttcaagtttttattatgaaaatattcaaactcacagggaagttgaaagactaatacaaagaagaaccatactctttccactgacatgatccaacgaggaatattttgccacacggcaaatatataccgtataattttctgtaccacttgatagaaaggtaaagaatgaatattgttttttaaataacttttttcgtatataagtaatatgtgcttatcgtgtaactacctaaaaacattgaaaaataaaaggaaaataaaattcatacataa

SEQ ID NO: 213 - DNA, 1771 bp, Homo sapiens
gaattatgcttgaagaaggttaatcttataatggcatgcagagcggagctgggcaaggccagaggctaaatatggagccagaaagatactgcagaaagtgagcaaaaaggatgagtggatggcctggggtggaatccgtgaaaaagggcagattgtcagtctcaggaaatcaacaggactgagttctaacttcagctgggctactatgccctggggaatcagaagattctccctaacattggagtccaaagaagaggagccaccatctccttaactacaaaacaactgagagaagaaatgtctccctttagtgccagtgaagagttttgcttctctagaacaactgtttatttttgatcttatgaaacgcgtgacacttgtaactgatttgccttctttttgcttgctgctagaaatctcagaaccaaattcgaggtcatttctgaatgtgctggactacacagcatgaattctgtgtcctctcacctcattcatagatacatttttttattcctacccatcttttcctttccccagattttcctattgctcttttatcatcttgagtaaagaaggttaaactatgaataaaaagtacaatctcaatgacgagtcagggaaaagtaagttttggacttccatttagagccatttataggtcagcaatcttttgtctctgtgtcttctttctgccctgaacaaccaaggcatcctagtcagtctctcttcatctgcataccactttaaagagcccaggggtcttccaagtacagtcactactaagaaaatgtcttcagtaaattttttttttttttttttgagatggagtctcgctctgtcgcccaggctggaatgtagtggcacgatctcagctcactgcaagctctgcctcccgggttcacgccatcctcctgcctcagcctcccaagtagctgagactacaggcacctgccaccatgcccggctaattttttttgtatttttagtagagacggggtttcactgtattagccaggatggtcttaatctcctgacctcatgatccgcccgcctcggcctcccaaagtgctgggattacaggcgtgagcccccgcgcccagccttcagtaaaattttaatgcatgttgcttatcattctttgtattgtaagcaccaatccttaatctgtgctgtggtttttgttcagaaacatttctttaaaaaaatttccccagacgctcagccttcatattctaatctttattattctgaactacctacaaagctaaatataccttgtctacatgcagtgcttatgtaacaatggtgcttattttgttttacattgcttcaacctctgaccagaaacttagaggacagaatgccctgcttttacaaaaaatgtggtgaccacaacggtaaccttatctaattgagaccattttaggaaggaggggaggagatatttttactgcaaagactgagtcataagccttcattttttaccctgggttgtgcagaaactttaaactttctatattatttcatttcttccataccaggacatttatttcctattcagtgacaatcttgatgtcttcatccttcaaactgctctctaacatagtttcaaaatccaagcattaaacattattaatgctcaggggatgaatatgttcattacctttactgtagtgatgatttcctatggcaaaatgttaaatgatgtaaagataaaaataattatcatagttattaatcatagcaataaaactggactacctaaagcaca

SEQ ID NO: 214 - DNA, 1771 bp, Homo sapiens
atgggcccgttccaggcagaaagagcaagagggcagggagggagcacaggggtggccagcgtagggtccagcacgtggggtggtaccccaggcctgggtcagacagggacatggcaggggacacaggacagaggggtccccagctgccacctcacccaccgcaattcatttagtagcaggcacaggggcagctccggcacggctttctcaggcctatgccggagcctcgagggctggagagcgggaagacaggcagtgctcggggagttgcagcaggacgtcaccaggagggcgaagcggccacgggaggggggccccgggacattgcgcagcaaggaggctgcaggggctcggcctgcgggcgccggtcccacgaggcactgcggcccagggtctggtgcggagagggcccacagtggacttggtgacgctgtatgccctcaccgctcagcccctggggctggcttggcagacagtacagcatccaggggagtcaagggcatggggcgagaccagactaggcgaggcgggcggggcggagtgaatgagctctcaggagggaggatggtgcaggcaggggtgaggagcgcagcgggcggcgagcgggaggcactggcctccagagcccgtggccaaggcgggcctcgcgggcggcgacggagccgggatcggtgcctcagcgttcgggctggagacgaggccaggtctccagctggggtggacgtgcccaccagctgccgaaggccaagacgccaggtccggtggacgtgacaagcaggacatgacatggtccggtgtgacggcgaggacagaggaggcgcgtccggccttcctgaacaccttaggctggtggggctgcggcaagaagcgggtctgtttctttacttcctccacggagtcggcacactatggctgccctctgggctcccagaacccacaacatgaaagaaatggtgctacccagctcaagcctgggcctttgaatccggacacaaaaccctctagcttggaaatgaatatgctgcactttacaaccactgcactacctgactcaggaatcggctctggaaggtgagcaccagcgctccttccggaagcctccaggcccccgagcaccctgcccccatcccacccacgtgtcgctatctctaggtgaagctagaggaaccagacctcatcagcccaacatcaaagacaccatcggaacagcagcgcccgcagcacccaccccgcaccggcgactccatcttcatggccaccccctgcggcggacggttgaccaccagccaccacatcatcccagagctgagctcctccagcgggatgacgccgtccccaccacctccctcttcttctttttcatccttctgtctctttgtttctgagctttcctgtctttccttttttctgagagattcaaagcctccacgactctgtttcccccgtcccttctgaatttaatttgcactaagtcatttgcactggttggagttgtggagacggccttgagtctcagtacgagtgtgcgtgagtgtgagccaccttggcaagtgcctgtgcagggcccggccgccctccatctgggccgggtgactgggcgccggctgtgtgcccgaggcctcaccctgccctcgcctagtctggaagctccgaccgacatcacggagcagccttcaagcattccattacgccccatctcgctctgtgcccctccccaccagggcttcagcaggagccctggactcatcatcaataaacactgttacagcaa

SEQ ID NO: 215 - DNA, 883 bp, Homo sapiens
gcaggagccgaaactcagagtccttcaaggcctatagccaggtgatggaggacgaggagaaggcagtggagatcttgggcaacacggaagctgctcatcctccatcccccatccgctgctgctggctccgcctccgctgcttggcagctactagcattatctgtggctgctcttgcctgggagtcatggctctggtgtttgccatcaagatgccactcggtgattggccgcgtctgaagccgcgccccggcgtcgcgttgcagccttaggtccagccgagcgccgactcacgccccagccccaattgggcggccggtttccaattggaagggcttctgagcctcagtcttcgggcggcgctgaccattggcgggcaggatggaggcggagccttgggttgtcgcccgccgccgggggttaaggtgagcgactgcaggcaaacccggcgacagcgcagctcgcgtcgaccctggctcctctgcctgccccctcaggcccccgcctccttcaggatgacgctggacgtggggccggaggatgagctgcccgactgggccgccgccaaagagttttaccagaagtacgaccctaaggacgtcatcggcagaggagtgagctctgtggtccgccgttgtgttcatcgagctactggccacgagtttgcggtgaagattatggaagtgacagctgagcggctgagtcctgagcagctggaggaggtgcgggaagccacacggcgagagacacacatccttcgccaggtcgccggccacccccacatcagtgaggctgtcttccttgctcctgttagcagacgaccccccacctcctgctggccctgcccatagcccacttccgccaacattgcctccacacctctcct

SEQ ID NO: 216 - DNA, 386 bp, Homo sapiens
tggtcactcgctcaggctgctctagaggccccatagccagggcccggctctgagggccccacgggccagcttctcagggggctgtgttcttcctgggccaaggctgcgtgctcagcagcggtggatgcagcatgtgctgaaccgttctcttcacaacacccctgccctgctgggcgccggcccccatgccaagcatgaaggggcaccggggagagagaagcgagtggaggctgggacagatggtgccctgaagtgtgggtcaagtccgaatcaggcagggtccctgaaccctggcgctgggggaagtcgccgacctgtggccagggcggggctgataaagctccatcaatcacttgactgtctctccttcctcgggcctccatcca

SEQ ID NO: 217 - DNA, 625 bp, Homo sapiens
ctcgaagctggggcgtctgacacctgaggcccgaagtaggtggccagcttcttagagggccaacccagggcattaacacaccaggatagtggccgcagttgtattatcttgtgcatttgtcaagagaggtcatccgaacgctgagataaaggcttgggattccattgtctcatctctttctgggagtgattttcctctcatctggaagtgcagagacagagtcttcatagggaactgagattacctccaaaaaacatttgtgaagtgagcaattcctagaaggctgttaatgttgattaatgaaattatacaaaaagaatcataagatagctggagaagaaaattatctgtgatgcctggaaaagatacgtcccagtgggaggtaagtacagaatcctgagttctgagatgtgaggaattcagttgaggtaatggttctactataattgtggctaccattaaatttttgtttcttcaaattatgatttatttctcttcctgataacattgaacaatcataaatgtggagggaaaggaatcattgagggttgatttagagagagtaaacaggtgtaaagccatggttcctgtgtgttttaacaaatactaactgagcacccgccct

SEQ ID NO: 218 - DNA, 573 bp, Homo sapiens
actgcactccaatcctctctttggaacctgcaactgaatattgctcctaaatgggaagactgtcttgcaaggggacaactgccacaatattgccaaaataatccagaggaggtaacacggtgccatctccaagcctgtggctcgagaggtcggaaaagaagctctttctaattggaaaacagccagcaaagttgttaattccaaaaaacaagtatgtctctggagttaaaaaattttctgtaaagagccacagtggctttgccatctctaacacactccaagaactagtatccttgccacacattcccgaagagattaatgttatattggagtccttagaaacaagaacataccaatcatatccttcaatcagtctcaacaatgaaaagcctgagagcccctttgcagtttgtctgggctatctgaagatttctggccaatagtttgtaaggggaattggaacacttcaattctcatctgatacatttaaggaaagatacaagttctccacactttgcttccaacttcacagacaagagatctaagaacttggagatggagagtgacaggaag

SEQ ID NO: 219 - DNA, 2479 bp, Homo sapiens
tccagggaccccagacagcatttggtccctggctctgtgtccccacacagccaccctaccccatgctgccttttactgaggcacacagcattttagacaggagaaccctgatggcagaggctgggtctcacgggaccctgtctccttaagggcttagtctggggctggagcctctacagatgtttgagcaaaggcgggaggcaagggagggaggccggaagccaccccagggactctgatgtccaccctgcggcagcctgtctgtggacagatgatgcaggaagctcacggaactcccaagcagaaatcagcagagatggagcctggttatttttcagcacacaaaagccgagggccccttcctgagatgcctgcctcagcccggtagtgaaactgaacccacctcagacgggaaaggcttggcgggctctgcttggtgggaagtccacagtggtgcctcgtccctgagatgagaatcatcacctccgctttacaaatgagatgaccaagggtcagagaggagaaaggacctccccccagccctgagtcacctgcctggagactgagggagccataatgcgaatcttccccttgccaaacccactgactccattacgctgcctccagagaacccgagccccgcggcgagaaagtggtagagctgggcctcgaacctgggtcctggactcttggtcctgtgctccttgtggaagatggaactgcttcttcagagacaaggtctcattgtattgcccgggctgttctaactcctgggctcaagcgatcctccggcctcagcctcctaaagtgatgggattacagtcatgagtcaccatgcttggcctgggcaggactttctcaagtggaactgcctcacacacagactccctggagctggcaggatgaagcccatgaaccttggcctggcttgctaaaccctccctcccgactccctcaggagttcgagtctgccttctttctccggctggctcctcagcttaacgcgctttcctccaggcagctctctcgggcttcgcagtgacccttcctcggtgctccgcggcagcatgcttctggcatctcatcccaacacagtgaagagcagccaagtgcggctgtgtggccctgaccaagtcatttcacttcaattttatgctttggctttcacatctttccacggacgtgaatggagatgatcatggtgccgaccccaaaggatccttacacgtcttaaaaaagtgagccacggaaaggcctcagcccagtgcctagcagagaagcagcacatgggagggaaggaacgaccagagaagacccgtggtgtgccaggcactagacctggggctcggtggcacatgtcagctccttgcaagtgtgaaacaactggagtgcagcgagcatcagtaactcaccctaagtcacacatctggtaaacagcaaagcctggatttgaacccaggttttcccatgacatcagataagacggcaatcaccacctccttctaacccaccctgcctcacctgctccatccttacgacttcaggtgtcacctcccagctgggtttaaggggctgagttgtccactctgatcttctccaagcacaaactgcaaagcagaccagaaagcagctggtcctgactccagggctacccacagatgcccctgcacctcctcatgctcctgtgctcctgtgtgatgtcctggactgtgtgatgaccaggctggggaagtcccaatctgaagagaccaagcgctctctgacaatgtgctgatctaatcacgtacaacttaagacaaagttaacccgtctcattgaatgatatggtataatggtgatgactgagctgcccagtaattgtgctcaaccaggaagcagctcatggagtcagttgtaattagtatttgtgttacacaggtgagtgggtgggtgagggctgggcagagggaggaggaagtgggtggggcaggaagctctggggactccttggatccatgaaccccatgccagccaactcatgtggttgatcctgtctaaccttcatgatgacctcatgatgtactgttatctctcttctaaggtgagaaaacaggctcagagaagtccattcacttgtccaagatcagacagctagaaaatgacagagccagggttccctcttcagcccaggcgatgtcttggacagcagaaggaacaggaatagggctgggaggctggagatccacatctcggtcccagttctaacactgccttaccctgggcctcagcaagtagcatccctcttcaggatacaaagagatagtatgtctgtcaggttgcagacggctgagggtgtggacttgggagctaggctccttggattctaatccttgggcaagctacttcaccatctgagcctcagtgtcctcatctgtaaaatggagatgacaacagtgtctccctcataggcttgtgaagataaaacgagtaacaagactta

SEQ ID NO: 220 - DNA, 506 bp, Homo sapiens
gagccatggactcccacaatatggtggggggaaaggaatcaagctcatttatctggaaattaaaggtaaagatgacatttcagaggtaaagtgatttagaatattcaagacatctgatgtgccctacttatatatgtgaaagactggaccaataaacagcagaatgtttacagtggtttgctctggataatgaaagtatgagttcaactacggagctttaagcttgaatttactacagtggaagtagaagtttcaggggtaaagtggaagaaaatatgcaagtcaacatggtgtattattacagctccaattttgcatttccagttccctgctgggaataaattaaattggcagaagctcagtctaagtgcctgcaacagaatttgtcccatatccatacaacttgctcctccacaacaaatgggagaatcatcctcttacctccagcacctgcctcaaacaaagtttctgatccatctaccacgtaactttgacgctgaccaaga

SEQ ID NO: 221 - DNA, 6116 bp, Homo sapiens
aaaaaaactcagtttcctcatccataaaataggaattagatttcaatgttctcttaggtcccttctagctttaattcatatgtgattatgcagtaaccacaaggtattttttaaacctcctaatgtatggatattaagcagaagagtatttatatgaatacatgtttcacattcctttggtatgaaaatggtgtgttaagtttttcctttaaccactgagttgtgaatgtgaagaaggtggtggagaggaacaaaaaacagaaaggtattttgatcttgccacaaagcatacacacaaattggcacatgcagctgtttgccaaagccttctttttttttttactttttaagaaattatgttagggaaaataaattctgcttccagggacaacttcatggagcctatttacaaattaagagtcagcttaatttgtaacatttctaccagagccaagaatcccaaattcctggtagattagtgttttatttctaaggggcttatgcattcggctccaactcaactcgtctatgtgctgccagtaattaaaatgttccacctcagactgcacaaatggcttatccttctttgtggcatggcgtctgtctcaggaaaaaaggttttatgaaattccatggcaacagtcccaacatgtttgagacttcagctaaaggaatggatgtattttggtgtgtagtcttcagtatatcactgtatttccgtaatactagactccaagctatgccagattgcttattccctttgtgaaagaggagttgctcattacgttcttgaaatatcgcacatcctgttggttcttcaagggacaagagaaagagaatttggaagcagggattagtagaagagaaaacgagggaaaggaagcctttccaccagattagtgttcaagtctttgcagaggagaccaactttttttgttttcttttgttttgagacagtctctcgctctgttgcccaggctggagtgcagtggcgcgatctcggctcacggcaacctccgcctcccgggttcaagcaattctcctgcctcagcctcccaagtagctgggattacaggtgctcaccaccaagcccggctaatttttgtatttttagtagagacaaggtttcaccatgttggccaggccagtctcaaactcctgacctcaggtgatctgcccgccttggcctcccacagtgctgggattacaggcatgagctaccgcacccagcctgagaccaccttttgcatctcaagattgtgaaaccaaggcccattccaccagcctggggactctttttatagatatgatcctcctttttcctgtgactaatgaatttgctgcatgatttctattcttctgaggttagttttctgagtaaggtgaccactcacaaaggcactttctttgtggcattctgagcctagattggggcccatcaattccagaaaaaatttatgtgtggaaactctgcatccttaagtcttgaagttgaaccagatatgcagtggttaccatcacacagataaacgctgccttctgtacataccccttatgctgtactaattaacaaaccccttgccagggctggggaggtgagggtgaaggagaatcttagcagaagggcagagtcaggacttgcatctgccactgctgggcactgaagccctggagcagcttcagatagtacctgtactttctcatgcagactccctctgaacaagagccttgtaggcccctctccttcatttcccaccagcctcttatcaggcgggctttccaccatacacccaggaggccacggtctgaggaacaaccaaacccatgcaaagggccgggcgcgatagctcacgcctgtaatgccagcactttgggaggctggggcaggcagatcacctgaggttgggagttcgagacctgcctgaccaacatggagaaacccccatctctactaaaaatacaaaattagccgggcgtgatggcacatgcctgtaatcccagctactcaggaggctgaggcaggagaatcgcttgaacccgggaggcggaggttgcggtgagccgagatggcaccactgcactccagcctcggcaacaagagcgaaactctgtctaaaacaaaaacaaacaaacaaacaaaaaaacccaggcaaagtttccttgcagccaaggtgacagaactgggctgagggtggaaaagaaacagaaccagtgctccaggtgttttttaattttttaatttatttttattttttttgtatatgtatatatatgtatgtatattttagaggaccagggtctcactatgttgcctaggccagactcaaactcctgtgctcaagcaatcctgcctcagcctcccaagtagctgggattacaggcatgcacaaacaatgcccagctctccaaatgttttctgtcactacctgaagtgttgcatcggtacttcctacggaaagaaaactaaatagaagtgtctctcccgtgagcccccaccactaccaccagaaaaaaaaaagagagaaaatgaactcatcagtctttagtttcctcaagttattctcccaaaaagacattcgccttggcacagataagccagctaatcttatgctttatgacccactgtgagctgttcctgacacagcttctgactttgtcagtgacaaaatttctcaccttttaaatgcagtgcttaacattttgttaggcccatactcaaaatcggccagatataaaatgacctcagattttgatctcctaggctcaaacaatcctcctacctcagcctcccaagtagctgggactataggcacaccaccatgcacagctaattttttttgtatttttctgcagagatggcgtttcgccatactgcccaggctagtctcaaaatcctgggctcaagcaatctgcccacctcagcctcccaaagtgctggaactacaggcaagagccactgcgcccagccacaacctcagatttctttggcaaacagaaatgtttaaaaacacaaaattttgctcaggtgaaacactgtgttactatcaaatctcacatccacataaagtttttcttttcggctttgtttcgtgaggaacagacagaacaaagtttttccaggtagcatctgtatcactattattctcctatttcctgtaccacccccacctccccaagccctactgaatgtgaggtttagaatgttttaaggagggtcaggtgcggtggctcacgcctgtaatcccagcactttgggaggccaaggcgggcggatcacctgagtttgggagttcgagaccagcctgaccaacatggagaaaccctgtctctactaaaaatacaaaattagccaggcgtggtggcacatgcctgtaatcccagctacttaggaggctgaggcaggagaatcgcttgaacccaggaggaggaggttgtggtgagccgagatcgtgccattgcactccagcctgggtgacagagtgagactccatctcgaaaaaaaaaatacaaaaattagctgggtgtggtggtgcacacctgtaatcccagctactcgggaggctgacgcaggagaattgcttgaacctgggaggtggaggttgcagtgagccgagatcgcgccattgcaatccagcctggacaacagagtgagactccatctcaaaaaaaaaaaaaaaaagaatgttttaaggaaaaaaatagtactgttacatataatcccaggtgataagaccacaatggaaatgtttaagtcctcactttaaagagtaccccactgagaagaggtatgttggactctagcagagatttggaaactctgggacactcaagatgtgaaagagcctggctatctgaggactcaaagagtcagcatcgggacttgtgagctcaagaagagaaaagggagtggtgaaactttgtcctaaaagttagcaccaggaacagaagaaaaaaacccgatatatagtgatacctcatcttttagagaatgggaagctatttttgtgttcacacagaaagtatagttcaaaaaacctctatatccagagttcagacaaggagaatgatttgagatataagtgccgatgaaggaggtcaattttgatctgaaaccagcagctggacctgggccacctcaggaaaaggactctgttctccaaggcagcacgactgaatggttctgagaataagccagggttcaggactcctgaccctttaggaccatggactcagaagagcctgaaggacaattgtgggctttaaacttctgagagcttgtaaagtaacacaagactgtgcctctcccttgccccagctgtagatagtctttgccccaccattgttatgaagatacacagggttttgcagtttgaataaattggatacaagtttcctctttttttttttctttttgagacaaagtctcgctctgtttccccaggctgagtgcagtggcacaatcaaggcttacttgccgcctcaacctcctgggctcaagcaacgagccatcctcccgtcttagcctcccaactagctgagactacaggcgtgggtcaccacacccagctaatttttgtactttttgtagagacagggtctcaccatgttgcccaggctggtcctgaactcctgggctcaagtaatctgcccacctcagcctcccaaagtgttggggttacaggcgtgaggcaccgcggctggcctgagtttcttcttaatactgtatcacaattgtgggctgtcttatgtgttgatatcgattgagctatttgaaataggaatgttaatgggtgtattaaatttttgtaaggatataacaatatctaccttccaaggatgttgtgaggttttccatgattttgtatatgagctaatgttacctttgaggggtggtgtgcattatgttggatgattgtaaattttcagtggaaaatgtaccgtgtcctaaatttaaagacatgaaaaatatcccaagatcatactagatcataatagcaattcctttacaaatgaattatggaggtaactgatctctaacagtttccttcatgttgttttaatgcacaagggcagaggatctgctgacccttggaaccagcgtgagctaaccacgtgctatagacacttcatggtgtcgcacccagggaagtcaaagcgctttgctccctcactgtctgtgagtcctcagccattagtaccccaccccccgctgctccaaaacttgagttatttcaaatgtttctcactgttcatctctccactgaccccactccagaaagcctggagagagtcccaagatgccacccaccttccccaatccctcgccacagatctgtgtctatctcacactctgtaagtgccgctttgcttcttcctctcttgaaaagactgagaacacacattttaacatgttaggaaaatggggcagcctaaaaaatgactgatcccaccgccagtgactcatgtatactccaggctagcagacaaggccctttttggtgggcctgcttctgtgggttcacagaaaccaaattactgtgggttgcaaagaattagcaggtcatttacaaagcagacatcccttcacccagactgtggttttgcatgctcaggttctcagtctatgagctttggtgcaggatcattttggctactggaaaaaccatagcttattttaaatttctggttgccaaagccaccacacgtgtggtctgtggatgaccattgtctgcagaatgacgaggaaggaacagaatgtggtttggggctcagggtggccttcccactgggagggaaggcgggagggagcccttgccctgggttttgacacagcctgtgctcacagcctctcctctcatctgcatttctcagaaatgccctccctgcccagtggtgactttccctcgtcactcctatggagttctacctggagcccagccatgtgtggaactgtgaagtttactcctctgtaaagatggtttaaagaaagtcagcttctgaaatgtaacaatgctaacccttgctggaaccctgtaagaaatagccctgctgatagttttctaggtttatcatgtttgatttttacactgaaaaataaaaaaatcctggtatgtttg

SEQ ID NO: 222 - DNA, 780 bp, Homo sapiens
agactaatgaccgaagcttcaagactttgacatgtgtgaaaacatgaaatggtaagtcaatacaaagacagcatcttcctggaatttggttttgagcttgttttcatttcacctttctcagtaatctgggtgtagcttattttgactcttcctttgattaaacaattcagacccttggctcttattgttcttgctggtgtggtatgttcacggctgaaaagatggtcagaaggggaaaggaggaagtgagaagaaagaaacagggaaatgacagagtgttgctcagttacccaggctggagtgcaatggcatgatcttggctcactgcagcctccacctcctgggttcaagcggttctcgtgcctcagtctcccaagtagctgggattacaggctggagtgcgatggcatgatcttggctcacggcaaactccgcctccctggttcaagtgattctcctgcctcagcctcccgagtagccgggattacaggcatgtgccaccatgccccgttggccaggctggtctcgaacaccttacctcaggtgatcctcccacctttgggattacagcaggctgaggaattaccaaggaggcaggaggtggagcaaaacacaccaagcctggtgccaatcattgacaatattatggttagtacttactgagggctgactatggttgaaactgcctttgcaaaattatgactgagacggtgaaagagatctaacttaaccaacgctagctatcttgcctctaacctccaagctgtccttgttcattcc

SEQ ID NO: 223 - DNA, 571 bp, Homo sapiens
agaaagtgctaggcacgtaggcgttcaggagacagtcacggtactcgtttccagacagaagtcatgaggaacaagagggaaggtgctttcccgtgtgcagcgcttggggagactcacacagacagaggatctggcatgacagggaaaggaggaaatggcttctgttaatctctccttcagcttctcccgcccttcccatgcactcttcctgtttccctttccagttctcacggtgactcaaggaacaacgtgtgaaatgaaagacctcaggtgctgtattggctcttgacagctcttcagaagaaaatacctcctgcctgttctgttcagtcctggtgcagcttccaggaagccaaatgacccaccggcttacccacatcgcaggaagctttggagcagagtcagtgactatgtgaacctgcctcaacctctgctccctggttcagcatttggcttgggaaaaatgacactatttcctgtctcttaaacattatttcaaggcacaggtcttccaccattctgagaggcagggggatctttgagttctgccaggagctgggggttaggggta

SEQ ID NO: 224 - DNA, 337 bp, Homo sapiens
cagtgtgtccccaagaaagtgtcagagcctttacgtggaccttctcatgaaaaaggaaacagaatagtcaatggaaaaggaaaagggcctcctgcaaaacatccttccttgaagcctagcactgaagtggaagatcctgctgtgaaaggagcagtacaaagaaagtatgtacagacattgagagcagaacaaaccttaccagtggctttagaggaagagcaagaaaggtgtgaaagaagtgaaaagaagcaatcacagctaattttaaaacatgcactctgacagaaaagacatctgagaaacaaaacaagcaaatttgttttccattttgcacctg

SEQ ID NO: 225 - DNA, 1998 bp, Homo sapiens
tacactcatccctgccattagcattcaggaccaatcttctatagcctatacgccacactggtctaggacagcacctaaataatactcatgctataaaaaattcatcaagttatatatttttaaaaacatccctaaaattatctttttcctttactgaaaagaatttcaggatcccctctctctcactgcctctcttcacacacacctaccttagttggtcacctattttgtaaacatatcttctttaaaaaaagaaagaaatggcagtacatgaaaaactgcttcgtaaacagaaactatattatttatatttgtagcatttttttccccttgaggttaatttcctttgcttcccataactggaagccaatgattcagtgccattatataagcttattttccctcttggaaatagtaaattataagaggtttgacccaaaaatatacatcaaaattaggcagtattcggtgtttagcctccatctgccttgtcttcttgtctttagttgtgcaagtagatgctgatgatttctggcagagctaaagtaagtaaatcatgtgaatttattttttttcctcataaaacagatggcatggtctagctctgggcttgtatgtttcatgaagtacatgggtctgagtgcgtatttattttgtgagccaaggtttatgccttcttctataattttctttcaccgaaaattacctggagagctagaaactccatttgtgtcagtgtaagaagctttagaatctatatccagaccaaggccatggaacaatgtagattcactcagtaaaaactcactagcggccttctttgtactagtctgtcacctttgcttggctttgggaagcttcaaactagggcagtttatgtttgggagtgaccagtcaaatagcaagacagacataggcaaggatgtaatttttaaaaatttaagtggggaatggtgaagcatgaatcaaaacagaaggtagtcttaccttcttggaactgtaaaataaatacatttgaaaaaggcaccctctcaaccttctgcgagtcagaatttttgctgccacccctcattttgaatctctattctgcattttttattcttttttttaggaaggaggaagaaaaatttctcctgaagaattcattggaaattaaaattaacttgcgtattttgtattctttggaatgtgatgaagactgatttgaaagggcagtgctggatttggtcaggcataggaaaggaagacatgcagtcgtcctgcctagctcatccccgccacgatggagaagtggggttgctttcgttgtactttttttcatttgtttcttgccaagcccagtggcttctgttataacatgtggcagcttctcccttggagactgattcagtccaagttaccataatatttaggaccagctacagagacgtttcttcccctaaacccatgccaaatctaaatcaaactatcttcttctccttagccgttcaaatagctccagctcttatataaaaatacgagaaatacacaggcctcttttcgttttattcctgttcaaacagataaacaaacaaggcacatcatgcctaggttgctttgagcttgatcacttcctcctaaagcagtcttacgctgtgttgattttaagaattgcaacttaggtgttctagaacatattctgagagcatagtcatagtctgtgatctcagaatatgtttgcttccttctagaacatctgagttctagaaattgcgtacaataaactgctgtcagtgctgctggaggaaggaagagtaactctgacatcactggccttcaacaggtgtggcgctgagcttctgggcctcagaagccctgacttctagaggctgggggccagcggggcagggaggtgatctcatcatggatggccacagatcatccacctgccaaacagttaaccctgaacaagtcatgtcaatttattttgcttttaaaaaagaaagtctgcaaaataga

SEQ ID NO: 226 - DNA, 4166 bp, Homo sapiens
ataagacactattctaagcactggggtcccataagaataagacaaagcccctatcctcaagaggctatcatcaaactatagacagagatgggatctccctctgtcatccaggctggtctccaactcctggcctccagtgatcctcctgcttcagcctcctgagtagctgtgattacaggtacaagccatggcacctggcgagatgacattttgctggaggaaagggagatcttctaagagcaaagagctttccaggagctgggaccaggactatcacagattgccctatgtcgtccatgctggtctggaactcctgggctcaagagatcctctcaccttggcctcccaaagtgctgagattacagagctagagtctcatgatgtcgtccaggctggtatcgaactcggcttcaagcagtcctctcacctcagcctctcgagtagctggaattacagttgagagccactgcatccagctttgctctttctttgaaaggaggcaaaagaatggacgggcacggagatcctagaggcgaagcaagttgtcagcgcccctgcccaggccccgccctgcccggcccagtcccgaccccgccctgccccgccccagcagctccaccctcaccggctctcctcgccctccagcagcttgcggtaggtggcgatctcgatgtccagggccatcttgacgttgaggagctcctggtactccctcaggtgccgcgccatctcctcttttagctgtcgcagctcctcctcgagccgcgcagcgcccgcctggtagccccccgcctccagggcgaactgctcctccagctctctcaactgcctgagcagcgcctcgttctggggtaggagagtggaaggggccagttgcagaacatttcatcgtccgctccccgggcccgagcgcgcagcttcgtactcaccgtgccgcgcagcccgtccacctcgcacgttagactctggatctggcgtcgggactcgttcatctcctgcttggcctggcgcagggcctcgtggttccggttggcagcgtcggacaggtccgcgtactgagaagtgggggtaacccaggctttagtcggctgggacgcgcgacaccaccccagcgtcccgcctcgcaggccctcccggctcttgcaccttggacttgtaccactcctccgcctcctgcaggttcttcgcggcgatgctctcgtactgcgcgcggatgtccctcagcgctgccgtcagctcgggcttcaccgtggcttccacctccacctgctgcacctgctggctctccacactcacctgcaggtctcgcagctcctacggccgggagcaggcagaggatggacagcggcgcaaattccacgcgggccacgcagttcgtgcacagaaaagagaagaaacgcttgaacgaacagaagtgggcgccagggagggcagggcgtacagccctgcgcccccgcgggcgcgagaccagaggccaggtttcggagctccagcgagaccaccccacaacctcagaaaccgcccctgataccgggcccacttacctcctcgtgcagcttcttgaggaactcaatctcatccatcagagactcaatcttgcgctctagttccaggcgggacagagtggcatcgtccacgtccttcgaggggtggcagtggaggttcaagataagttaggggctgcgcagaccaaggaaggaccaggccttccctgtctgcctcaggaggcatctgggttacccccttctccccgcgcccaccgatgccacctctggatactgagatcgggggtagcggtggggaggctgaactcggagaggggctcggactcaccttgcggaagagcacgaggttgtgctccgcgtcctcccgcttgcgcgtctcctcctccaacctgacgggaagagcgtgcagaggctgaactgcggggtcgccgcccagctcgcaccccagaccgcacgccccccaggatccggttagaggctgttctgctgcccaggactctaaatggagggctgaggctgtctaatggaattgccccgcattgtctctaacggactgggagctgaaaagggggtttcctcattactcaggggaggcacagatacccacttctcccacctccccaaacactcagagcaaaggggtagcggggggcacttggagcccgtgggcagggatgctgcccgcacacacctgggttggtaaggggagccacacccttgggctgctgatggagaggggaagcgaggggaggcaagagcagccgcctcgacggccgcttcgacctcgcctcgacggcagcggcccagccctgccccctgacctctgcttgagcgccgccaggtcctccgccagcccgtcgcgctccacctgcacccggtcacgctcgcggcccaacagctccagctctcgccgcagctcgcgcagctcctgctggcacagctggtcggcgcgcgccggctcctggccccgggcttggctcagctccccgcgcagggccgcgttctgctgctccagaaagcgtaccttctcgatgaagttggcgaagcggtcgttgagctcctgcagctcctgcttctcgttgctgcgcgtggccaggaactcctggttgagggcctcggccatggagaagtcgaggcgctccgagggcaggcgcaggagggcgcccgctcccgctcgggggctacggaagctgcccaggcgcaccgaggagctcggggacgcggagcccagcaggcggctgctggagaagcgggagctggacgagtaggagaaggccccgggggatagtgagggcggtggaccgaagacggcccagcagaggttgtctgctgatgtttcagccttaaagacacagcccccaaacctagacctaccccgcaacaagccccaatgagcttccagaatgcaagcacaacctgcccaggagtggacagaggcagctcggatggtctgcaggagccgggttgctgaggtctgctgggtttgccaggaaccatagggctggggctgctgctgctgctggggactccagcgctgtcctgtgagacaggtctgcctcagatgggacctgaggacaagagagtgcatctggggaagcaggtttcaggttcctgcctggatatctggctgggggtaaggagggcggctccctggctggccagctcctcagtattgcagggcagcagccccctcccccctttgtgcgtcctgtgagatgggccagggccaacgccctgctcacgtccctaccgccttcgtctcctttccaggcccctccttccttccgggccattagtctctccctgcacagctgccagttccttctccttgatgggtctggtttggttgccaggggagtgggaagcgggaggaagggagagatgggacaggacgaataaatgacagcttggcctcccctaactcctgggaattgggaggggtagggtcccacccgggatagggccgggaggcttggtgggtgtgaggaggggctagggaagccttggtgcttcctgccgcagtcctgggcactgagccccagctgctgttggcctggagccccatctatcccggatttggccccaccctccaggagcagggagccagctctgcatcaggagaggcgggcaaggcctggggaggaccagctcaggccctgtctacagggcactagtgggggacccaagcctctgagagtagaggctgctggggctgcagctgggcctggggagttccagatggagttcccgtcctcaccctgcttaagggctccgctggccacctacatgcctcggaggagaagggacagagggctgccacagcagggctctggagctgtggatcaggcctgggtggggaactgccaggcagaagaggctcctcccctaaagcagaaggagcaggccagcaactccaggcggagcaaaggtaggcaaagagtctgggttaagagccgggctctggcatccagctgccacacttcccatctgatccaccactctgttgtagaatttaggctcgtcactacgtcccttcatgtccctcaagaaaagggagataactaactgtagcttctacctcatagtgttgttgggaggactaaaggaataaataaatacatgtgaagtgcttaggacacacatcttaaagcctgaaaatgg

SEQ ID NO: 227 - DNA, 569 bp, Homo sapiens
acctctttctctgctttcatttcgtcggactggctgcgcccctacctttctctctgaatccatcacacccctccctgactcctgccaggccatggcagaattgctgttcccaggaaggcaggcctggcctgggctgaaaagcagatctgggttctaatctcccttctgcatggacctgcgggtgacacaagcttggtgccttctcctctctgaacttcaagtccttacttggacaagatggcctggctcctcccagccctggatttggggatgctccgatgctgcctgggagcccagtctgatcatggtggcctggaaatcaaggctaagcgaaaggaaagcctgaaagagctgcactctaagcaccacagcaggacttgcccctgaatggagatggggctggggcaggaaggtggcagggaggggctgggccctgtgactgtcacctccaggttggaggagtggggagggaaaggcagggcagggtgcgttatcacacacacactcacccacatacactcaagcacacaccacagagtccaaggaaaacctgtttctgtcctagcact

SEQ ID NO: 228 - DNA, 1579 bp, Homo sapiens
atgcaagtgtttaacagatgcttcactattaaaatattttccccccaagtctcaaatattgaagaatctctaaccagggacaccagtccctacgaagaccttgggcgattttgaagtgcgggcacctcgattccccgaatctgtagtgtggctggtatcggtgttcccctggtttaactagcctgtttgaaggcacagatcattcatggggatgtataaccgaaaccagtcctctccaccgcctggggatcttcactttcgcagtctacgactgcctgtgactccagaaagacaaactgcagattggccaagatggggaaattgaggcagagaagccaagacatgtgctaaaggtcatgcaggctatgaatggagctggaatgtgaacgcaggccatatgaccccagagcccatgttcttgaacccttagaaagacagcagcaacacacctggtgcagcagctgcttagttggagtggctgacaaggagagaatgatttccaggaagagcggaacacatatggaaggccttagcttatctttagcgcctcatacacccgttctggacttcagaaaggccagtgagtgggattaggcctcagagataggatgtcagtcccagtgagggatggcctagagcattctttaattctttcctttgggtcacacataagaaacaattttccagcactgatgagtgttattaacaatgagatgggatagaatttagttttccctatggctgtgcttcaaaaatagaaaagctgtcttttctctggaatgattgaatgaagctctggggaggaaaaggtggattggcagatctcttaaaggaagcttctccttctaggcactattctaaggcttaatattttaactccctatattaacctagttcaactaaacagtgatctgagtaattttatttttattaaagctcagatcaaaatgccattaacattgattgagaaaatcaaaggaatctttgatgtgagtggttaaattgctgaattatttcagtcccataccctcacagcatgagtacctgatctgatagacttctttggaattccttttttgtttgagacagagtcttgctctgtcgcccaggctggagtgcagcggtgtgatctcaaccattgcaacctccacctcccaggttcaagtgattctcatgcctcagcctcctgagtagctgggattacagatgtgcaccaccatgcccggctaattattttgtatctttagtagagatgaagttttgccatgtgggccaggctgttctcaaactactggcctcaagtgatctgcccgcctcggcctcccagactgctgggattacaggcgtgaggcaccgtgcctggctgggattccataataaatccctctgtgtctatttcttttttcaaatataattttcttcatttccaaacatcatctttaagactccaaggatttttccaggcacagtggctcatacctgtaatcccattgcttggagaggccaaggtggaagttcatttgaggccaggagttcgagaccaggtgggcaacatagtgaaaccttgtctctacaacat

SEQ ID NO: 229 - DNA, 617 bp, Homo sapiens
cggtggccacggtttccaggaaagaagagagaggcggaaaagttaactttccgccacccacacaaatatttttggccggcgttgtcttcacgctgccaagccaggagggaggagttggcaggagcactccaattcaaggttccctcccaaggaggaaggaggactcccaacccagtcggggagcttgggcaggccctatgcaagcctgagccccacagcacccacctctgtgcaggagctgtgggggtcgggacccgaaacaataatagcagctgccactaactgagcacctgctaggtgctgaacccagccctttacctgacactcctgctgtgtcagtgcagtctatacaggaggaaactgaggcacggagagattcatgaccctcatctggacacaagctctaaaatacttgagccttggcagaaatggctgatagagtccacagaacacgctgtcctcatctcagagaggagaactctgaacccagaggggaaggatttacctgcagttgtatggcaagccagagcctaaccagcctaaagaaaccatgggaggagaggctcttaccctctcctttgcagatgtgggcccggctgcctcacactccagagcag

SEQ ID NO: 230 - DNA, 470 bp, Homo sapiens
gtttggttgttattgttgtagaacgagcaacagaaaaacaacacttgtctgcctgagaaggctccggaaaaaaaaaaaaaaaaaaggaagaaaagcgacctcaaagagatgagctctcggctcagttgtcagcaaacaacaacactcccccgctcctccgctgggccatcctcccagccccagcccgccggagaggacagaccgacgcaccgacaggcccctctccccctcgcccgtctttgttacatctttagcagctttgtgcgtagctggcggcctcgagcagaatctgcacgttctgcagaaaagtgttgatgtgcttctccatcgagttctcgctggtgttgaaaatgtctgagaaggggcacctgggcttggccccagcggggtcctcgggcagggccgggggctggggcgcggccacggcggggggcacagccgggggcgcggcgggggccagccccgcgccc

SEQ ID NO: 231 - DNA, 609 bp, Homo sapiens
tatttattctatactgggctttggaatatgaaaaatggacctgtgtggccgggcgtggtggatcacacctgtaatcccagcactttgggaggtcaaggtgggcggatcacttgaggtcaggagttcgagaccagcctggccaacatggtgaaactccatctctactaaaaatacaaaaattagccaggcatggtggcgcacacctgtaatcccagctacatgggaggctgaggcaggagaattgcttgaacccgggaggcagaggttgcagtgagctgagattgcaccactgcactgcagcctgggcaacagagcaagtctctgtcttgcagcagggggaaggacctgtggtactcctacaaacttaacaactttagcttttcggggaacagtggtggtctccacagatagctagaatcttctaagatgaaaataaactgtttcatccagctgctttctgcctgttaacctttgccacttccattccttcaagtgtgtaatccccagggttgtcttgtattacacacatccttgttaagtaaatataccactgttgatttcttcttccagtgcaacatttggattaaataaaaatctttagtttccaga

SEQ ID NO: 232 - DNA, 447 bp, Homo sapiens
gagactgggctctcaccagaccaagtgagatgaaagcagagactgggctctcaccagaccaagtgagagcaccttgatcttggactttccagcctccagaaccgaggttctgagagctggaacatgtgcaatgtatacatgatgaagtaaagtaaaaccccagattctgaaggatgttcacgtacttgagatactcatccatggagtcatgaattcagaaactagtccagaatataagaaggctgcctattataaggctttacacaaggacttcattatgttatcaagttaagatgagttcatactagattatggtgggccctaggccaatgactgatgttcttaaaagagaaatttggacatcgattcaggcagagggacgatggctatgtaaagatgaaggcagagattggggggatgctgccacaagccaacaataccaaccac

SEQ ID NO: 233 - DNA, 1625 bp, Homo sapiens
atgaactatatcttaagaattcataaagccctaaaaagtaaatatttacaaccagaaatctttctgacaaagaaacaagattactcaaagtaagtagtagtttgggctccctggaaagaacccagaacttaagtgtcaggaaatgtggatagttctgaatgtgcccctggctggttgatgactctgggcaacttatgcagtacctctaactcatggtttatttacctgaaaaataagtgggttggctatgtctgtggtttgaaaggtgctctatgatgtcccagatgtcttagcagtgtatcattggctgttttggaggctgtcaggggtccagatggctgctcccactgagcctgcttttaacagagcttttcagtttgtatttcttgtatacacaaagtaatattaaataaaaaaaatataatccagctaagaaagtttgagaatactggcttgagattcaaaataaaataaaccaaaaattttagaaattatattagtctagaaagatagtattgtgtctctttgtctttttagtacctagcacatatcaggtacttgatacatatttatcatatgaatgcaatggttgtaatgaacaactgggaaggaaatgcaaaagcagaaggcaccatatttgtgttgctattcctgggtgtcatttctatgtaacttgtgataaccagtagtaaagaacaacatggactatgtttaatagacaacaactaattttattggatttgtgtacataatctgaaatttagtctaaggacaagccatattactataaattccaggaaatctagagagaaaaaatgggcaatttagaacagactagaagagtaactctttcagtttgtctggaaaaccgaatctaaggaataaggtcagtttgcagtttctttcaagtagaattggtgactcttggatgcagtttataaacacgtaacacattttccttgcatggaaatatatctattctatgacctcttctacatgaagaaaagatttgaaattttcttctccattaaataatgttttgtgtgcatgttgcaaaaataagagagaagcaagaataactctagcagatgcttaaaggtttaagattaaagacacatgtaaatgtgattcatagtgggtgttctgtgcacttgagtgaatattcccaaatcacagctagaaaaatttaggagtaaattgacttaacttatggtaaatcaataggggtccctgaattggagggaaacagatgagcaagaaaaaaattatttgacaggactccactaaggaaaacaacattcaagtaacagatgaggtattctactgcccagaggaattacccagcctttagcaaggcgaagtcagcctcaactggcaggaggtttgttttaaaactgaaatgagaaaaaggatctgggcttacaaatgatgggaagatatattatcaacagggaaaaaaacccccagaaaatagcaactaacttgtttccccagcacaactgaaaggatgaagaaggaaaacaatttaatgtaccctggtcatgcagttactttcctttatccttactaacagtgcttgtcaagatggttctggaaactgaataaatgtaagtaatgaatcatga

SEQ ID NO: 234 - DNA, 1824 bp, Homo sapiens
aggaaggaaccacatgtgaaaccacttacctgtttaaccctatgaacttgaagagaacatgtaatgccacttaaaatacctaagctcgggttctgccttcagcgactcctggtagtagtgcccttatgagccatttatcaagaagtgataggatcgcattctgtcacccagtctggagtgcaatggcatgaccttggctcactgcagcctcgatctcccagcctcaatcaatcctttcacctcagcctcctgagtagcttgaactacagctgaggatgctatgaaaaccccttgaggaaacaaaggcaccttgggggccattgagaactcctgacgaagagggctcagctgccagacctgctcaagaaagacctcagaaatctctatggggctgtcagaagaaaaggtttgaaaagggtctggagagactgaaatttgtctgccttggacttttcttttgacaattcacatccaacttaagcagaatcattgtttattcttattatgccaggtttccttttctggtctgcaggttctctagggtttcataggctagtagttggaattttcatatttccaaagcattggggattttgcaaaaacaaaatctaaaggatattcagcagcacagtttacttaggaggttttaatcataataatctgcataatgtatgagaatttctacctcagctgcctcctttctttctctttcgtgtctgggaaaaagccagggatttttcccttcctctgatttaaataccttataaaattttggtggaagcattttgtcctattctgtcttcctgattcattttctgctgtaatgagcaaaattaatttgcaagagctgctactgacatagtgtaataaactgggtcataggtagaatcagtgccgccttatgacccttagctgtcattgctttaaggaatttggcatggtcctcgaaggccagaaggcaatgtgggttgcatcctacagcttttgagatctcagagacttactgcacccatggctgggaatgaactgtaaatgctgacactggtaactaggtgccaaactgaagtgatcacaacctaatctgagccaaaaggcatttctttgcatcaggcataaagcaacatcaaactcccataacccacacacaacacagaaatcattactgaagagattcaacatcatcatgccagacactaagtgagttatttctctccttccctgtctcaccacagtttcctcccacttggtcacacatggtaagcattcatgtgtgcgaaggcattttatgccttcgacctaaccccgaccacagtcccctagtcttatcagagatctgcactccccaccatttgagcacgatggagtgcatatttccagtgcaaaaagactgatatcattatgattttcattaactagttgccagcttgcattcttttttctccctttttttctctctcaacagcacttctgtcctcagcccaaccccagccagaaaaggtgttgctacattcagtgaaaaattattattagtatagacatgaaatttgatgataatgtagattgttttgtgtcatctgcaggctgtcacaatacactctgcatcactgaaatgtgttgaccagaaggatgatggtgttgtcatgatactgaggtcttttaattaattactttgtgactttcatagcatttagaaaacggagaacagggtattttcttgaacagcctagccaaatgaaaaactggttactaatgtatgttatcttcatgaatgaaggcataaaataataaaaacaaacaaattaaaaattgttaataaattaataa

SEQ ID NO: 235 - DNA, 3360 bp, Homo sapiens
agtgcaggccgagccctgcgtccctgcctcgctgggtgggggtccggggcgcggctgtccacagggccgcctcctcctgcggcccgcggggaaggggcgcatcccaccccgctctgcaggccgcccttctgccagctgggaggcgagggcacacgtcctaaggctgcccaagggggagaggaatcgcgccggtaggagagcgcacgggaaccaggaacgcaaggcgggcacaggggagccgaaggagccagacagggcccggccacgcgccctcctcgctcggctgcgctccgtgacgggaacccaggctcccacgcacggggaatgcctagaacggagctagaatggaggcccctttgtgtgactaaatttggcaagaatatggatctgagccagtctttccacgtgtgctcccagctcccagctgagaaggccaagggttctcttccgggtaaggagacagggagaaagatcaaagagtttggggagctggatctgaaatgtgaattgaaaataaaaatcaagcctggacacattccagtttctaaagcaaaaccaaccctcagcagaggccggctctctatatagctctctttctttctctctctgctccctttgactcttttctgtgaccattcttgagcacatggtataaaataaagagaacatagggaaacagtttctctatatttcgttttggagtaattttattagggaaaatatcttgttcataattaccggtatgtgaagccgaatttccttagccgtaaatactgtcttatttcagcatgcttcgcactttcttctgcggccacatttgggaagagaacgttgacacaacacgtgtggatatgttcgttgtgtatagtggtcctttttttctacacatgatatggtgcaccgtatagttttctttcacagaagttagattctggaaaaccaatgttagtatttttatcaaagtacttactgtcacagttgatctctgtgatttgaaaccctctcgtcgatagactgcagagatcttttcctagaggccactcaccagtcagaaacctttgtgtttttatggttaaaaaactgtaggtcccttcacttctgttgttaatggaagtaactaaaagaaagagacagctttgaaatactgtgatacgaagagtcagaaatcctgggttggagatgggccctgccactccctctcatgccattggtaaccttaggcaagccattttaacctctcccagagtctgtttcctctctgaaaaaatggatataataataccgtactattaagtgagataatgcatatgaaagtatgtacaaatgtgaggtattattagtccatgaagcaaagacgatccttttaaggggacctgttaagttgcaaaaccaaaaacttctgaagctctagaaacccttaccacaggagcaaatggggacagtgttacgctctcgcgtccatgctatgaccatctccacgcctccatcagttgtgttacaaaggccaccaaaatcactgaagcagttgttacccccaagtgagtgtgatgagagaacattttcagaacagggtgaatgtgccttaactcgtgtttatgttgggctcttaatgaattcataaatgaatgaagaaaataacactgaaaacaatatcttcttgtgagacatttaacacacattacagcagctctgaaaacagtcttagtataatggcttgagaaagcagtaatgtttatgtggataaaatacccccaacaacagttgtaaggactcacaggtggggagagtgactagaaaggtatataagagttgtttcttgggactgtgtgagtgccacaaaaatctatgttttagaatagactgtgattatgtatcccagacagaggtatctcaagtttacaatgcagtaaagattattgctagggctggctgggaagtgacaggagtaccacaggtgtagtgcatagggcatttagctgaatgtacctcagtgtgatcctttctaacctaaggtaaccccaccaagggagccatttcctgggctcattgggagccattttccaatataagcttttcagtgtgacctgtatacaaagttatgaaagcagcagggctgggagatgggtggggttccagggttcctaggtccctttggcatggcccaaggctgcccagggtgcagactcctcctgagatgctccatctccttcagctgcctcctgccagaagcaaccctcagcctttgccaattgtatggaagggactctatagcaattttaattggcacttagaaagcaccttctattttcttttttcttttttttttttttttgagaaggagtctcactttgtcgcccaggcgggagtgcagtggcatgatctgggctcactgcaaccaccaccttccaggttcaagcgattctcctgcctcagcctcccaagtagctgggattataggcacttgccaccatgcccggctaatttttgtaattttagtagagacggggtttcgccgtattggccaggctggtctcaaatttcaaacctcaggtgatccgcccacctcggcctcccaaagtgctgggattacaggtgtgagccaccgcgcccggccaagcaccttctattttcaatgtaccttttcccaaatgtcctaaattaaaagtggatgctgatcaagttcactggtcaacttcaattcttcctttctcttttctttacagatgcagcctttttgaaatttattcttggccaaaagaggaagatagttcaaggattctatcttgcttttggggggcaatggagaaaccctgaaaacacttaaggaaaacctgaggccttctataagaaaataaactccctgaaaggggaggcagggccaaggaatttacttatttttataaatctctttcctgggtggatatggtaatggatgtgtttcttgaattgtggtaaatgtacctcataaaatggatggactggggctatattctcaggcttcctgggctctgttggcattgggcaagcacgtaatgcctggtttgaggctagaagccaaagccacaaccttcttgcagtaccaactgagccatagggagattaatgcagaacaaggtcgttagtctcattgtttatccagttactagccgcatagattttgtgtaaatttcagctacagtggttgcagcctgcctttgatgtgtgtaatctgtacattttagtgctccaggaaagtacctgattgacaagatctacatccaatgcccagaaaacacatcctacacaggcacagtgaagcgtggagttgaagaattttccagtgagttccatcaaagtaaataaaccaacctagagcatcag

SEQ ID NO: 236 - DNA, 464 bp, Homo sapiens
ctgatgtatgagctgcacagaaagttcaccaaaccacccaaagccattgccataggcatctgaactgcaagccagcacaagaagtcgatgctttcatacactttccaagatgtcagaacaaggttccaaatcataataagaattcactccttacctagaagtaaaaaaagaggacacacttttgaaccgctcacatgaccacaccattctgcggggacgtccttgtgttgaggggaggtctgaagtccatggaagaagacgcagtggctgctggagctcgtgcagaggaagggaccctcagaaggacaggtgaactgtcggtggcaggaaaaatggtgggcacatttccagaatgacaaatgggagaagcaatcgtgacatctccaggtgggggaagcataggaggaagaggttgttctctcaggaagttgcctcctagcctccaacgaggcctttcctatcac

SEQ ID NO: 237 - DNA, 305 bp, Homo sapiens
ttttggaagtggcccaccaccatcttgggagctctgtgagcaaggaccccccggtaacattttggcgaccacgaagggacctccaaagcgcctccatcagagagctccatccagacctagacttggacaataggcagttgtttgcttgcctctggctctgctcactctccatgggggtctatagctggtgatcatcttgtatacctaattctggcttcatcttcagactcggacaggaggcaaactgagctcctgaatcattaggatggacgcgccatcaacagaatctgcttttagtggaatgg

SEQ ID NO: 238 - DNA, 550 bp, Homo sapiens
ttacttcccccagtggaaaggaaaagggcccataggagctgaatctgactttgggaccctcagtgggtgaggtggtgagcccgcagtgacgtatgcaatgcctgtcacagtgcaggctaaaaccacaggctataaccaatagcagtaactgaaaaacaaaataaagctaaaagcagtgctgtacaatcagctccaggagattttccacattcatccttttcgcttacactctacacttacttgaatgcattcacggccactactactggaattccaaacattctggcattttcaatttgtttcttcaagttactgaagcctttttcaaccagctccaggttctgtaaaaacaacagtgaaaggcctatgagatcagagagttgaaaaccactgcaggttcttcttcaaaggcaaacaacctccttgagccagcagccactcactatcaggacaaggaggccaagaaagaagagagaaggtcccttggtgcattttttccagtgcggtaagagacacatatctttgactacatgactaaacgcagcactgg

SEQ ID NO: 239 - DNA, 1978 bp, Homo sapiens
caaaagagcaagtcagggaactagctttggttgggttcggtggtacacaaagcacaaggcctgggttggggttaggaggaaatgagacttgcggcgggtcggggctgaagatgtggcagcgccctgaacctggagaaaggctgaatccctttggtcaaggagagggagagagaggtaagggtctggtcttactttttaagcaggaagaagactacaaaccaccatctaccatctgccaggccctggaatttgaaccaccatcttctggagtgactcaaatgcagaggaagccaggcctgctgctaacgtttctgagaggcggcaagagtataaatggagatccacatatgtataaataaagagtgtgaatcaagctaacaaactgtttaataaaatatgatctaccctcttagcttgacaaatcaacttttcaaacacctggaagaacaagtttgcactcaggattctcagactcctcagagttctgcactgggatgtggaagggctgtgcaagccagcccttgggtccctgatccctgtctcctggcctgtgcccgtctcttctcagcctggctccaactcccattgagaggaagttcttgtacacatatgatactgcagcccttatgtctaatatttatccataccttctgcaaacagccactgtgtgaccacccttgggcttcccaggggtctgcaaactgacaatacagacaaagggaaccaaggcagaggctcacagactgtagaaatgggcttggggccatctgggcagagacttgtggaatcccagcacgatcactctgggtgctgtgtgaaatggatgaatagcaaggagctgcagccaagagcaaatcaacagaagcaccactcaaaatgcctcagtacccattacataaggattcttgtgattaattcttccccaaaatttagagccaagaaaaatccagctctcctactgagagttgtagattagagcttctgtttctaatctacaaacaaacaaatgtgtgcaatgtcttttcatgacaattccaactttatcataaggttgtctactaagaaactagtaggcaggtttctcttgttgtctagaccacctgaaagctcatagctgagtttgcacttatttgcagagtaaactgctcatttatcaatctggcatccaatcacaactttttagctaactgtatgttttcataaacacttttctcacacagtataaattttaaataaataacaatagcaattaagtagtaacaactcgagactggtatctgactagtggttctttcaccagtgtgtacactggaagttttgttttgttttttgatgtttgtacattgtaattgcaggacaggtagtaagaagatttcaaattcacattagctttgctaccactaaattatggtgactgttcctaatttgcaaacaaatgtatgcaatctctttttatgattatcccaactttatcataaggttgttatattttaagacatatgaaaagatataaagtataatacagtgaatacatatatatctaactcccagtttaagaaataaaacattagcaaatacagctgaagctccatgaattcccctcccaaatcatactcccttcccacccgcagagggaacctctattctgagcctggtgtttatcaccaccaagaattaaaaaaatacttttactatatatacacaagtatgtaccccttagaaatgagtagtagtactgttttgtatgtctttacactttaagtaaatggtataagttatttcttgtttttgctcaaaattgttgaaatttatgccctttgattctatagctgactttcactgtgagtcattccatcattatttctgtattcattctcctgctgaagtacatttcaggttgttgctattcctctgctgatccccctcccccaacacacatgcttttattaataaatctgctggaacattcttgcataca

SEQ ID NO: 240 - DNA, 570 bp, Homo sapiens
atcgccgccattttgggctgggaggaggcagcggagggactcgctgcgcacatcaagaaagaaaaccaaggcactagaaagcaagcacacttaagtattgaagataattacatcttaaattttgcctgaactgtatattgtagcatacttaaacccattcaaggaaaaaattggcaaattgaaaattctcccattaaagattgatatttttgcaaactgacaaatttaacgatttcggtacccctccccaaaaatgcagtcacataaaatatatcaatactattttgaattagctctagaaatcacactgaaactatgttacatttacaaatattaaatttattataactaaaatgaatttaattgttctcagatttggccaccttatagctccgtttaaggaggggatttgttaaaaacaaaaatgcattataacttggtcaaattactttcacattaaggaaaaaaacttctaaaaaggaaaacaagaaaagcaactcttcagtttcacataattaaaagaacaggagaaagcacgcaagctacatatagctaaatttacgaaaccaa

SEQ ID NO: 241 - DNA, 438 bp, Homo sapiens
cggccgcgccgcagaaggtgaaggaacagcgcgaggcacgcagccgccgcaccgtggcgcgcacgagctcagccggccggcgaccccagcgcgcccacaggacagtggcagccggaaagtgggttcctgcatggtaacaagaccttaaaattgtgtcactggagaaggacgtgcagttcccgctgaggagagacttggccactccaggacaacacaggactacaagtcaggaatttgaagatgaaaagtgctcaacagtgataaatcctaaatgtttcactgaacaacctttcagatagccttcttgaagtttgctgaattatggctataaggaccactccccacccctgctagatgaagtctcacttgcccaggttgcagtgagccgagattgcaccactgcactcaagcctgggtgacagaaaaagactccatctc

SEQ ID NO: 242 - DNA, 541 bp, Homo sapiens
gggagaccaaccttgtgcctccgggagatccactctcccacctggaaacgcacgggaagccaagcctccaaaaaagcgctgcctcctcgctccgcgttgggattatccggaaggaactcccaacggaggtagtaccactctaccctccgcacctcctcctgcatcagccggcctgaagtcgcaccctcctcctccggagaagtagagaaataaatttctcccaccctaaaccagtcttatgatgtaatcagcgcgatttcacttcctgaatttcgatgaattctaagacatgggcaagatcgggttgtaagacctctgagatttaaggccatgccctggatcatggtgaacttaccaaagcaaacaatgcctgtgagatggtcctgcagcagccaaccagtgaactcttttggtgacatcctgttcttgttgtataactttatattcctataaatccattaaggccccaataaagtttgtctctaagcgctgtgttagatctatatgactacatctagtaaattgtgaattttaagtaaat

SEQ ID NO: 243 - DNA, 606 bp, Homo sapiens
gtgcctgagtaagccccatgggaacacagccgtggtgggaagcagcttcccagcagccctccccgccatcgggagaatcccctgaggccatgagagggtctcagggaggtggacggcccatcaagtgagaaccgagggcactgtgcactcctgaatcctaggactcctcttagctgtgtcttgtctctacttggggtacaattaatagcagagccagtcatgtcctaccagcattccttttatacaggctggatatatgtgtcattgactaacaacatcaacaatgaaatgaatctgagaaaacaggaaattgagagcaagagaaaaaaaagttaattatactgattttgtataagacccctttgaacacatttttaaaaaatcaaatagaaggtgcccaggtccactgtgccttgtgaatatttgtcttgtatatcctagagatctacgcattcatgtgggaattgaaaaggacccacattttactagaagcatcgttcatttttgcctcaaaacaatgcccacatgtcagaagaactttcacaattcacaggaacagtgacctaattaaccaaccataaaattgccaaatccctacttctcatt

SEQ ID NO: 244 - DNA, 5008 bp, Homo sapiens
ggttaaaaacactgaagattgcataaagatcaaagagggaaatttaagggaattaatgggttatgattgcatttgttcagaatggttttggtggctcatgacaacattttgagagagagagattttaatggcaccaatggcagctaggataactagtttaaagtttagggcctgtgttaatagattttgctttctagtttcagaaagattctcttatagtactgttttaatctgtttttctaagccctctgatttatgtatatttaataggccacaaaataatgtcaaatatatggcataataaccaacaaatatttgaataagtgaaaggtactctacaaaatgctatgggaaagacaaaaataaataatatccctttctttgagggattaacagtgttaatatcccttgttttcatttgatttgaaatgccacttgcaagtggaatatgcagactaaatggtaaagagaaaaacaagcagcatcttttcatttcacttacagctcactgtatgaccaataatatgttacttgacctctcagcactccattctaaatccttaaatgatacttatttagcatttctaagcatcttgagatctcctcttaaaatatgctttgaactattcagtctaaatgctgctttctaaaaagctactagtttaaagaatgggaaatggtgttaatggagttaatcttgtgtaatttcagtgtgggttgtcaagaatacctctaagtaaagaaaatgactctaatcttcttaagcaattcattttctcagcaactttgaggcaggagttaatttactctgcctgtgtacataggccatctcttacaaaagaaaaattttactatggaaagaagtcagaatagccatgaaattatttaaatttagtctttagaacatattacaaaatataagatatattaaattgtcttttttgttagaaactcaactaccaatgtagaaataaaactcctgttgcaaggatggagtttagccatggagtcaaaacaagagctatttggttattttaaaagagaagagatcaaagagctggtcactccttaactaagggtgtttgggcagcaggatagggtgaagagtggagggggttgaactcaattctttatgcttttataccaagcctcccttttctaataagccttactggcatttccttagactagttaagtcaggattctgagtttttcagtacaatagggttttaatctgagctgatcattgtttccaatgcctcccctgtggcaggggaacataaaggactagtgttcttttctaaaaagggaagatggatattttttctataacctttataattccattataataaaatgaatgataggttataataaaatgaattttttgcatatgattttcaaaaggaaactaatttatttttctataaaatatcgcaaaggaatcgaatacatttttattctatgtaaataataatataattttcacatttaggaggcaatagcaaatctgggaagcagttattctaagttggaagagcattatcccaatgcattgaaaacatttgatgactattttttatgtcttctttattttgatgattataataatgttctaactgggtggccttcgtttttcactctagtcagtccatcttgtttactatgtcaattgttctccaaaaagtagaaatgtcattgttttggggccatagaacatttcagaagctttccagtatctatgcagtaacagtccaaacccctcaacataacacatttacacctgcaagtatggccccaaatcttcaagtggcttctgtcactactccatagtacataccctttgttacagctgtttcacaaatacaggttgaatatcccttatctaaaatgtttgggactaaaagtttcagatttcagatatgtttggattttggaatatttgtacatgtataatgagatactcttagagttgggacccaagtctaaacaaaattcatttatgtttcatatataccttatacacataacctgaaggtaatttatttttcccttgggaacactgaatagactatatgttgtgcacctacattttgactgtgacctatcacatgaagtcaggtgtggaattttccatttgtggcatcatgtcagtactcaaaaagttttggattttggattttgaattttcagattagagatgctcagcctaatagcaaatgttcccatgttatacacctcaacctcccattcccattggctggaacatctctgcttatattaaatgtcttttatgtgaaatctgtgttctcatagccttttgtatagttctctaccatctcatggctcacattgtattgtacttatttgattaaatatctggatcatctactgtgaattattcaagagcattgatctttatacctctggcacctatcagtgcctgacatataacagggttaaaaatgctgagtgaatactgcaaatataccttagcaaatttatttgctgaatacacatctcaagaaagttctgaaatagttatttcccctcatagaaagtttagagtattaaaattgggtatctttataatgctttttcttttgtaatactttcatctttgccttttattgaaatattaaatgcattgtagaatttgatttaaaatttagaacaagctgtcaggtatgataactagtctcatttaacaaatgaggattccagggcttgaagaagttaagtagcttcctctagattgtaaagagagtctaacctggccctttttggttttaagggcatgatgataaccacttgctctactgatttctaatggaaagtgcttcagttttccactttgcctagctagtgattatttaatatctgcttatctctgaatttatctgcatatttctaaaactttatgacattaaggaaagttggggaaaattcactttaagtgttgtaatgacaatagctatcaatcattgagtactgtgtactaagcattttatattttatcaacaagtacttacatgtgggataagtactgttattattttcattttatagatgaggacacatatagaatgcagttaggaaactagagaaagagaaaacatggagaattatctggaactaataagacagtaaagtacagatttaagaagttcagtgaatcccaagcagtgtaaattaaaaaactacattgagatacatcatagtgaatatgcaaaacatcaataataaaaagaaaaaccttaaaggcagctttaacagtatactgaatgaccaatatactcagcagccacagaacctctattcttttaaagcatccatgggacatttatagaaattgactatgcactggactataagcatatgcaataaaatttcaaatgactgaaaccatatgagtatattcttttgccacaacacaattaggctagaaatgaacaacaaaaagataacaggaaaatctctatatatcagaaattaagagatgcacttatttattttttgttttttgtgatggagtctcactctatcacccgtgcagtggcacgatcttggctcactgcaacctctgcctcttgggttcaagtgattctcctgtatcagcctcccaaggagctaggattacaggcgtgtgccaccatacccagctaatttttgtatttttattagagatgggatttcaccatgttggccatgctggtctcaaactcctgacctcaaatgatctgccagcctcagcctcccaaaatgctgggattacagatgaagagatacacttctaagtaatctatatgtcaagtaagacaaaatgaaattagaaaatatttttaagtcaatgatattaaaccatactacacatcaaaacttgtgggatgcacttaaagcagcatgtagagggagattatattcataaatgcttatggtagaaaagaaggaagtctgtacattatgtagctatgcacccatctaaagaagttaggaaaatgacatcaagtagaacatcaaaagaaagaaggaaaggataacttaaaacagaaatgaatgaaataaaaccagaatagaagagacgatctacaaatccaaaagttggtttgttgaaaatactagtagagctgacatacttgtggtgagactgatggaaataatgcagttacaactaaccaatatcataattggaaaggaaatcactataggtgctgtaaaaattaaaaagataatagaatattatgaacaattttctgccaatattattgaaagtttagataaaatggaaaattcatttaaaaatataatttgacagtattatgttatgtgaatactataatgataatcctgtaatcattaaatgaaccagtagtttaaaatttttccatatagggaaggtcagggccagatgtgttcaatggttggttctactagacattcaaaaaaataataattcaagtctacacaaactttcctgagattagaaaaaataaagaagagtccccccacctgtttcttactttatgagaccacacctaaaagatagaagactgctttgcaaccaagaaatccttcatgaacacctctttaatcacaagtcctcaactccaaggttagctttatttcaacttttataatacttttcttacttttcttgatagctttaccacccatgtattcattcctaaaaaatacacagttttgtctgattttgaattttatgtgaatggaattgtacatatctgtgtttgtgtcttccttgttttactcaatactgtttctgagatcaatcacattatttgttaatattttgtttaggatttttgcatctctatttcagtgtgtgtttggaatgtaaatttccattctcagactatcttttggcctgaatttggttacatgagtatatgttctaaaaatattacttacactttcaataaattttaaggacttttatattgttatgtatcaaattttttagaatgcaagaataaatattataaaacat

SEQ ID NO: 245 - DNA, 567 bp, Homo sapiens
agtcaagtatgactgccacagagaaatggtcccatccaggaaatcagatattgagtcctacctgagtttccagcaagaagctctggctttctggatctgtgcttctctggtagaggaaccctgaggactgatctactcttgcagttctaaaaccatggcccatgcctcgctattccctgggacacaacaatattgaacgtaggctagttaatagccctacaatctcctctaagtgttcgagtgaaaggaagagtcacatgtgtctcactttaaaccaaaagctagaaatgattaaacttagtgaggaaagcatgttgaaagtccagacaggctggaagcgaggtctcctgtgccaaacagcaggccaagttgcacatgcaaaggaaatgttctcgaagcaaattaaaagtattactccagtgaacacacaatgacaagaaagcgaaacagttttattgctgatgtggagaaagttttagtggtctggatagaagatcaaaccagccacaacgttctgttaagcctaaacctaatccagagcaaggccctaatgctcttcaattctat

SEQ ID NO: 246 - DNA, 2289 bp, Homo sapiens
agggtcgtaggggaccgcctggggatccccggacggctgcgaggaatgagcggttggctcgggctggtttcctccctccaccgcctgcttgtttcgccatgcccgggccggacggtggggctgcagcggcgaaagcgactgaagtccgggagcagtcgcatgagcttcccggtcaccaggaggccccgggaacagacacctcaccctgacattgtggcaggaacttctggattgctttccaaagtggctgcactgttttctatccccactgggcaggaaaacatctaagaaaggaggctccccccttcccttgcagggttaccagcaattaaaaagaagtactagagaggcaaatatcggcagtatacatctaagcgctggtcggaaaagaaggaactcagcccaagaacttgcccaatctgatactggaggtgccactcaagaaccactccctccaagatgttttcctggatttcctcagcctaaagtaatccctctttttcctggctataccatctggaacagatgacttccaaggacaccgtagcaaagaaaaagagaactggaagcccatgtgccttaatcgcttcatcctagaggaggaggataaccagtggagccttttctggatttctcactagaagtaaagaccaaatttccagaaggaacctgagagataaaaagtggttggctgctcctgacctgactcatagtgtttaactgaaccataccactagtgtatactagtgtgtgtgtatgtacatgcatacacacatgcacacacacattcacacacaatcctatggtatttggtgactttggatgcccagctcttgcaacaatttcctgctgtcattcttttccctttgaatctcaggggtgagcaaactaaagaaatactatcatcttactgcttttagtatattccatagaaaaggagtggctggagtcagtgtagatcaacccaagcagtacaaatctgccagaattgcagctcagcttccttacctccagcatgtgtacctttctgaagggtaggcccttaagccagacataagtaagttatccactctgtgcataactgtctgacttggcttagaagcatgaaaggggcagaaatgtaagatgggtaaagaagggcttcatctgaaatagggccatgatgattagctctctctttccttcctttggcttcattgctgtattccatgtgggtcttgatatcttgaaactggatgagatacccaaatagtcagtccctgaatataaatcatttccttgtacagaatcactgccaaactcagtatggttaaaagatttttaacacccagctgcagcattcactctggttagaattggccatttaaatttatttcacatatgtaagtatcatatcctttataatgcattcttaattgttgctcagttcttccagattgaattcctttaaaaaattccttatgtaatcttttaattctagttggaaaacatcacttgacagttgctgtttatacaggcatgcctcgttttattgtgcctggctttattgtactttgcagatactgtgtttttcacaaatggaaggtttgtggcaaccctgcgttaagcaagtctgttggcaccattttctcgacagcatgtgctaactttgtctctgtctcacattttggtaattctctcaatgtttcaaactttttcattatgattacatctgttatgtggagctgtgatcagtgatctttgatgttaacattgtaattgttttggggtgccacaactgtgcccagataagacagtgaacttaattggtaaatgttttatgtgttcagactgttccactgactagcccttcttcaaactctctcactctccttgggcctccctattccctgaaatacaacaatattgatattaagccaattaataaccctacaatgatttccaagtgtttaagtgaaaggaaagacatgtatgtttcaccttaaatcaaaagctagaaatggccaggcgtggaggctcacgcctgtaatcccagcactttgggaggccaaggcgggcggatcacaaggtcaggagatcgagaccatcctggctaacacggtgaaaccctgtctctactaaaaaatacaaaaaattagccgggcgtagtggcaggcgcctgtagtcccagctacatgggaggctgaggcaggagaatggcgtgaacctgggaggcggagcttgcagtgagccgagatcgcgccactgcattccagcctgggtgacagagcgagactccatctcaaaaaa

SEQ ID NO: 247 - DNA, 565 bp, Homo sapiens
actccactcccatgggaaatacccaacagaatcagacaggaaaccccaaagtgccactgaaaagcaattgagagccccactttggtacacctgatgggagcggagagttagagaggcaggaaataacctccactccagggtagaagtagacaggagatgggatggaaggtttctgcatgctgggactagctcaggtcaaagtccagaactccagaaaacaaggcctgcccccagctcagagcagctaccacagcacaaaatggtgtggaatccaggagccaggatgaagcgtaggggtagacggtggttggatagctaactggcctttccactgctctagcctggaactggttgggctggggcaggggacatgttggtctgagtatagattttgtcagaaaacccaggcaccactcccttgcctttgcggggtgattctaaaattggactgtggtaagggttgcacaactcctcaagtttattaaaatcattaaaatgtaaacttacaacctgtgggttttatggtatgtaaattatacctcaataaagctgtctaatatctgca

SEQ ID NO: 248 - DNA, 340 bp, Homo sapiens
ttatcttttcatctctctaatcattgagaaaaagagtacaaaaagccagattttgcagttccctattttgtattccaggttgaagagtgctctggctgtagagggtccccacgatctgtcatctagtaactcaccagatacataagatattttgcctgctatgaagccattggagaatcaggtccagctgtgtcctacagatttataccctcactttggatgcactgtgaatcttgaaacaagtatgtaaatagaatccagcccctctctgccacagcctcagagcaggattggtaactccaaaagacaccaggacacatcctaattttcttaaatttta

SEQ ID NO: 249 - DNA, 442 bp, Homo sapiens
tcctccctccctcggcgcagcccggcccaggggtctgtcctcccaggcccaggaaaggaggaaacccacttccgccgcgtccatgatctcccgcggcttctcctgactcttgcggctggcgctggcgctgggcatcgggacacggaactgggcagtggacaccaccctccctcgcaggcttccccctttcaactccgctcggctgtaaccgcagactcgtcactaaaacacccacctaagcgcgggccttggtttctcctctcttggactttcccgccttctctcttcccctgggcgacgtagctgcttggggacggaggaggcctcttcgcaatccattgccctgcttgttgggacagaggagtgcagttggcttgccaaggcagcatgggttaccagtccctgtgtaagtgaggtgtaaatacagtggcaacgacaacaa

SEQ ID NO: 250 - DNA, 710 bp, Homo sapiens
cagaaggcagagctgcgaatcaaatccagcaccagaattatggaacatttatcaacagcctaaaataaagacaacacgaggagaatttggttgcttatatagattcaaggtacaatcctgctggattctgggattacaggactgtagacaaaagagaaatcatcatggactgttcactggacaaaatttcatggagaggagaagacctttggcggttcatggatgttctataataagttaggtaactaacaggctaactttcttgagcacctacactgtgtagggcactgtactggtacttctcataccttctctcattcatataatcctctgaggtaggtgttatcctctctacagcagggaaaatcaatacccagagaaggggagagacgtccatggcacacaggagaggacagagccaagaatgaatataggacaccagtgccccaactcttaaccactaccatacacggttttataaagtaaattttaaaagtcgactttaaaacatgtatgcaacattgtgtccagtctcccaaaacaaaagaacaatgagcgttcccttttcccttgatgtgtgggcaggtctgtagagtagtacaagaagagattatgttctgcattctcacttcaacaagaaagtcctggtccaccaataatacctttaagcttcaggataattgtgaaaaggccaactagttaatcaaaca

SEQ ID NO: 251 - DNA, 505 bp, Homo sapiens
cactcaagtgggacagtaagattttctctgaggctggcactggtgcctgcctctgctccggggaatccagacgtggcacccggagttgggcctcatccatcctcagctttcatttgtgaccaagcctgactcagaatgggctggcagttttcctgagtacatgggagttagggcagagaacatgatgtggtgctggtagtcaacgcaagctggcacggcctcagccagaagactggagctaggagcaagcaaaggaacattgccctgagacagacatccatgaagaagcctgggatgaaagaccacatggagagaaaggcccaccatcattctgcaccaactaccaacggcgtaagggaggttgacttggatctcccaccccagttgactctccagctgaaagcaactgcctgagcccaaacaaaacctgctgaggaacctccctgctagcaaatggaatcaggagaaataataaatagttctgttgttttaagtcaccaactca

SEQ ID NO: 252 - DNA, 592 bp, Homo sapiens
attccctcggtggctaaatttaagccatttatactttatactttaaaacactgaaggtaggcctggccttctgtgggtttaggtgggggcagatcagcaatggccaagggagaatgtcttctctgtggttattcttcacagtgagacaatgaagaccccataagctaaaagagcaactgcatctgaggaggtacaatggcagcccagttctgaagcttcttcttagtggccagtagggactcattctgacccaacagaaacctcttaggttctgtagtgactaaagccaacagcctgaggcacgctgctgtgtagtggagaaagggcaggcagcgagcaagtgtgtacaaggtatatacgtgccgcacgctgctgtgtagtggagaaagggcaggcagtgagcaagcgtgtacaaggtatatacgtgccacatgctgctgtgtagtggagaaagggcaggcagcgagcaagcgtgtgcagggtacatacgtgctgcacgctgctgtgtagtggagaaagggcaggcagccagtaagtgtgtgcagggtacatacgtgctgaacgtgtccatctctccagtcagattgattcg

SEQ ID NO: 253 - DNA, 3105 bp, Homo sapiens
aaaataaggcatttgggatgccgatgttaaaaggagaaggtaatcagagaagaaaaaaggaagtcggtggagagttctgcgaagattttgaagatttctagcagagaagcagggggttctggagaagggaatagacttggccagatacccaggaagacttcctcaacagatgtcccatcatgctgagattcaacgcgacattttagagtcatgcaaccatgtgagaaaaaaagtcccagtaacctttgttggggctggagggcaggatcccgaggtcccggaggagctgctccacctcctccagccaggacagcgcgtgcctcaggacgtccagcaccaccttctggagccccgagacaggtgggctcacctggaggtgctgaagaaggtcgacctccttcttcaggtcatggctgcaacaggatattttcatgcaagcctgcaaagaggtgagatcatgaggagcccaggccctgtggccagaaatagcccctgacgtgaccttcgaggaacagcgttcttgactctgccacgaagcaggcagcgccacgtattggccgccttgggaggactcagtttttttcttttttaaaatttttatgttttgacaggtttttttttaatactctaatttggacttttgatggtcaaagcgaacccccttttaggtctatgaaaccccagagccaaagtaccatcaacagtttggctgcaatgagaagcaaatgtggctacttcttttttccattcgtcagaattcctgccaagatcaacacacaagctggtcggaaagcgtggtttcctgatttgaaagagtgctgacaagccagcatttgcacaaactccccaaacaggagctgctgatttccagagaaagcagaagccaccgcctgctctgataagccatgtcccagggtgggggccgcagggctgtggccaagtcctcccgtccctgctcctccagagtcaaaagcaacggtgtggaaaccgccttttgtggctgggccaaaacaagaaaatgcaaataaaaagcaggaatgtttctttggtttctctggaaataacataggggctatgaaaacaatttctttttggctggggatgcgggccgctcaaagtcagtaattgaagatgctcaggcatcttttttggacacgccaagttctcccgggaggcatttttttaggccctttgttttttcttctccaacaagtttctccaacaagaggaaaaagtggatagaaaagccaagcatttctgcccaacttgctccaaaaaagctgggcaatttcccaaataagccgcacaaaaattagacaaagagaccatttgtggaaagcgtaaggaggggccacctggcagctgtccagcgacgtcctcagcttctcgatgttctcggtggtctcctcctgcttggagttgctcagctgggtctctttctggagggtccactttttctgctgaaaattgatgttgtcctcagtgacctgggtaattttctctattaactggtgagaaaaagaaaaaggaaaaaaaaaaaaaagatgtaacatacaggggtggggggccctgagggaaggggaatgggagaggggagagatgcaacttaagtccctgtctaagcacgggaggacagaggtcctgatatgtcttggtgatggctgtcaagggggacgttggtcctgtcaccagggaatgagtcccagaatcagagattctcttttcttttttcttttcttttttttttttttgcgacggagtttcactcttgttgcccaggctggagtgcaatggtttgatctcggctcaccgcaacctccgcctcctgggttcaagcgattctcctgcctcagcctctgaagtagctgagattacaggcacgcgccaccatgcccggctaattttgtatttttaatagagatggggttttaccatgttggtcaggctggtttcgaactcccgacctgaggtgatccacccgcctcggcctctcaaagtgctggcattacaggcatgagccaccactccttgccgatcagagattatttttatgatccaaaggcctgtcttgtggccctgagtttgttccagattcttctgtgttgtatagggattcagaacactgagcctgatattatgggctcataagcagcaggtcaggttctcccacacccactgagagcagcccacggcacattttcccatctgtgctttgacacagggggctagaaagtgtagtggaagaacagcaaggcaatcattacagccagacatccaccctcactgccactgtcaacttttctcctctgaaggaacgcgccagaacgcactggctgtggggaggcggctccctttctcccagtgctaatggaggcgaaacatgcatgtctggagaccagaagtaagcccgaatggtttaatttgattttcacagacacatttcaagggagttttaactggcttttactttaaaagccaggaaatcccataaaatcaaaacaaatctttatggtgtagcaacagtgtgaaaaatatgccaccaacaaaaacagaaacatatgctcccagggtctggaatccagatccacgaagaagaagaagaggaaagtgaaggagccacgtggcagggacggcagactaacctgttggtcggtgacgggcttgtcccggaacggcttcgcccgtccataggtggccttgatgacttgacttctgaagtgctccagctgcagcagagagggggcaacagtgtcagggggtcagcaggggccggcaagtgggggcagcgtttccatggcagggtgcgggaaacaccacttagcagggtttgcacgcctgaatgaccattccgcgttatcagaatcttcaccgctcacggggagtggcgggacccacagaagaaaagagaacagcaggctttaattactttttaggcacgcctgcctaacccgaacgatgcctgtggtcagtgcacacacatgtctcaaaccctcagaagagcctcttgctgccaattatccaatgggaagtctggggccgggagcgctcttccgtaattgctaagttggcaccagactgtgaaataaatattgaggctgtcagtcc

SEQ ID NO: 254 - DNA, 1771 bp, Homo sapiens
ttagtattcagagaatgacctgaacttagctgtgttaagttgcctgctccacaggaaaccacctctgtaactgttgcttgctgctttctctttaggcaacacccaaagccactgtcagatgtcatggagatgagacctcacaagcctactcaacgtgaagatgatgagaatgaagacctttatgatgatctgcttccacttaaagaataaaccctgaggtatcatgaagaaatccatatgccctgaagttaccatcctagagacatcatttggagagactacagtgcacagaagtagagaggcccagctgtgcctgtccccaactgatggagtcttctcagtgtcagtcaccagacatttgactgcaggtaactgaaactgcggaaagtgaaactgcagataagagggaccactgtaaataagtgacatgaatgatactgcaaaggaccatagcctaaccagccaagcaaactggaagtacctttagactcacgctttgccaagctcagttccagaatcacatgatgaaaagaatgatggaaagaaaatgtttgtgatattaaaattaaggaaattactccaactcagagtttcatcctaaactgagagaccaacatcaaaagaatcttctcaagtttctgagtgacggcaagaaactagactactgttaccaaggaactttttaaagcaaactgcttttgctgatatgaggagaaagttaattaataagaaaataccttaaatgtgttttgaagctgttaaaggtgtgtaacaattactctgaatttattatagcaccagttagagacccaggaaaactataaaattgcacatcagggcagagctgagagacgacatctgctttgggattgaaaaaaaaaaaaaaaaaaaaaaaaacagaaagggaacaagagaaatagcaagtcatttaacatttggaattcaggactccagactcatctataggaccaaactgctcttgaaatatactagatttcctttagctccagaggttttgccttcatcaaatgcctgtaacactcttattgtcaaaaggaataagtgatggtgaacactgtgccagataggaggtaccacacacaggttcagcaaaaagcagaagcaagaggtatattttttgttagatcttagttcatccctatgtaacagacatttcagggaagggaggagaaaataacaaagctacctatgagcaaaggtaaatgggattccctatccttgtttcccagtttcggtcatggtattgcttatccattattagttatccactgctgggtaacaaattactcccaaacttagcagcttcaaacaacaataaacatgtattatgtcacatagtttgtttcagaactttgggagtggcttagctgaatggttgtagctccaggtgctttttgtggttgcagtcaagaagtcagcccattcacacagctgcagacaaaaggactcggttccttgcaggctgaggcctgattaggcagggggcctgagtgtctcgccacatggacctctccatagggctgcttttcgtggcatggcagctgactcccctcagaacagatgatcaaaagcagcaaaagagaagcctcacatgacttttgccctagccttgggaatcacactcttccatttctacaaaatcctattggttacatagcagccctatccagtgtgggagggaactgtatacaggcatgaataccaggagtggaaaaccactagagactggctaccatggtcacttacacac

SEQ ID NO: 255 - DNA, 450 bp, Homo sapiens
cagcaagatggctttgaaacgctttcacaacgaaggtgtgctccactgggcaccacaacatacggttcagacgtttaaagcctgtctcagcccaatttcctctccatttgctccctgggtaaggtatccccccttcagtgcaggcagaactggcgacttgcttctaatcaacaaaatatggcaaagtggtggagtctagaagtctgagatcagggcaccagcctggccgagttctgatggcgtctcgctttgtcacccaggctggagtgcagtggcgcgatctcggttcactgcaacatctacctcccaggttcaagtgattctcctgccttagcctcccgagtagctgggattacaggcacccaccaccacatccggcgaattttttgtatttttagtagagacagggtttcaccatgttggccaggatggtcttgatttcctgacctg

SEQ ID NO: 256 - DNA, 487 bp, Homo sapiens
ttcattttagaatgttatcttggtatgtttaaaaggaaaaacttaagatgtgttgcaattgcagtatgagtttcaggtatgtacatgttatgtgtgtgtgtgagagacacacacaaacacatttcaaacatgttttatgtttaagctcaatattcaaacacagaaatataacatctattcttaatatgttttatgtaagtacagcagcagcattattaaatactgtatttctatggtgattgaaaattagtaggcagagaatttttgtaatggttcttaataatttttgtaatagtaaatgattactttttgtttagtatagttttataatctatacatgaataaagtggatatttctattcatatagaaatgtgatttactctcatgtacttatctacatgctaaaaccataagttatcaattttagttctgtgccaaggcacttttactgaataaaaataatcagctaattttatattttcctga

SEQ ID NO: 257 - DNA, 6719 bp, Homo sapiens
gttgtcgtaggggcccggtccgtgagggactgctaaggaagaggctgcatggcgcggtagtcccccgagtggaggtcggctgcccctgggaaaccagagagtcggagggagtccatctggagcggccaagtaggtcggggaagggccgcgcctgacgtctggccgcaggtggtgactctcaaaaggaaataggatcatggcagcagatgatgacaatggtgatggaacaagtttatttgatgtcttttctgcttctcctcttaagaacaatgatgaaggctcactggacatatacgctgggttggacagtgctgtttctgacagcgcttccaaatcctgtgtaccatcaagaaattgtttggacttatatgaagagatcctgactgaagaaggaactgcaaaggaggcaacatataatgatttgcaagtagaatatggaaaatgtcaactacaaatgaaagagctgatgaaaaaatttaaagaaatacagacacagaatttcagcttaataaacgaaaaccagtctcttaagaagaatatttcagcacttatcaaaactgccagagtggaaataaaccgcaaggatgaagaaataagtaatcttcaccaaagattgtctgagtttccacattttcgaaataatcataaaactgcaaggacatttgatacagttaaaacaaaagatcttaaatctagatctccacatttggatgattgttcaaagactgatcacagagctaaaagtgatgtttctaaagatgtacatcatagcacttcactgccaaatctggaaaaggaaggaaaaccacattctgataaaaggagtacttcacatttacctacatctgttgagaaacactgcactaatggtgtttggtcacgttctcattatcaggttggcgagggtagctcaaatgaggatagtagaagaggaagaaaagatattagacatagccagtttaacagaggaactgaaagagtacgaaaagacttaagtactggctgtggtgatggtgaaccaaggatattggaggctagtcaaaggctacaaggacatcctgagaaatatggtaaaggtgaaccaaagactgaaagcaaaagttcgaagtttaaaagtaactcagattctgactataaaggtgaacgcattaactcttcttgggagaaagagacccctggagaaaggtcacacagtcgagtagactctcaaagtgacaaaaaactagaaagacaaagtgaaagatcacaaaatataaataggaaagaagttaaatcacaagacaaagaagaaagaaaagttgatcaaaaacctaaatcagtagtaaaggaccaagatcactggagaagatctgaacgagcatcacttcctcattccaagaatgaaataacattttctcataattcaagtaaataccatctagaagagagaagaggatgggaagattgtaaaagagacaagagtgtaaacagtcatagttttcaagatggaagatgtccatcttctctttcaaacagtagaactcacaaaaacattgactctaaggaagttgatgccatgcatcagtgggaaaatacacctttaaaagcagaaagacatagaactgaagataagaggaaaagagaacaagaaagcaaagaagaaaataggcatattagaaatgaaaaaagagtacctacagaacatttgcagaagactaataaggaaactaagaaaaccactactgatttaaagaaacagaatgaaccaaagactgataagggagaagtccttgataatggtgtttctgaaggagcagataataaagagcttgcaatgaaagctgagagtggtccaaatgaaacaaaaaacaaggacctaaaattgagttttatgaaaaaattgaacttaactctttctcctgctaaaaagcaacctgtttcccaggataatcagcataaaataactgatattcccaagtccagtggtgtatgtgattcagagtcttcaatgcaagttaaaacagtggcatatgttccctccataagtgaacatatcttgggggaagcagctgtcagtgaacataccatgggggaaaccaagtcaacgttattggaaccaaaggttgctcttctagcagtgactgaacccaggatcggtatctcagaaaccaacaaggaagacgaaaatagtttgttagttaggtctgttgacaatactatgcattgtgaagagcccatttgtggtacagagacttccttcccatctcctatggaaatacaacagacagaatccttgtttccatcaacaggaatgaaacaaaccattaataatggaagggcagcagctcctgtggtaatggatgtattacaaacagatgtgtctcaaaactttggcttggaattggataccaaaagaaatgataattcagattattgtggtatttctgaaggtatggagatgaaggtggcactttcaacaacagtgagtgaaaccactgaaagcattttgcagccttcaattgaggaagctgatattttgccaataatgctttcagaagataataacccaaaatttgagccttctgttatagttacaccactggttgagagtaagtcgtgtcatctggagccttgcttacctaaagagactctagattcttcacttcagcagactgagttaatggaccacagaatggcaactggtgaaacaaactcagtatatcatgatgatgataactcggttttgagcattgaccttaatcacctgagacctattccagaagccatcagtcctctgaatagtccagtgagacctgtagcaaaagttcttagaaatgaaagcccacctcaagttccagtgtataataacagtcataaagatgtgtttttaccaaattcagctcattctacctctaagagtcagtctgatctcaataaggaaaatcaaaagccaatttacaaatctgacaaatgtacagaagcagacacatgtaagaattcaccattagatgaattagaagaaggagaaattagaagtgatagtgaaacatctaaaccacaagaaagttttgaaaaaaattccaaacgtagagtgtcagctgatgtgcggaagtcaaagactatcccacgacgtgggaaaagtactgtgtgtttagataaagacagtaggaaaacacatgtaagaatccatcagaccaataacaaatggaataaaagacctgataaatctagcagatcttcaaaaacagagaagaaagataaagtgatgagcacttccagcttggaaaaaatagttccaattattgctgtaccctcttctgaacaagagatcatgcacatgttacgaatgataagaaaacatgtaagaaaaaattatatgaaattcaaggcaaaattttcattaatacaatttcacagaattattgagtcagcaattttgagttttacatctttaattaaacatctcaacttacacaaaatctctaagtcagtgactaccttacagaagaatctctgtgatattatagagtctaaacttaagcaagttaaaaagaatggcatagttgatcgtttatttgaacagcaactaccagatatgaaaaaaaaattgtggaagtttgtagatgaccaacttgattatttgtttgcaaagcttaagaaaatcttagtatgtgattccaaaagctttggaagagatagtgatgaaggcaaacttgaaaaaacaagtaaacagaatgcacagtattcaaatagtcagaaaaggagtgtggacaactccaacagagaattgctgaaagaaaaattatcaaaatcagaagaccctgttcattataagtctttagtgggatgtaaaaaatctgaggaaaattatcaagaccaaaataactccagtattaacactgtaaagcatgacattaaaaaaaattttaacatctgctttgataatataaagaactctcaatccgaagagcgctccttggaagtacactgtccaagcaccccaaagtcagaaaaaaacgaaggaagcagcatagaggatgcacagacatcccagcatgcaactttgaagccagaacgaagtttcgagattcttaccgaacagcaagcatcgagccttacttttaatttagtgagtgatgcacaaatgggtgaaatatttaaaagtttgttgcaaggttctgatcttttagacagcagtgttaactgtactgaaaaaagtgagtgggagttaaagactccagagaagcagctgctagagactcttaagtgcgagtctataccagcttgtacaacagaagagctagtttcaggggtggcttctccatgtcctaaaatgattagtgatgataattggtcattattatcatctgaaaaaggtccatctctgtcttcagggctttcattgccggttcatcctgatgtgttggatgaaagttgtatgtttgaagtgtctactaacctacctttaagtaaagataatgtgtgtagtgtagaaaagagcaagccctgcgtttcttccatacttcttgaagatctagcagtctctttaacagtaccatcgcctctgaagtcagatggtcatctcagttttttaaagcctgatatgtcgtccagttcaactcctgaagaagtcattagtgctcattttagtgaagatgccttacttgaggaagaggatgcatctgagcaagatattcatttagctctggagtctgataattcaagcagtaaatcaagttgttcttcttcctggacaagccgatctgttgctccaggctttcagtaccaccctaatctacctatgcatgccgtcataatggaaaagtccaatgatcatttcattgtgaaaatacgacgtgcaacaccatctacctcttctggccttaaacagagtatgatgcctgatgaattattgacatctttgcccagacatggaaaggaagctgatgaaggaccagagaaagaatatatttcatgtcagaacacagtttttaaatctgtggaggaattggaaaactccaacaaaaatgttgatggcagcaagtcaactcatgaagaacagagctctatgatacaaacacaggttcctgatatatatgaatttcttaaagatgcttcagataagatgggtcatagtgatgaagtggctgatgaatgtttcaaattgcatcaagtatgggaaacaaaagtgcctgaaagcattgaagaattgccttcaatggaagaaatctcacactctgttggggaacatcttccaaacacatacgtagatctaacgaaagatccagtcactgaaaccaaaaacttgggggaattcatagaagtaacagttttacatattgatcagttgggatgttctggaggcaatttaaatcagagtgctcaaatattagacaattctttgcaggctgatactgtaggtgcttttattgatttgacacaagatgcttcaagtgaggctaaaagtgaaggtaatcatcctgcattagctgtggaagacttgggatgtggggtgatacaggtagatgaagataattgtaaggaagaaaaggcacaagtggcaaacaggcctttaaaatgcattgttgaggaaacctatatcgacttgaccacagaatctcccagttcatgtgaagtaaaaaaagatgagttaaaatcagagccaggatcaaattgtgataactcggagttgcctgggactttgcataattctcacaaaaagagaagaaacatttctgatctaaatcatcctcataaaaaacaaagaaaggaaacagacttaactaataaggaaaagaccaagaaacctacccaagattcttgtgagaatactgaagctcaccaaaagaaagccagtaagaagaaggcccctcctgtgactaaagatccctcatcattaaaggcaaccccagggattaaggattcatcagcagcacttgccacttctacaagtctttctgcaaaaaatgttattaaaaagaagggagaaattatcattttatggacaagaaatgatgaccgggaaattttattggagtgtcagaaaagagggccatcatttaaaacatttgcatatttagccgccaagttggataaaaatccaaatcagataagttgctgaattcctgggactcttaactgatattgcatactacacagaagcttcaaattcctcatgttttaaatgagcactagagggaggtttatcacctttttggttaccagatgataatctatatttgttattactcagtgactctctaatttcacatcagcatgttcagcttgtgctagtcatcattctgatttgcttatctgtttttggtcaaaatatttatttttaaacatgttagaacttaccaaaatgaaagcaacagtgatgtattgaaatcttagttttgatattttaaagaaatgactttctagattaaaaaaatagttttgtagcattttaaacttagtgactatttagttcaattgttcatccattttttatttgcttttataattgcctccttgttttggtatattgtaaaataatttaaataatgtatttataaatatgtataattatgatgtaaaataccgtgtgtatatgtatgtatgtgtgtttctgtatatgcacacacataaacggctttgcctagccaaggattttttttatctgtataaaactttttgtataaagtttgctttcaataacagtaatgtataataaaaccatgtaaagttttgttgta

SEQ ID NO: 258 - DNA, 1561 bp, Homo sapiens
aaaactcagctttgcccctgcacggagtttcccttcgcggggcccgctggggaagcatccgcggcttgtggtggctgtggttttgtgcccaggactcacacgtaaaaggagctcattcggaggcaggggcacgcgcttgtccccagaactcaaaccccagagtccctccggcagatgagagtggaggttgtaaatcaccctccatgcaatggttcatcataaaggatatggagcaaaattagaggaggcacgagaaggaaagccggtgatgaacaaggatttgcctcaactacagagacagcatggaacacgccctcctaggctgcccacatcctcatctgcatgggggcacagaagcctggccattcatcccatgggagactcaggacatgctcccagcaacctgatgggctgcccaaggcttggctgatcctgcatccctgcatcacatctcagcttctccctctgcccaaatctacttcctccccattcctttcacaggcattgattccctgataaacaccttgcaccccatattccatctcagagtctccttgcagagaacccaacctgtggcagagctggtctcaggactcggagcgagggagcagggaaagaggacaggaaagcagggagagtcaatttaagggtatgttgtctgagacaaagattctgctaggacctctgagatgggtacaagatgcctggagccattcactgggcagtatctgtccatcagctcccaggccccacagaaccggagctgcctgtgagggctttcactgccctgcatttctgggcttcacatatgcactggctgagagggctccctgtcttcaaggacgatcctgagcagaaagtgggtgcacttgaggtggcatgctgttgcgagagtctgagctttatgagaagcagacccagggggcatggtgtggggcatcccaaaggacctgccatacattaggtgccttggtcttggggaggagccctcgggagttctgagggtgggagaagaggtaggtggggttaatcctttcccattccctccctgcctcagcaccatggctcaggcagtagcgctgccagctcctcctgggatcagagttatggccctgctccccttgtcccttcaggctgaggaacataagggcttcccatggttgctggtgtctgagtgcctcaacctcccttgctggttcctttcccctgcccacacctttgtcaatagttccccccactgaagtctctttggttgagcagttggtggggatgctgactgataaagtggtctaggccactgctcactgcttaaagccttgcttcagagagaccttccagggccctgcagctcccccttctccaacccctccaacccctccaacctttctctctcccagctggtctgggttccctacggcatctacttgcttttgaatctatttcttatagatacatgtgtgtcctcctctttcacagccttaccttttcatatggaggaagaaaaaacccatttctataaagctattaaatgttttcctttcacaaacaccagttttgtaca

SEQ ID NO: 259 - DNA, 5131 bp, Homo sapiens
accagaggctgggtctaattagttgagaagcagtgacacccccaaccactccccaaacaggctggctcccgtctccaggccccaaggagccacacctggaccagaccccaggaaaggtaagcaccaacggcagacctgggatccgtgggtgggggcctctgggaatttccctagggggatgctgcatctgggggtcttgctgtcttgctaactggctctgtccctttctggacacagattctctgggtctcagtttccccatctgtacaggggctggagtcaatgatctctaagcatccatccagctgatcggctctagttctatggtcctgttggcttctaggattccttgttgttgtagtcaattgggggaagaaggtgcagagggagtgcacagagttaacatcctatcagcccaagcttcacctcggcacccgagtctcaggcagtctccctggcttctacataggcagtgcttcttcctcattgtgtggggctttgattttgtaattccaagagcctggggctcctggcaaggaaaatggttttcaaataatggtttcgagaaacaaagctggggaagaggcaatgtaagctcaggctctggcaggcaggcagagatcctgggaaggctgggtgctgactgcacatggagcaatgggaagggatgctggtgagaggagacgggggcacttaagctccggccccagctctgctctcagtgcccggctctgtggtcttgggctggccccctcccttctctgggccatagttttcccatctgtatagcaaggccattggacaaaatggtccctctgcagatgtggcttctgagttgtttgtgcctgagggacagccagtgttgggaagttcccccaggaggtccctgagccgagtctgaactttgaccacaagcttggagtccaagcagatgaagtcctgtgggagcttttggaggttgagcctgagtgagggagagtagctgaaggttctgtgactgaaggcttggccagaggggtgccccgagccctccagatgaacttggctgcaaccagcctctggtggggaaaggactgatctctggattcaaccacacaggaatgtgggacatggaagtaggtaagggatggaaaagatggcagagggcttcgcgggatgaagcagtggggccaggggacttagaggaatgcaggaggcatgggccactgcactcagccaacacctatccttgaggaatagaaagatccaggctccacaccacacaccatcactgactcaagtggctgttctgattcccagctgagcctgaggggttcggggaggtaatctctgaggtcctcactgctgggccgtgcctgggcatggcctcttcctgcaattttccaactaaactctccgggggggctcagcgccatggggtggttcgaagaaccatgatgaaggctggttcgaattgtgatgaccatttttgtccacatctcctaggacccataagccagagtttctctggagcttatagctagaaggggttctgggtcctggagtgcaggcctgtcaactttacaggagagcactagattgctttctgaagtggctgaaccaggttatgcttccatcagctgtgtatgagcatccccatcttcttgaccacacttgaagccatcagtttccttgaagcatatgggttgcacacttcattttgcatgtatcaagtttatataataaaaaatgtaaggaagccatggaaataaaaacgtaggtgtgccttctgtaggctgctacgctcctgtgcacgagggcgtctagaactttgccctccatgcacaagttgcagagcaccctcatcaggacatttacgaaggccctggggtgggatgggcactgcctatgtggccctcccccagcccagcagtatgcagtggcccgggtccaatcaaaggtcgcctgggagggtgagttgcaagaatctggggaaaagagcccaaggtggctgccgcctgctaacagcttgtctagacaggccccatggggcttcaccgcacattgcgagagctctggccagccccctgcccacttgcaaaagaggctgttggcagcaacacttcaccactagaaacctttactccaattcgaaacatgccttaacgcacagtgtgaattacccactctcgtggcccacagaggttgactcattcaggcccccttttgttcagatgaggaaactgaggctgactccgaagcctgggggctttcagatgtggagtgggtccctgtgcccaggtgatgaggggaccaggcgggtctggagcagggctggagtggggctcagatgtagtaggctggcagttaaaggtgccagatgtgagccaggctgctgggtttgaatcctggagctgcctcatagcagcagtaggactttgggtaacttacataggtgctgtatgcctcagtgacctcatctgtaatatagagatgataagagtacctgtctcattggtctactgagttgtccggattaactcattaaatgagttaaaactcatgaagcccttggaactgtgactgacacatagtaagtactcaataaaaaataactgctaagaccagccacagtggctcacacctgtaatctgagcattctgggaggccaaggcggaagaatcccttgagcccagtatttcaagaccagcctaaaggtcaacataggcagactctgtctctactatacatttttagattaaatttttataataataataaccactaaaatgtgattactaaagacagcttcttcacagtacaaagagatgctcttctgagtaccaactctttggaggataaactgcccttataccttcaaaaataacacttgccatatatcaagtcctttcaagtacctggagatttacccagcactctgagataaataccattatccctctgggcacacagaggctcagagaggtttagtcatttgcccaaagtcacacagcctgtacgaggccaggctgggactcaaactcagttctgactgattctaaaatcatgtgtttaactgctgcactctaggaccacccgcaatggatctgtgaaccagaaccagctctggttctgacctgcctagtagggcctttggcatttgggggaggaggccattggaagtccgaagcccccttccagattaggcatgattgcagtaagagaagagacagaccctttggccccccacccctgctcaggctcaaaaatgcagaccctgccgaaacagtccttctcacccagaagcaccccatagggtgggctgagtaaccttgggggcctcgtcagtcttgggctgccccatgccctgcacagcccgcctgaggtttgaggaaggggcagttggctaggcccagactggagaaagccaccccaccatggctcttctgcaagaacccccggccagccacaagcctaagccccctccttaaaagctcctcctctgaccttagctgtgcatcaagggagaaaagaaagctccaggccgggtgcggtggctcacacctgcaatcccagcactttgggagaccaaggctggcagatcattaggtcaggagttcgagaccagcctggccagcaaggtgaaaccccatctctactaaaattacaaaaaattagtcaggcatggtgacacgtgcctgtagtcccagctactctggaggctgaggcaggagaattgcttgaacccaggaggcgaaggttgcagtaaaccaagatcacgccactacactccagcctgggcgacagagcaagactctgtctcaaaaagaaaaaaaaaaagaaagctccaaactgctctgctgccacatactctactcctcctgtccctccaaggaggcagggatgggggtggagtgtctagagggaggctgcctgctggcctggggagggatccacagaggctatgacaccacccctggctgggctactgggctcagaggcccccggtcagcctgcccagagcctgccagccaccaggcatgtgacccaacaaccccgatgagctgagcaaggcagggtgaaggagaaagaggctggctaggaccaggccctggctctgcagccagcacaactgggtaactgtcccactcctctggggcctcaggccataatgttccctggtttgggacagaggggacagttgaggtcattccatgtgtgatagtagacacctggattctcagagagggaaaatctaaggagctgggggcgcgccctggatagacagagaagaagacggcattccaggtggagagctctgtgtacaaaggtatggaggcaggattgcagaggcattttcagacaacagcagagaagcccagttggctggaaccgagagttggtctgaagctcagtgaggctggaggttggcgaagcagagaaggcctagagtgtgcggtggctttggcaacagaaaccaaagcctcagagcttgggaaaagttctccttggtatctgtctgtccctgggagggggtgcctttctttagcctatttgtccccctccccaaaataccatcagccaagaaccccagtgcagggcagagacctaggaatttggataatgggcaactctgagatgtcaggcaatggggaaaggagagctcaggtgggactaggaggggtaggaagcccgagggctgcagtcaccatcttcagaccactccagagcttcctggggagcaggaacagaggacaggccatgaagcccagaaaggcagatggcagcagaatactaggaagacacctccaatagtctgtccaaagagggtgaggggattaggaagtacagacatatcctgagttacaattttctattttaaaatgctatgaaagctatatgcatttggtaccctcctcaacttatgacgcagttgtgatggggttataaggttacttcggataaaccaactctatattgaaaatatcgcaagtcaaaaatacacgttcgggccaggcgcggtggctcacacctgtcatcccagcagtttgggaggccgaggcgagcagatcaggagttgaggagttcaggagttcaagaccagcctggccaacgtggcaaatacccatctctactaaaaaaaaaaaaaaaa

SEQ ID NO: 260 - DNA, 744 bp, Homo sapiens
cacaccttgtgcttccatagaattgtcggcctctgcaacaggaaagagcagctctggggaagtcgctggtgctgacaacctttgctcacacccctactgggtccccgtctgcatcctccaacaccctcatcctgcttcctttacatagagttcattctcaaggaatcttttggcctgatagtgaggcctcctgcaaggagaaggaaagtcagtgtctgaatctgtttgggcggctataacaaacaccacagaccagaaaggaacctgcagaactccaggaaccaaaattgctgctgtaaaattggaggttgactaggaaaatgccttttcctatcaagtcacgtgtgctggggcatgagccactgcacccagccttttaaaaaactttttggccaggttgttttataggctcatgcctataatccctgttctttaggaggctgatgcaggtagatcctttgagcccaggagtttgagaccagcctgtgcaacatagtgaaaccccgtctctacaaaaatatacaaaaattagtcaagcatggtggcatgcacctgtgatcccagctactgaggaggctgaagtgggaggagttcttgaacccgggaggtcgaagctgcagcatgctgagatcacgccactgcactccagcctgggcaacagagcaagactctatcttgaaaacaaaaacaaaaacaactttcaaatccagctcttttggcatggcaaggcacagactgagagat

SEQ ID NO: 261 - DNA, 421 bp, Homo sapiens
aggtgaaagaaaactaaagaaataccagtgcagaaaggaagttctttattttcaggttgctcaagctaaaacaataagcagcatttcatggatgactggcatgtcgccttttactcctcaaggcagactcaagagttttcccagaaacagaggacgagccccttggccatgcagccctaagccaggctgatccagccttgtctcgcccctctctgcaagagactcgtgggtacaggatgattgagggggccccagcctccccagcagctgctgacttgcgcttggaaattcaatcctctcaaggcaagaatttctgacatgacatgggaaaagctgaagaagtcagtctttggggtgtgttttcatctaggaggtggcttgagatggattcatggcaaatcacaataaattatttatcaga

SEQ ID NO: 262 - DNA, 215 bp, Homo sapiens
gcaacagagtgagactctgtctcaaaaaaaaaagaaaaaaaagaaaagatgttctgatggtgatactgataaatttttagttggtttaactttttgggttttgtaaattaataaattaggtaattgtgtttgtatattatttgtatgtatagaattccccctcataatctattgtactgtaataaatctgctaaaaggttaccttagaaacatta

SEQ ID NO: 263 - DNA, 445 bp, Homo sapiens
cacactcacaaaaatatacaaatgaatgaaaatggttatgacccacccatgactgcagtgggttcactgtcatctgatgtgatctataccacctgttcctatgtgactgagaggaccactggccatccatagcctgggaggttacatcatcactttgcacctcacactctagaaccagataaggaagaacagtgtcacatgagggaaaacttcctagcagttggagatgcccaacaatgagtgatcacattgttttaaaagtgagactcccattgctgatcaccctggagatttctgcatgggggcaccctgaacttgaaaatctctgaagtgcctcgcaagattcagggcactaaggtccaaaggagtgaagattggcaaactgataataactccccaaatctattacactgacatgtatcatcaaattaataaattccataaa

SEQ ID NO: 264 - DNA, 2226 bp, Homo sapiens
ttggaaaatcctggaaccttgggaaggacgaaatgaggcccgcaaactgtgtctggggacctgtggggtggtcttcatgaaacgcccgccatggaaggctttcagctccaagaaaggcaccggcactcacacttggggggctgatgattgccactgtccaggaggctaaaggaagaaaggcaaccaccatctcttatgaacaggacatacatttccaagacaatgggtccagaccagaagtgcaggctgtgcccccagaacacatggaagttgcatacaaacgcagaattagaccacatttaaaacgcggtggaacttggctgatttgctccctcttggccgtccatttgaagtgtgcagtgaggaccccaagtcctgatctcatcattcaagagatgttaaaatgcctgcggtgaatctgactttaatttaccacgactgctaaaacagaggctttggaaacgaaagcagtagcaagtctcccatgtgaggccagagctctcgaggggcatttagcagcagcagattttacgtgtatgaatccaaaaaaattaatgtgtcttaaatatttctagcaaccttccaggttcccagttcatggctcagcaggagaaaggcaaggggctcgttcattcattcattcactataaaaggattaaaatagacctcggtttttctggcttcaacccttgcctcctttttcctttttcttttttcacccctgccccaccccctacttttttttgttacctccccttccgtgaaccctgactaacagacaacccacatgcttataaaaacagctcttgaaagaacagttctgacagttactggaatgagattgctccagtgctcccaagcaggaggcataaaaaacccagagcaatctccagctgttccaaaggcagattgtacagcagttagagatacagaaaattgcaacctccaccagaccacaaggacaggcccccactcttctcaatctttgagacccccaatactgcttcatcttggggagtttctaggtcttcagatctagattcccatcagttgaatgaagcctttaacctgagtttggatcacttgaactattgatttttccctgacacaacgaatgtgtattgaccatctcctcttgccaactacttatccaggtgcttcgggtatgttggggctcagataacaatatgccaaagtgaaaaactcagaagcagcctcagaagcaaacatttatctctgaccttctcctgctctcttatccctcagttcctttctcccgcaaggcaggtcatagaaaccagaaccccctttccccaaagccagccataaaacctaaaaaagccttactctaactttccctctgcctttctatgtaaaaactggccataaagaaattatctgacttaccttgtttaggtcattaggctgccattccagagaaggaggaaatgcattctcagagaagccaagaagaatctaaacaggccttgctgggcttcccagctcagtctatagctagcattagatgttaccctttctgcccaatcatatttcgacacaattgtccagactttgttgaacctaagcataaaaatggacagttcctctgttatccttgagtcttcattctgaaggctcctgtgtatacacattaaagaaatttgcatgccttttctctagtctgccttttgtgagttgatttttccacaaactttcagagggccaaagggaaagctctctcttggcccccacagctctatcagtgagcagagtaaagaaaagacttcctgctctcatgcagtctacaacctggccatccacaaaaccacgggctgcctgcttttggttgggacagtggttttatgtaggggagccataaacgtaatgattgaagtagaattctaagtttctagacccactgcccattccccaaatattgtttatgaccataatcctctctctgacttcctattttcattctaaattggaataaatgacttggtctttgccaaacactgcgtgtttcagaaaggacttccaaaaggactttccagaaagtaccagactcttaggaatcgcatgaggtgggagattaaaaatacattcttaatttatttgataggagcaatgggaggtcaaatagcttactgatttctctatgtctaagtcaccaactcattgtgtttgctgagaattactaaaccaataaatgaagtactaccggaa

SEQ ID NO: 265 - DNA, 1952 bp, Homo sapiens
ggaaagcggagcgtccgggacgcggcgggactcgagtgtttcggaaaaggagcgtctccccaggcggtggttgtcttcactagcgatggggtaaaaggaggacgcaatacctggttcaacttgagcagacggagtctcgctatgttgcccaggctggggtgcagtggcgtgatctctgctcactgcaagctccgcctcccgggttcacgccattctcctgcctcagcctcccgagtagctgggaccacaggcgcccgccaccacgcccggctgattttttttatttttagtagagacggggtttcaccgtgttagccaggatgatctcaatctcctgacctcgtgatccgcccgcctgggcctcccaaagtgctgggattacaggtgtgagccaccgcgcctggccgagcatgttaatttaagcaaatgaatgtccctgggaatgatcttcaaggagaattaaagtgggatagagaagtcatctatctgcacctgtgtctgaaccagaatgacgaggcacttccatgtcagctagttactggagcaggcggagtaaggagtacccctgggcttctgccccgaaaccaccacggctacttcaaaacaatattacattaattttcctgcttgttcttgagaagcactggtttgaaaaattggatggggtgatacatgttttaatcagtatttacaaggctccttaatcacttcatcagacaattcattgagcacctactatgtgccaggcagtgtaattcattgagcacctgctgtgtgccaggcagtgtctgaggcacttctagctattatttcctaagggttccagcagcccatggataaacttcaaagagtgtaagctcctaaaaattgttcgtattttctgcacatttttgtagttttggagaagagagttaatggagttcttgccattctcagaattatttgatccctttaggaatgagcatctctagcctctgcctgttcatctgggacaatctgcacctgggcgtggacctgctgcttcagatcagtaggtatcagaatgaactcagttggatggggcagttcaggacccctggcctccttttagtctggaccccactctcattcctcatattctcaattcactctttctactgagttactatcctagtaatgacaatgcctcctatcatctagagacttggtttgatacaatgcattcacatacaactgctcgttttgatttctataactggggaatacagaaagcaaatatgcggtgcaatggaggatgtctccattaccccagataactccaaaattcttcacctagttaccagtgcaggaaattcgttcgaaggcagaaatggaaaatgaataagaaacaatttggatgtgttccaaaaatggagagttgtcaggcactatatcatacaacctgaaatatcaatggtgaagtagacagttcacctccacagggggcaggaggttggacccagggcaatggatgttttatatggatggttaaccggtctgtggccatgaggtggaaagctgtgtacacctgtgaagccatcatcacaatcaagttagggaacatatccatcacccaaaaaagtgttctcatgccctttggtaattcctccctcctaaatgtccccaccctaccccacatcccagtttctatgcaaaaaccgctgaccaactttctatcactatagatttgtttgtattttctagacttttatataaaaagaattatactgtatgtacacttttttgtctgtttttttcacttaacatatttattttcagaatcatctatcttgttgcaggtgtattcctttttattgctcagtagtattccactgtatggatataacacaatttgtttatcattcacctgttgagggacattatacttgcttctaaatttttactatcacaaataaagctgctgtaggcattca

SEQ ID NO: 266 - DNA, 566 bp, Homo sapiens
ctttcgcgtctgcggtgcccggagtgtggtacttctcctagttgcagtcaggcttcatacgctattgtcctgcccgtaagttcccgttttgtgtgtggttagagcagccagcgggtacagaatggattttggaagagggagtcaccactggacctccaaggaagccacgtgcagacatctacaaccttcgatctcctgacgagtttattgttggccaaaaccaggctttgattgaaccaggatgaatgcgggtgttggaagtagaatatatatatacatataaaattggttgggagccacgtgtaccagtgtgtgttgatcttggcttgattcagtctgccttgtaacagaaactggcgatggaatatgagaggagccctctggaaagaaaaggacagaccctgtgctttcatgaaagtgaagatctggctgaaccagttccacaaggttactgtatacatagcctgagtttaaaaggctgtgcccacttcaagaatgtcattgttagactttgaaatttctaactgcctacctgcataaagaaaataaaatcttttaaatcaaaa

SEQ ID NO: 267 - DNA, 2508 bp, Homo sapiens
ggtttggcttgaaatgtcatatttcagaatgtgcatagaggccaggggtggtggatcacacctgtgatccacctgcctcggcctcccaaagtgttgagattacaggcatgagccactgcacctggcctgctcagtgacttctaacattgctgctgtacctgggtaaatacttccagtcatatttaagcgggcttggagttggcaaaatctctgagagagacatcttcggaaagcctccatgctggacttagtggataaagtttccaatgtccagatattttcagctggtttctccttggtataggatttcttctgcattctaccctgcacatcttaatgataaccctcatattttggctaagcatttgactcccctttagaattgttctaacttgtttttaacagatgtctacaagagattcccaccaggatcctgcccatgcaatctttgagactttaaactcactccagctggaaataggaaccaacttaacccaagagactttggttcacatttaaccagtactttcctgaatgcctctcctaagtaaatggctctagtttctctattggccactgcactgccactaggattcctgcaagggatccgatgggcccagagcaggtagccaaccacttctctgttggatggaatgcaatgctgtttgccagcatgtttgagccagtccttcaagatggattctgagtgactaactggacctaaatttaaatagcacaaagcagccatttgctaactagatttcatacaaatgctctgagttcctggaaaacccacactccttaactttgggactttcaagactcacctaaatcaatcaattaaagctcacttgtgtcagctaatcagggatcagctgtattgactaatgaaaactaagcgagtttcaaattttaaccatttatttgtgtagaagacttgattgggagcctgggtatgaatacttgctataaaatctgagcattccctttgttctctggagcaaacaatgttaagttgttaactctctgtacctttctctagaactggatggaaacaactccatctgaaatgcagccctaataccagggaactcctacagtaaagcgctaaacaactttattactctaaccaacgtttatgtccctaatcagcaagaagtagttagaatggtcatcatccctttccctcaagattgaggaatggacataaaaaggaggggatttgtaactgctccagactgatctgttgtcagaaaggggctcttgaaccagaccatgaaagagggttcttggatctcctgcaggaaggaattcaaggagagtcacagagtgtagagagaatagacagtttattgaaagctactcagttacagagtagggcatcctccaaaagcaggaggaggaatgtgctgtctttgttttaaactcttcttttataggggtttaatctatgtaaaacctaagctatgtctacatgtgggtaggctgtcagtgtgacaaaatttagtattttgttgatataaagaaacttatccttgtcatcttagtgcataagtacatcaaagtatgactttagctaccttaaaagcatgtattgttatgtgatattgggacatctggacattctgctgtcgtaggagtttgtccttgcagcattactaaatcgcttccttagctgtaaacatcttataatcgtaggtcataactgtcaaggaagtgccttgctagtttttagatggagttgattttaaaatagtgtcactctggctttcctatgctcctgctttcctaacaaatctggttcaactttttttttttttattcaacataatcttttttttccatgctacctcatttacagagtgcttcctatagatatggttggtctgtatgtttcatttttcagctttgattcttatttttttgaatcacacatgctttatgggggcttccactaccatgagccatattttctgtattaccagcaagatgtttgggtttgttttttgttttctttatatttcaaattttattttagatttaggaagtacgtgtgcaggtttgttaacatgggtgtattgcatgacgctgatcttacaataccaatgatcccatcactcaggtagtgagcataatatccaataggtagtttttcagaacttgccttatcttccctctctccctgctctcttaattcgaagcctatttttcctatctttatgtccacatgtttccagcatttagctcccacttatacgtgagagtatgtggtatttgtttttctgtgtctgcattaatttacttaggatgatggcttccagctgcatcttttgttgcaaaggacatgactttgttcttttttatgactgtgtagtattccatggtgtatatgtaccacattttctttatccagaacactgttgataggcatctacattgattccatgtcttggctattgtgaatagtgcagcaataaacatgcatggttcaacttttatggtaacaaa

SEQ ID NO: 268 - DNA, 691 bp, Homo sapiens
tgcggggtataatctcgtggtgcgccgttttttaagcccgtcggaaaagcgcagtattcgggtgggagtgacccgattttccaggtgctgtccgtcacccctttctttgattaggaaaggaactccctgaccccttgcgcttcccgagtgaggcaatgcctcgccctgcttcggctcgcgcacggtgcgcgcacccactgacctgcgcccactgtctggcactccctagtgagatgaacccggtacctcagatggaaatgcagaaatcacccgtcttctgcgtcgctcaggctgggagctgtagactggagctgttccttttcggccatcttggcgcctccctcaggtctcacagtttggaggatagaatgggaaaatgctgattgcaagttatttccgacatccttgaacttacctcccacatgtgaatcacagcttctactgcatgcccactccttttgcctaaatatgcagttatcatcatacatccagaattgccctctgaaataatcacagactcccactggcacaaagaagaacacatcacctagtcttggaaagaggaggaagtaaggaaagtcttccaggagcccgtcagactttaagaaaatggcatcttctacttcctgttccttgggatgcttactcttggagcacagccaccaagctgtgagaagtgcaatccatacgg

SEQ ID NO: 269 - DNA, 1676 bp, Homo sapiens
gcctctgggaggctgtgtgcacctcagtcaccacagctcacggccgtccccagttgagtcccccttctgaggacaagtttgaaactgggaaggagacaccccctggttccgccagcacctatcccactgatagtgatcccctggcctccccgagcctccttaggcaatggccactggtttgtagacagagagtttcttgcagccttgaaaattttattccctaagtggggacagctctggtattactgcttctttaatttgttccacaaaaattatgctgaaatggacctgaatcagccctgggtgtgcttctgttggcgcctgctgctgaggcccggcctgcccatcggcctgtagtacgccatcgaggtcatcatggagccagccagcttctcttctcatcaaggaggcagagacccctggtggaagccaagagtgaccgaagagggcttgcatcacgtcactccagtggttccctccttgtccaagtcctcgttttaagggcatggcccgttggctccagccgttggcttctgttcagggtccttgctcccatcagaggtgtttgattttgctcctggggctgcgatggagaaccttttgtggcagatggtgctgcctacatctcattggttctctgtacctgtgcccgttgcgcatgttcacagacaggagagtcgccagcaataccttggcagcctttaaatgtgaaacgtctgttacttgcgctggaggcagaggctgtgcagggagcctgcttctaatcgtgggctcccttatctgttacggttccctcccctcctgttctagatgctgattcgttttctcactggctggttaattgctgtctacttaggcctccaaggccataactgtgcaacattttatctgagaaggaaggaaggtcagaaagtgatcactggcaccaccactgtggcattcctgtcacaccaacacagaaattcacagctcatactgttctcacctgggaaacttgggaagggctgatgagtttggggcagatcctgaattgcagccacacttggccttctagaagctgaagttgtgccctcaagtggtcctaagtagaagtccacttgaggtatttgctggcacacaccctcaagggtggttcagaaggtcctgaaacctaaggcaaaaggctgctggggcatgaacagaacagaccgtctcaggggcagccatgtaagtggcaagcagggctggtctccctcaaggtggttcttcattaagtaaagatggcttcgtgactagtgtttagctcccagatttatatttgggttaaaaactaacttttcaatgtggcagtttcaaaggattacttgatgcaaagtatgtttcctttcaaagggatcttgacgtggtaccaggactgagtcatgatttgggcagaggcagttaacactgggaagccctgcccctccctatgcccccttcactccggggaactgaaacctactctgagtctcacatctctaaacctcagtgctgagacctatgcagtgggactaatctcatcaagaattttcagttgaggccgggcgcagtggctcacgcctgtaatcccaacactttgggaggccgaggtgggcggatcacctgaggtcaggagttggagaccagcctggccaacatggtgaaaccccatctctact

SEQ ID NO: 270 - DNA, 464 bp, Homo sapiens
gcatgctttttgagaagtgtatcatctaggaagaaaatcaaatggagtattggtaattaaattgtaattccatgaaggaaggaagtggtgcaaaagatgaagctaactattcctgtttttctttttaagagtctgcaattcataatggagctactgtactggctattggaaggaggagattctgaagataaggaggtaaaacctgtttagaaattaaaaatgagttacgatttaaagaaaattcagatgactcattgtgagtgctagttctcttgtaggatgccactggaaatgttgaaatgaaaaatattcagccgttggtctttgaaatttcctgtgatgtgtttcaatctagatgcaaagaacatggaaaaatcaaagtgctcgagtggtttaaatatgttttgggtattcctgtttatagactataatacttttccaattaaaatcctcagttgtcacgc

SEQ ID NO: 271 - DNA, 314 bp, Homo sapiens
acagaactctttcttgatttctcttttgcctttacctttggtctcaacacttggactggtcctgtaattttgtttctctttttgcaatccctatccagaatcactggaggtcaaatgtctttgccaatttgagtttttccacttgaacaagaaaagactgtcaagggaaagccaatcaatttcacaatgtttagatgctgaagatacagggcacagcttccttcttgaattgcttgttgtttacctagttgacaatctactgggaaaaagaaattccttttccagaaaaggttttcaccaatttcaaggaatcc

SEQ ID NO: 272 - DNA, 549 bp, Homo sapiens
aatcaacactccactcagacaatgcccagacctccagaaaccatgtgtcaagctcggattgccttagacagctcacccagctggaactcttatgggaccttggcaccagagaccacaaattcctctttgaagttttctaacagcaacaatggtatttctgacttggctttcttgtatttctctcacgttaacaaaattggttcagcatctaccatgggctacatgctgagctacagagtttcgctctgtcgcccaggctggagtgcagtggcgcgcgatctcggttcactgcaagctccacctcccgggttcacgccattctcctgcctcagcctcctgagtagctgggactacaggcgcccgccaccacacccaggaatccaacttgctgtttgctatcacatgtgctatacatgctgttgatgaaactgctaaaggggctgaatgtgactgacgtctttggaaggatgagacttagcgtgcctgtacagttgtgtccaaatgctgtcctcatctcccaatgaaaaggtattgtaaataaagagaaag

SEQ ID NO: 273 - DNA, 893 bp, Homo sapiens
gcaaagtgacttccaacaagacaggggtaaaagaacctgagctagagtccagacaaccaaatctgttaaaggtagaatatggtgatgggtgctgtgcaagaagaaggagggaagaaggaagctgagtgtgcagcaaagacacctgcagggacacatagaaccaggcatttgctgaaggacacctggattgcacaaccagcggctaacttgcatgaaaaaacattctaggtggttttgcttaatgttggtctctccaactgtgctacaagctccatgaggtgaaggaccaagttaattgtgtcttccatggtatgtcccagtcctgccactttaggcattttaaatatttgctgaatattgtttgaataaataatttgtggagaattggaagagatttgtgggataaatatttttatatggcatgtggttgaacctgcatatgcttttctattttaacaatattgtcattgggactgtagaatttgactcataaacatcactttgcttttcttggaattctaattcatatttacagtttcaaatgtcacctctcttttaagttccacgtcaacatatttgcctaatccttggatgtcctgccatttgaacttgaaatgtctaaaatctaatttgtcattttttaaaactgactcaaataataatctcacgtgtttcctatgttctaggtcagaaaattgtacacaacttaaatttttccttttgcttcctatgtctgttcataactatatcttattagccatgaagttgtgtttttctgttcctttttatattttttgcatattcatttcttttccatccctgtcctggaagccctgactacctgacaaccactacatcctggttcccttggctttcctttctcttctttccag

SEQ ID NO: 274 - DNA, 534 bp, Homo sapiens
cttcaatccagaatgattgctaaagctattccagcacctagagtcaaataaaaatatcccgaggtgggaaggaaaacatttgtttagggaaacattaaaaacaggagagtgtgtgccttggagccagagcccagagccctgctgatgtcccggggcagaaatagcccgtttcatcatcggctctggacgaccgccgcccgcattcctcgattacagcgggtatcctgatgcagaccatccccagccagaaacacagccgcagaactgagcccaagctccagaccaaaaactgagcccaagctcagggtctgcatggcccagagctggcatctgtccgggggactggcccaggcaaagtgaccactgtcatccagtccaggagctgtgagctgcatggaaagaatgtgaatgaagacacaactctaaatgtggaaccatggacgctatgtgagccagtgtgctccctagccgtccagaaaaacaaggcccacttgtacattctgcaagagcataaataaagctgtcctcaggcgg

SEQ ID NO: 275 - DNA, 421 bp, Homo sapiens
gctccatttcctgtggtctattcttgcacagttaggtctacaagccaggttcaaggccaccaactgaggcacctgtcccgagacaggaccattctaatctgccctgaaaaggacatcccattgatcatactaaatttgtggatggatacctatctgttgaccagaccctccctcttcaatgaaaactgcctctccttccactccatctgtgaggcacccttggatgctgacatgtgcttacataggacttcctgtccacagccagaattagccagaattcactgacccatggttggactcctaaaatactcaagatgagagacatgttacttttctttactatagtaactatcaaatgcatcccataaccttatgttgtaaatgtcaaatatgcacaataaaatttatttgaaaaaataaa

SEQ ID NO: 276 - DNA, 578 bp, Homo sapiens
tgctgagaggggtttaggaacaagttgaggtggccctgaatgaaaaaagtaaacaatgtttgggcagttttccagattccccaagaatgaactttcacagagctttgtgtgtgtgtgtgtgtgtgtgtgtgtgtgtgtgtgtgtgtgtgtgtgtgtgtgtagagagagaatattactaaaattaataggataccacttacatccataaacaaatatgtaaacaactcaaaaacaaatccagtgggttttttttcaaatgagctctgactttttaatgccattgaatgttttctcatctattagtgtgaattgttaagaactggctgttctcattaaagtacaaaatgctaattaactttaaaaagcttcagaagatataatgtgaaaaataaaagtattgagtaagaatgcaattctattaagcaatatatatgactggacagatgtgagctaaattaccagttacctctatgtgatacaattatgggtaattttaattttcttcattttgttttactctgttttcaaatatcctacaaatgtgtatttttaataataataaaaataaatattgttgc

SEQ ID NO: 277 - DNA, 1939 bp, Homo sapiens
gtttaaaggccatcttagatgctgaaaactctgagcacaaatgaaagcgacccaagaaggaaaaacttcagagcctaagaataaaaaatggtggtagggttgggggataaactcgcccagagctgacttaaagtgctgtcagggaaggaagtgcctttcctggggaggatgagatggtccatgccgggtctggagctgtgggcgttctgatgttggatagcccaccctagcaggctgcagtgtcttaagggtagtggcatgagatctttggaagtatcgatacatttcctaacagtgagtttgagtttgttctggtatgttctgaatggatatgtggctcaaagattaacttagctaaaaataagtatattagatattagggaaatattgttaataaaggtcttctgtccctgttggataactttagaaaataatgtagacaactgaacgtagtggagatgatggcatgaatacagtcagggtttgatgcttgcttcctagaaacttcctagaaatagaacacatctagacatagggaaataaggttccaaagaaaaccttacacttttattcagattttatgttggcctcagttgtactagaaaagcgtttcagtatgtgtctcttggggaatctgcaccttcttggtcactgcacttcatagcccggcatatcactgagaattcagaaatctgactctttacccagggacgaatacatcgttatgagttcaggtgcactaaatacataggaacacccagagaaaatgagcccgaaacaatggttctttttattttggaagtttcagacaaactctttggaaaattgaagaaatctatggatccttttcctgggaagactgtacagacatacgtattcgtgtggtttctgtgggtgtagggactggccctggtcatgtgtcaggaagccccaatccagaagatcgtcttcattttaccttggccggtgatctgactctgttctcgcgcccatctgtggttgattctctgtcgccttggaatggagcatcagatcttgaaggtcgctcattgcttttccacgcatagaactgagccacatggcaagagcttcctaatgaaatggacggaaactctctgcaaagggctgccccagaagcacgggtgatagaaatagagtccaaggcactaaggccgctgagccacagtcctcctaggcaatgcctcctgctggcttagtgggtttatttcataagttgagtactaatgtcctgttttttaaatgaacatatttcttctaacatttctaacaattatgaagattttctccctaagtgtgactttttcttatgtcttggggtatcagatttacagcgtaacatgtgtacttcaaattgtagtagtgactggaaatttaggattctgttgtttcataacacttaaatctgcagcagattttcaggaaaatggtcaagattcacagataattccttccttattccttacagattttacaattgtatggttatttctgaatttggttaatttgtttataagtgtagtggacatttaacagaacagatgcacccgattatctgattagaaatgtgtttcaacacacgggtccctttgcgtgtttccaatctctgttttcggatctgggattctccacctgttacatcgttcactggaactttcctacaaaatacagcctcgctgagaggcgcatcgtggaaaaatgaagcagcctgaagaaactctaatattgggaccgagtggagagatggaagagcatcatcagagtggtgccgccgcacatgcgggaggcgtcccaggcagcattgctctttgtacatgagacaggataccactgtcttttatgcattagactggtaaccagataaaataaccttgtaaaacagatcttttatgtaagaaaaatacaactctcacctcgcaaa

SEQ ID NO: 278 - DNA, 1633 bp, Homo sapiens
aaccttctggtggcttccccttgctcttggaatgaatcccaggggcctgcagagccacagggatggccctgcccacctgctcggcctctgccccagaagctcctcctcgctcctgcggggcagctacagacacctggagtgcttttctgcctctgcggcgttcttagccttgcttgtgtagatcttcctagatcagctactgtgctagactgtaagctccctgaggggcagctgcagacacctggagtgcttttctgcctctgcggcgttcttagccttgcttgtgtagatcttcctagatcagctactgtgctagactgtaagctccctgaggggtgcctgctgagctcccctctgccttttcccagggcagtgatggtgtgaagattggcaatgatttgttaactgtcctaggggagcccctagcctgcagtaggcctggagcaaagggaagattttgaaatcgtgtgtgttgaaatgagtggacccagagatgaatgagacaagctccctgcccttggaaacccaacaaaagagtgaggcgtggagaacagtttcaaggaacttctggaaaagggctgtgaaaatcatgctgcgggaacacctgcatcattgctggcctggaaactgaggacggcttccgggagggggttgcctgggagatgcgtccatagggcctcctggggagcggatgggcgcggatggtggccaagcttgtcaagggaaaatggccccagagaaacgcgcagtgggaggagataaagaagaattctactttttaaaggtttttcttagaaaagcaacacgtgctcatcgggaaaatggcagtacaagtttgaatatcgtaaagcgcgggtctcacttcttcctgccccactgtatccttgggcgagagcggcggtggcctcgaggataatcctgggacttgggtcggactgggctggtgaatcttcaggacacatcggaggagggcagctttccaaggttgagccgcctgggaccgctgtgaatggaattgtcgacactgccccctggcccggaatgcctccatgttagccccctgctcatctccagctggtctcccatggtgtagggtaaaaggtgatggagccggaagagcaagggccccatagtcagcacacgggggttcacggcccagcttcctgtgtcttggctgagcaaccttgggcaagccattctgcctctctgaacgagctccgtttgccagctgtgaagtgggggtgggaataagacccactcacctggtgattgcgatgaaatcagcagatatgaaagtgcttttagactgcaacgtgaaggtgttaaacgtgggtctgtcactagagatgagggttgacttgaaccacaggaaccacccccctgcccgggctctgacctgggcacttttgtcttgttgcttgtccccgctggggaggcgatctttccatgcgagagcgtcatgttgctttttgcccccgtaaaggttgacgaccactatgctgactacgccgcctgcatcagccactccaaagagtccgctttgataccttagagtcttaaaacacctgctgtcggaaccgtacaattgatttcaattaactttgaattttttcaatgaaatgactctgataat

SEQ ID NO: 279 - DNA, 1940 bp, Homo sapiens
gaagtcggcctgtggccggccatgttcatgagggcgcgtcccttggcacccctgtagccgctatgtttcccacgcccgtggcaggcctgagagattatgtttgcggggggtgctttttttgtagcttctgtgttcgccatatttgaaaggggcagacggccatgttcgtgaacggcgcttcccttggtgcacctgtggccgccatgtttgagcgaggaccccgtggcaggccaggaccgtttctccggtgctatcccagagcatggcgcatccactcattcactcaagggaaaggcctgaaagtaaaattgtatcaacattaggtttggctaatgttgccattaggcaaacctaattttaatgaagccaggaggttctcgttttgggccttgactggacaggtttgagctagaaaccacttgaagtattgatcatccatctgatcatcaagtttttttttttttttgagttggagtctcactctgttgctcacgctggagtgcagtggcacgatctcagctccctgcaacctccacctcccgggttctcctgcctcagccttccaagtagctgggattataagcgtgtgccaccatgcctggctacttttttatattttcggttgagatggggtttcaccgcgtggccaggctggtctcaaactcctgacctcaagtgatccgcctgcctcggcctcccaaagtgctgggattacaggcgtgagccgccactcccagcttgttcatccagtttttattgagcatctattatgtgccgatattgaggtagactctgggagtcacagcagtgaatgcagctgcctggatgcctcgtgagggccggagcctcactggggagatggacatgaacagcaaatgcacagcgaggaaagccaggggtctgtgcggggatgctgcaggacacgagaaccagccaagacctatggcccctgcagccaccgagggctcgagagcgcccctgtggacttggctgggcccttcatggtgacatccaggaatgcggctgagcgcgggtgttgacctcgctgtttgctggaatgtttgggttcttggaccatgtcagtgacggctgtgtcaccatggccttgctatccccaggaaaacctaacatgcaccccgcgcctgtcctctgggactcccatcctcctcctttgtctgacccctgagaggcttaccgtttccccagggcagccccggctgtggccctcggccctgctccaggcggccatgtcagtgtcctccctcggcgctcccaacaccctacctggctctgcgatggccaccctggactcctaaacaccccagaaagggaagagatttaagaggaaccttgattcctgccattctgcgcagtcgtgggtccctcctccacctggggccctcaaggggatttctgtccgcactcccagccagcgacccctcccagttcctgcagctggagcggccctctctcctgaacattcgggcacctgcgtctgtcactgcagccagagggctggagtgtcttcggtcaactcgccatccctgccacggctggaggccacatgtcccagaacctaccttgctgggatgggggttggggtggcagaggctgaacgcgtgtgaggtttgggggaggacaagcggagcggggatgtgtgggaggtcctggtgtccaccgtgaggatggtcacaccccatagctttgttgatgctgtggctgtagcaggcccagtggctccgctgagcctccctagcaccagtgcccagtgaagtgtggggggctggacataggtggcctcagttcctgggactcccccaaagctctggtttcccccctgctcccaggcttcaggtggacgagttagtgaccacccccactccagacctccctcccctagccacccccacagttataaaaaccttcattctcatatggaa

SEQ ID NO: 280 - DNA, 687 bp, Homo sapiens
ttaccgtggtgtgctctttccaccacgcggatagcataggctgacatgtatgataagcaaccttgagagcaaagggaatgcattgcaccatgaatatggagagtgagctttaaaatagtatgaaagacaaatgtttaaaggtatacatttctttcagagaactttttctctctctttctctctctgacagtgtgtgtgtatctcctgtgtctctctttccctctctcacatgcacacataagtgcacacacacacttctcttggaaactgaaggaggcaagaatatgatgccattaacaaatgctctttggtggacagcaataataacaactgctaactttcactgaggactacttatgtgccagataccatgtgaagcgctttgcttgtattagatcatcgaaacctcagaaaaactctataaagtgggtgctaatattttctagatttttcagatacaatactgaggatcagggagattgaataagttgtccagtgtcacccctggtagctgagagagctggtttggatgcctagggctgtttgtctccaaacctgtgccttgcacccttagctctggttcctcccctctcatgtcatgtaatcagcacaaatttcctgaagtaaggctgcatgcatataacaagaataaaggaataaaaatagaggatgccgtggaatgggaga

SEQ ID NO: 281 - DNA, 487 bp, Homo sapiens
tatcagggaaacttaacatgcctgtgtttcgtagtgaacaggatatctagggttgagaattactgcgaacactgttatgttgtcacgtgagctggggctccatggtgatgcaccctgggctcccagaacaatgtgaagcactgagatgccctgcacctgggcctgggtcagaatcctggtagaggggtctttggcaaggacaggagaggacctccttgggattggactcagctgagcagcaggatgcctggttggcttgggagacaagcaaagtggatcagcaaaggctgcagtcaccagcatcttttccaaccttaatgaactgtatcctcaaaagaacactatcagactggtaagacaagcattattgtcccacttcacagatgaagagcttgggggccctgtggatgtgtaggagagtcggccttcctttttataggccttttgctgagctcagaggacagagcagaagacaaagccgaaagca

SEQ ID NO: 282 - DNA, 273 bp, Homo sapiens
cccttccttaaaattgctacaagccactgaagagcatcttccttgttctatgtgtccagcttcagtctcgtcgctggacatttggttccagatctaaagcagcagagggcagtggccgtatgtggagctgttattaactgcatcaccttgttgtgaggatcaaatttgatggtgtttgtgaagagctttgcccagtggctggcagcctgtgatcatggctctgtaaatggaggctgccatcatcataatatcattatgaagcccctgatctca

SEQ ID NO: 283 - DNA, 383 bp, Homo sapiens
tattattttctaagactgggatagtgacagagcctggattacaactactctggactcatagtcctatgctcagactattaggctgccatgatattgcagagctagaattattaccagttatctagaacaaagtcactactaattctatttttaactagtacctaattcactgttatctttcagggacacttaaaagctccttagctaaactcattctatagacgctttacaacaagtaaagcaagttttagggctaaaatcacagagtctgaaaaagaggcttgtgtcctgaccataccgccccagacaaaaaaacagaatgagtacttcataatgtaccaaaaaagtctatctgcttatcaaaataaataaataaaaataaa

SEQ ID NO: 284 - DNA, 701 bp, Homo sapiens
aatttaaatcatttaattatttaattatttttattaaaaatttttgacttttagcttcaggggtacatgtgcagtttgttacatgggtatattgcatgatgctgaggtttaattttgtactttccttgctgttcctcattttcttcaattctacatttattaagcatgcactctgtatttttttctcactataacattgccagtcctccttcctttcctctcttcctccttcccttctctcttttcttccttccattcctttcttcctaactccctcctcttctctttcataagagtgaagatattaaaaaaaaaatcaagcctaagtgtgttgaaaacctctgagaaaaggaggtttagaaacctgagaaaaggaggtttagaaaccttagaaagaccacagggttaattttgtgacctatttttatttacattagggcatattaaaaacaaattcttttttgttaacattcagaatcagaggtggggagagtggtggaagggcctgtggacttacggatgctgctgcgacactctatgacctcagactgcaagtaagagccaatcccgaagcggtttgttgcagccacacggaacacatactcatttccttcgagaatagacgccttgatggctcctctggcagttcttgatgaccatggatgagctaatggctgtggtctcaatggtggcttcttgag

SEQ ID NO: 285 - DNA, 779 bp, Homo sapiens
caatgattccattatcagataatctctcagatagtgatgcctataatattgtttataaagacatgtccttgtctgttttcctttcatcacaggataatggaagtaaaccaaggaggtatacgtgtgggattgtgtccggaattggtgggttcttggtctcactgacttcaagaatgaagccgcggaccctcgcgcatgtatttcctattctgtctggttggcttgctgcttaaaaatcagaatacagaagagaagacagtcttgtggagggtcaaaggagccactgtttgtagttatttgggatctttgaggaaacccctgctaaaataacttgattggagattttccttagtctggaccaaaccttcccattattggacacagatggtcagctagtaatcaatcatctataattatgctttggaaaaacctcatgagcaaagaccctcgacttgtagtcaaagctacaatttgacatttcccaggattggacgaggccagtaaggtgaaagagtagaggcctgaagattccagagagctagtaacaacttcactgaagtggctgagatccacagtgtgtcaggaggtgtttctagagaggtacagtagatgggaaatgagaggacatgaattcagtaagctccttaacctcctgcctcatttatcaaatgggtctgatgaaagtgatatatatgaaagcacctggcataatattggtcagattgtggtgcttgatgatggaatggtgcataaataaataaacacgggctctcaatcaa

SEQ ID NO: 286 - DNA, 187 bp, Homo sapiens
acggtctggggaaaggctcctgtgttgttgagcctgccaagttgtgggtgcagcatggtaccaggcagcccaaccctgacctaaagtaaattcccggaagaagtctttcctgggttttgaatttgcagtaacaggtgtgagcattctagcagcagtttgatgatcatgtatgatactgcaaacagga

SEQ ID NO: 287 - DNA, 510 bp, Homo sapiens
gctgctctgtgcagttacgatgctgcactgccacagtaaccttctccctctgtggtgatccaatattctaccatatgtcagcaaaactattccagcccggccctttcaactctcccgaatctaagccaacagtcaaggtactatgaagacgtcaggcgtatggaaataacagatgggaaaggcgagcagagatcattactctgaactgtcttggatgtccctgggcaatgctaagctaacattcagcagtgtctacaagatgacacacaacatgttgaaagaatggagcggtgattcccttggaaggatgtgaaaagctttccaatctcgaggtgatatcagagctctttcccattgaaacacttggatgctctttctccagctatcatgctctcttttttccactcaagaaaagaagagaatgcaggttcccacagatactgcaagccccctcaagcttaggcagtggccctaacttagatctctcttccttctagatcaacacagctg

SEQ ID NO: 288 - DNA, 993 bp, Homo sapiens
ggattgggatattccgactccttaagggcctggcgcacataaggtgtgaccttttcattcccgttgttatggagggccacatctgccagagcctggagtctgcgaaggccgggacccggttccccggcccacagtgggggtgtgcaaacccgagagaactggattgcgtacccactgcagagtgctgaagacggggtagccacgaggttgcaaattcgtgaagaatcagcatcatgtttggcagctgagtattggagccaggagcctgccatgaggttttgagaacagagtgctgttttagagctggcagcagcatctcagcccaagagaaggttatattcccagaggatgtcagtcccaaggaccagtagctgccatcagtttggattctgaaaactaactggcatcaacactgggtgtagaaacatgcttgccttatgtatcagaggacatgctcagcagatccaagagatatatttggcaactttttctagaaaaggcacattgggtatcattcattacattcttgagtttttttgggtttttttttttttttttgagacagtcttgctgtattgcccaggctggagtgtggtggcacaatcacagctcattgcatcctcaatcacccaggcctaagcaatcctcccaccttgtagctgggactacagctcacagcacacctggctaaaattttttttttgttgagacggattctctatgttgcccaggctggtctcaggctcctgggctcagatggtcctcctgcctcagcttccaaaggcacaggccaagttgtagctttgtcccttgccatcatgcccaacaagaggttctataccttttaatgaattgactttcataaattggttatgttggtgggcaaagttctttaagctggaaattgtaaattcctcctgaaatgttttttcatgcagttaccatgaactaatactacaataaaggatggtcttgggtgtcaattcttgaaaa

SEQ ID NO: 289 - DNA, 608 bp, Homo sapiens
gccttgagcagcataggtgagcggatcctgctgggctcatggaccaggccacatggggtcactgagggtcagccttcaggacaggagggattcctcagggagacaacctgaatccccactggtccctccgtttggggtccctgacttccctcaacactggtctcttccactgagccttgtgagctcttccaccaaggagggccccctggcattgactggcatagtgagctcttccccccagcagacccctgggattgacgagcatagatggtgactgtggaagaagacttgctttgggaccgctggccccaggccagtggttgtcatccaggtgcccagcccttggtgcacttgagctcaagcccttcctggtgccctggcctcctgccctaagctgtgcgagctcttctgcccagggggacccctggccttaagtgggatagatggtgaccccagaggaagacgtgcattgggtccgctggccccaggccagtgtctctcagccatgtgctcaacacctggtgagctgaagctcaggcccttcctggcatcctggtctcctgcactgagctgtgggttcggtggctgagagagcttttgttgccctg

SEQ ID NO: 290 - DNA, 434 bp, Homo sapiens
atgctgcctagaaccctgtccatttaagaagacacccaggtgatacgcaatgcacaaaaagcactggaactcccagcagaacaaaaccttttccatcagcaaagcattttagaacctcaagctacactgttcccacctgcaactgtctaaggtattggaggtcaaggacagtccaaggccaagtcaaggaccatcaggacacagaggagtaacttctgaggcagcccccggtggtaacataaaagcttaatatgcatcagacaagtgccttcgctgtgagatgttggggaaccaagcccagtggggtggctggcgtcagctcagtgttccagaaaagccaaactgttcaccacgacttgccctgattttgccttcactgctattcaaagaggcctgaagcagttactgaaagcaattccaagaaattgagttaa

SEQ ID NO: 291 - DNA, 216 bp, Homo sapiens
aagactatactttcagggatcatttctatagtgtgttactagagaagtttctctgaacgtgtagagcaccgaaaaccccgaggaagagaggtagcgttttctcctgagcgtgaagccggctttctggcgttgcttggctgcaactgccgtcagccattgatgatcgttcttctctccgtattggggagtgagagggagagaacgcggtctgagtgg

SEQ ID NO: 292 - DNA, 652 bp, Homo sapiens
gtcttgctttctttaggtaaagttttacagtaacctcctttgtagtcctttgaagatgaggatttgagaaatcccaactcctaaagtaggggagagacagcagcagaatatgacccacagccagacccaaaggggctagcccgacccctgtatatattgtacctctctctctgcccacctctcccccacttctccccactgccccattctctcttatcctgcctattcctctcccctatttctctgtctctctctctctcacatacacacacactcactcacaagcagtacagtcactaagttggctaggtaatatccaaagcattctgattgtcctactttttgtaaattgaacttatttaagatattttagaagagatgagtcacgtcttcctttgacccttcacccataacacacataccattctcacaggaggccacatggtgcagtagagtcagactttgattcaaagcccaactctgtcacgtgacagtaggcttgagtttcctcatctgtaaaaagggaagatttcctacttcataaagtggttggagaaattaaagaaatagtatatgaagccttgcacataaaaagcatttgatatatattaatgcccttttgcacaagaggtcaagaattgcttgggttcta

SEQ ID NO: 293 - DNA, 575 bp, Homo sapiens
ctattctggagagggtgaagacgccaggaggattccagctccaggagccagccccgctgtggcccccgtcgtggggaggagaggccgggagcggcgcggtgggcagagtggggccatctgggtcccctgtggcttctgggctgaccctggcacacggggtgcctgcagatggctatatggaaagcacaggtgtttctgcttctggagaggccccaggaagcttccaaccgtggtggaaggcgaagcgggagcaggtgtctcacatggcgtgagcgggaacgagaaagacagagcagggaaacgtgcagaggaaatggttggagagcgaagtccaggcacaggggccatgagagccggaccccacgcagctgcagacctcgacccgaactgcatgcggctgaggacccccaagccaggcagaccccgacccagaccccacgcggccgcggacccccgacctcgacccaaactgcatgcggctgaggacccccaagccaggcagacgccaatccagaccccacgcggccgcggaccccaacccagacagaccccgacccacccgtgcagcccccagc

SEQ ID NO: 294 - DNA, 312 bp, Homo sapiens
ctggatggtgcctctcaaacaaaagtccaattcccatgggatgccttctccaaacagctatatttctagcttctctccttccccttttagacctaggactgccaaagcttccctattgctgctagtcatggagtactgcactaccgcctgtagtttcccttcactctatccacgcatttcatgaactctcttcaaattactccatatgggtagccatcgacttcttaccaaggccctgactgagacactttcattcttttaaaaatatccgagtcaactaatatattaaaatagaccagcatctcttctcaa

SEQ ID NO: 295 - DNA, 248 bp, Homo sapiens
ggacctttggcctgttaaaggtctgtaatcttggtgggcgatacagagttatgtgtgttcactgtaagggcagaccaacaagaactttttcctacttttgagctacctctttttaataggggtgattcttccagttgctggagagaaattgtggtaactggagtgagagagtaggaacagggcatgttcagggtatcagggccaagggtcctaaaggacttagcttgtgttatggccactgagagatg

SEQ ID NO: 296 - DNA, 209 bp, Homo sapiens
cctgcctcgaccttagcccaatcagctctcctttcctctgctttacgggggtccatctgggggatgttctcatgcccattccaggggaggtggcacgtacctgcctcttcttggagtatggacgagtcgaaccgggcacaagcatggagctgcgggtgagtcccggctggcgctggcgcggcgcagtgagcaccagctgacgaagaggg

SEQ ID NO: 297 - DNA, 474 bp, Homo sapiens
atcatattggaagaaacatgggatattaatacattggctgcatgtacagagggaagatgatgtgaagacacggagagaagatggccatctacatgctaaggagagaggcctggcctggaacagatcctccctcatgatcatcagaaagaaccaatcttgatgacaccttgatctcagattttgagcctcaagaaccatccaggaggtacatgtacagctttgttacctgggtacattgtgtgatgctgaagtttgagtatgaatgatcctgtcactcagctcccacgtgaatcattcaagagttaaacaagagaaatggttcctgtcagtgcaggtgatgaaagagatcattacaacataactgaaggtcaagacaaggataaataccagcaaaatcatgtaagaatgatgctatcagggcttatgcttggcctactgatcccagaggagagaatcatagagaattgtggaatt

SEQ ID NO: 298 - DNA, 3419 bp, Homo sapiens
agtcgcctggaggcccgtttgtacagtggaaaagtagaaaatgagactctaaaaatctcatcagccaaatacaaaacattctccttgctgctacgtggcggcctccacagagccctaaaaccttgaagctcggagacctatcttgaagggggagcaaaggcgggatgcgggaagtttgagtccatggaagacactgataccctctccattcctgggaaccctgagcctgaaggacccggcctgaacagcggaaggactgaatccctgtgcaactcatcggtgatggaacataaagccatggtgccctcggtccccaagacgggagggatggggaaggccctgggtgaaggggacaggcggggaaggaaaaggtgaagagaaaggtgctccccagggagggggtagatgtgcccaggacatgggacattggcagaattttaactccgagcacacacacaggcccacggacggcttcccgtctacctgttccttacgggtgtgctgtgccggcctgggcacctgcctctttccccatgccaggtcacttgccgtctaccctgtatactgccactagttctaagcctcccagaacaccctgatcagggccctgtggcctctgttacaggattccaggcctagacgtctgctcgattggaaaactgcccccagagatgccgtggctcagagctcgtcctgctttggggtggcccctggagtctccgcccctcagcaacccacatggtgacaggcacccacatccgctggcctcaggaaccctggggccaccatcccagcgctgtaaggagctggcagtttcctccccaccctttcggcctaccttgcaggaaccaagacaccaggtgagccgccccgggaaagagacctgtgctcccacggcgctgctcctgcgcccattcccagccactccagatgcttcccgtggaccagctgcactcccggcgggcatgcctggccctccgcagcctggcccatatgatcttcacaggcaggcccctccttatgccccagccccctctccagccagctcattccagcctcccccactgctgctggctgctgctggccagaaggctctccttcctcttgcaatccaattcctactctccctcaaggtccgcctcctccatactgacttctcccctgctagctagtggtgacttttctctaccctgattcggaagctgcctgtccacatcacccctggctgggctgaatcacactctctcctccacctccttcaatcatcccttccccacgtctgtctgtccacccaaggttgtccaactcccatatacacacccccacaccctccaactatactccaggctccttgggcaccagggagggccacctttccataccccaggtcagcccccatgcacatgcgcactcatgcacacacacactctctcacgcctatcgactcgggccacctgatggctctaagaccagaattcccagcaaaaccattcaggacacacaagggggagactgataaacacagggaaccagcagattgaggccccactccccgagactgagaaaccttcccccagagccaaaggattgccaactgctgcaccaggatggtctcaatgagcccattgtcttggactaaattacagggtcacaaaactggcttgggagacagccgcagaagcagctccagatggaggcacatgggggcaagggtggagttacacccagagacccaaggaaggggcactaacaactttcatagtgcaaatggtgacagctgtacaacgaacacaaccccaaaccctggcctcccctcccgccacagggctcccgttgagacacgagagttcttccccagaaatcccactgggggcccgacactttctgttaggaactgagagcagagacctcgatcccgcaggcaggaggagagctctgcacaacacagggcctctctccataagggcttactggaaagtggtcagaccggctaagtcgtgccacttggacatttgggacaaggaaggcccctggaggagcggtcgcagggaggagttgcaaagaggcaggggcagggaggtcacattcactcggggactgcaggaggctcaacggaacacagtggacctagggagaccccagtatgagcatgtgcccaaagatgtccagatgaggaggtgttgtgggggaggggggcgggaacagcaagccctcccagctctgcagacccagacctcccctccctctgggaagcagggatgcaaagggatagagcctgaaaaagggctttcaccactaagctgacaaagtaactacgatgtttccagctcacactctgcacagcgccagtggccactggatcacaaccccctcccgtcccttcgccgccccacaccctcctcaggcccagccctgaagaacagccactggcactctgcttggcgtccagccaaagttctggtcccccaggaggccccgcctcccccactcagatagggctgaccccaggtgggccgtgtgggcagctgggctcaggacacccagatgtcagccctggttctggccatggagcggggaggacctcaggctggtcacctcccagcttggcctgacacctggacagtttgctcatttcaacacagcctttccccctcccggcccaccagagggctctgcccaagtcagcctaggagcctctccgaggggcgggggctccaggtcccggcagaggcaggcccgcccctcagaagccctgccccagagcgctggagaccattgtgtgagcttccccttcgcctgctgtatttactcccgcggacgcaggacgcagagccccagcaccggcagtcaagaggacgcaggaaagcgcacgcactcacaggctcagagacgcggacgccagacccaggcttggacagagcagccccgcaagtcccaacacactttgtaaaccccgaagacaggagagagccaaaatactctccctgcccgcacgcaggccccttctgtcccccacggcccgattctgggaggcggatgaggatatccccaggcctggatgggggccatgggacatcccactctagaccctgccacgacctgggctgtgtccgttcggtgctcccggcccacgggctgcacaacttggcggccccgaaactggcgtgggggaggggagggctgtccacccgagcaggacgcggctgtccactcagtcggaggtgaggaacgacctccctatcccgttgccgggtccaagcggggcccgagagccgccggggagagccaaagggaggggaccgatggatttcccagagtgaaactgtgcgtcctggagagttccgaggcagcctcgcgagccctcgaggaggtcgctgtcgcttggcaaacacaaacaacaataaaaggaaggaaaccca

SEQ ID NO: 299 - DNA, 1809 bp, Homo sapiens
cggaagccgccggggccgcctagagaagaggctgtgcttcggcgctccggctcctcagagagcctcggctaggtgtggaaacaggaagagaactagaactggaagtaaagcattgaagatgtgactgaattgctgcaatctcatgatcaaatttgaatggatgaggagttgctttttagggatgagcaaagaaagttgctccttgagggcaggacagttcttatggctttatccgttgcgtaagcacagagaggtctgcgaggtcaaaactattgtcatgatagcaagatgcctgtctttttcatttattctcacggtgtgcagaggctacatgatgtgtgatgacatcctcattgatgttaatgaatggtgctatacttgaattttctaaggtgtcattaggtaggtttaggtatgcatacttgtttttagaaattatttttttcctttttcccatttttagaaatcaactcattttttaggttatgccttcagtaatctttgcaacctcaatattgtgtaatggttactttaaaatactgtagttttctttgtgcctaagtataaacataagtacattttgttgttttgtttgcaatagtggtttaaatattttcccaaaatatccaaatttaaaaattctacaactttagaatttaataaatttattctaaaatatttatatattttttcatttaagaatggatcggcttaaaaagactgcttctcatttacttactggctataccatctgtatactaataaaaaacaagatttgatttggaaggactgactcaaactaacgaaaatatgaaacctgtctttctgctttggagatatttacctaatcatgttctgcagtagaataatttagttcttttgtctttttttggagatgaggtcttgctgtgttgcccaggctattcacagctgccatcatagtgaactacagcctgaaactcctgggttcaagagatccttctgcctcagcctcctgagtagctggaactataggcatgcgccaccaagcctgggcttttaaaaaaattttaaaaagaattttgagacaggatcttgccatgttgctcaggctagtcttcaactcctagccctgagtgatcttgctttgggcctctcaaaatgttgagttaataggcgtgagccaccatacccagccaaaaatttttttagagatgggaatggaatgatcttgaatagtgttggtgccacctatgttgtggcatcattttgaaaccaatcattcagagtgctttttttggtaaggcattattttttaatgcaggtatgccactactgggaaaaaaaaaaaaacaggttttaaagctagaaatgaaaagctacttaagtatcttaaaggataagttactttattatacactagaaacatacacaatagctgaaaaacttaaaaaatctcacactgctgaatgtctctgctggctgaagtgtaagtaaaagatcatagtagtgccgctgttgagtgataaagcaacttgtcattaaagatgtgtgtgcagacatggattctgagttaatatctcatctgtagaagtatatatttgtcccttgctttgggattggtttctggacagcactcccccacccttgctggccatttgccaaggacaccaaaacccaaggatgttgaattcccttttataaaatggcgctgtatctgcatacaacttacacacatcctcccatatactttaaatcatttccagatttcttatacttcatacaatgtgaatgctatataaatagttgttacattgtgtacttatattt

SEQ ID NO: 300 - DNA, 549 bp, Homo sapiens
gcgcaggcgcccagaggcgcacaggagacctcaggcccagactccactccccagctgtgaaaggactgctggccagacccccaagctagcccgccaggcctccatagagctgcccagcatggctgcatccagtaccaagagttggtgggagacgggtgaggtacaggctcagtctgcggccaagactccgtcctgcaagactctttggcagttgcactgggtactggctgagttctggaaaacaggaatgtgagcagagtgctgcagatctccttgtcaggagcacctaagaactggcatgactctacaccctctctccttctgcaatgacctcgtgtcaagatggcagacccgcagagatgaatgtgcctggatacctgagtcaccaggtggaggaaactcccattgacatgcatcacactccacatatgaaacccttctttttctgcactgtcactggggttagggattattactcactgcaacttagcctagcattaagttgcttgactaatacaagtttcaataaatgtcgcttcatttcccatg

SEQ ID NO: 301 - DNA, 486 bp, Homo sapiens
gctgtttcccacactacaggccagcactgtgggctctcagtttattgggaaatggaaataagagggaaggacaaaagtccactgggaagcagactggacagaaaggaactctgagcagctaaactctgactaatcccagggtatacctgcgttttctcttcaccagatttttcctaccaggaagagcatgtgctgaccaacagacatgaatttcagcctggtagttacaacattcacagtatacccacatcactaagctgggaggcacattttgagacccagaatcctgacacctccatgccttcaaaaggacaaactgcggcctggaccagctggtgaaacataattctgaatcctgcccacagccttcggtggttttggatgaaaggccagcgccttgggagccctgcgtttgatttcaagttttaaggccggcactggtggagcaatgaatggtgaaagctctccccttaaaggagcacagtt

SEQ ID NO: 302 - DNA, 493 bp, Homo sapiens
tccaaggaggtggcagatcctcaggaaacacagggtgaagatataggtttggaaaggggatataactttccatggtcaaaagcaaataaactgaacatctcagccagcccatctgcttggagccctctgccttaaagccacatcactctctgagatgaaacaccagccagacagggtgaagacaggagcgagctccaggtttacaagtgataggatccctgtggatttctagttcagactgaaaatccatgaaatttagaataatatggggatagtttacagacatgtgaacttttactgtgtatgttttacttacaatgcaatacctaatacttccactgcgacatcagcaaacatccttagccctgtttgccactgcaccacagagcttttcatgcaaactaacattacagtatgatacaaagaaaactgtttcttcttaagatatttacaatgtgatcaggtttatttaaataaagtccattttatacta

SEQ ID NO: 303 - DNA, 270 bp, Homo sapiens
ttttgctggctttttaaaaaagattcttctgagaaagattaatacaagtcttccattactgacttaagtgaaataaattaatgtacccacagcttaccttttttgaaagaaatggttgagctttaggattaatgtccattaggcctgttcaacacatagatacttgataatttgactacaaaaaagtcttgttgcagtgagctgagatcgcaccattgcactccagcctgggcaacaagagtgaaactccatctcaaaagaaaaaaaaaa

SEQ ID NO: 304 - DNA, 195 bp, Homo sapiens
caaaaatcagtttgggaaatagagacacttgaatgaatgggttttgagataaaaatctgtcttgtcatcctcctgaggtggagcagattgcattttccagctgaggcaggagaatggcatgaacccgggaggcggagcttgcagtgagccgagatcgcgccactgcactccagcctgggtgacagagcgagactc

SEQ ID NO: 305 - DNA, 878 bp, Homo sapiens
tggttgaacggactcaccaggaaacgtgactttcgtgtccgacctctgctgtatcaggattcgattcttggtgttaaacaagacaacgctgaaggctcggtgcagcagccctgcaaaggagtggagccccaacccacgcagggcgtgtcttcatggcttttcctggccaatctgataccaagatgcagtggccagaagtacctgcacttccactcctgtcaagtctctgcatggctatggtgaggaagagctctgcactgggcaaggaagttggccgtcgagtgaaggaaggtgatgctggtggcccctttccggcagtcaagttccctatcaaggacattcagttctcggaaagtggtgaaggcacatgcttcctgcatggtgcccgcctctctccactctctagaaatattgaggctaggctgctgctgtatgtcagggctagtcccttctatgaatccagaataactctgaagaagccgagtaacaggcatgaagtgaagagaaatcgctgtaacaggaagacagcaaagcagatgctaatgaccacactatttaacgaactggaaccaacgagaaaatacggtattactgaagactgcacttccttgaacagagtgctcttctcagcaaatcggaaatgcctacacaaatcgctttacaagaaagactgtttcaaagcagcacctttctcaatgttctcgttcaggtgacaattcttcttggtctcagctccaattttattgtcattttcatcaataaggatacacatctctgccaggagttgaacctgttgcttgtcgaggtggttagtgtttatttcaggcatcattacaaaatgtctgatctgttctagaacactaatattaaaggaaaag

SEQ ID NO: 306 - DNA, 992 bp, Homo sapiens
aaaatctgcgctccagcagctgggaccgaggcatgagagcgttgaatcatgagtggcaccgttcgcaaaaattggtgtctttgtacaaagacagtgccacaacacaactcagtgaccatcgggagagcagcctcatgatgggcgatgctccatcagttttctcttgcgatcttttgcatagatcggtcccgccccgcatatggcgatgaggactcaagagacacggaaaacgttttctttctggaaaacatgaaataggctttgtagatggacaggaagtcaagggacaagcggtgcgccgcagagagcgaggacccactcttctattcctttgcggaggcacggacacacggtgtggcccgaaacagcggcaggagagtgagacccgggctccgaccgcggtgacggagtctcactctgtcacccaggctggagtgcagtggcacgatctcggctcactggaacctccaactccctggttcaagcgattctcctgcctcagcctcccgaatagctgggactacaggtgcccaccaccacacctggctaattttttgtatttttagtagagacggggtttcaccgtgttagccaggatggtctcggtctcctgacctggtgatccgcccgcctcggcctcccaaagtgctgggattacaggcatgagccactgcgcccggcctaaaaattttttaaattgtatacattatggtttttttttttaccacaatttaaaaaattaatttataatatacatgcagaaaaatgcacaaatgacaagtatatatcttgatgaattttcacaaatggaatacatttgtgtaaccagcagcagatcaagaaacagaacattgctagtgccccagaagccacttgtgtgttccctctcagtcactgctcttctcaaggacaaccactcttctgactcctgataccataaactaattttgcctgttcttgctttttatataaagagaatcacagagtatgta

SEQ ID NO: 307 - DNA, 293 bp, Homo sapiens
ccacccagtctctctctgcaaaggcctcccttggctctctgataaagttggagctgtgggtgcagcatttcacttggacctagcagcatcaatgagccagctcctcactggggaacatgcaaacccccagctgctggtgtgcaggaaaagaatccaggagatcacctgatgaagcccagcattttacaggcagtggagcaggggaatccagttgacactgtggctaaatttcagaaaacctcccatgagatcttgcaaaggagatggagaaaatatggctgaatgccagcaag

SEQ ID NO: 308 - DNA, 1096 bp, Homo sapiens
acaagtatgaagagaatgtcgggagaggaagtggtggctatgagtcagcatgagtcatctcgttccaatgagaatgaaggctgaggtgtgcgcctttttttttttttccttcttagtcgtgtgtacatcattgggaatggagggaaataaatgactggatggtcgctgctttttaagtttcaaattgacattccagacaagcggtgcctgagcccgtgcctgtcttcagatcttcacagcacagttcctgggaaggtggagccaccagcctctccttgacaagcaaagtggatcagcaaaggctgcagtcaccagcatcttttccaaccttaatgaactgtatcctcaaaagaacactatcagactggtaagacaagcattattgtcccacttcacagatgaagagcttgggggccctgtggatgtgtaggagagtcggccttcctttttataggccttttgctgagctcagaggacagagcagaagacaaagccgaaagcagccctaagcagacactatcccagcccaaggagctatgcagacagctcctgcctagaggagaaacaattctctccttcagccaggcatgtggcacagaggtgaacaggaaatgcttagggagacagttcacagatatatatgtacttcacagggcacaatttaatccataaatcaatcatggatcactgctaaagaaaacaaaatatgctgccactaatttgccaccaccctgtgagcatgattggatgatgtttattttgattaggagattgctccatttataaatcttcaatacatcctgtccccctaaaacggcatctggatcttttgagggttaaaaaaaaaaaaagtgaaattggatgagggatgagagctggacttctgtgtgtcccggggtctctggatccacagcctggtgcctagcatcagttaagcccacgctggggtcgcatcacatcccgcaaagccacgtgctctgtgaggccaacaggagccccgccgggtggaccagctggaatctcagagagcgccgactctgaaaatacccggctctgcagaagcacgctgggcccagggggcttctagactgacagc

SEQ ID NO: 309 - DNA, 455 bp, Homo sapiens
ccaagtctcaaatattgaagaatctctaaccagggacaccagtccctacgaagaccttgggcgattttgaagtgcgggcacctcgattccccgaatctgtagtgtggctggtatcggtgttcccctggtttaactagcctgtttgatggggaaattgaggcagagaagccaagacatgtgctaaaggtcatgcaggctatgaatggagctggaatgtgaacgcaggccatatgaccccagagcccatgttcttgaacccttagaaagacagcagcaacacacctggtgcagcagctgcttagttggagtggctgacaaggttggcagaggatcccgttcctcccgtggagtggctgccatgatactgcctgcactgaagctgctcctatttctgaaatatgtattgttatttttttccctgcatgttgaacattatactcttctgttctttcgca

SEQ ID NO: 310 - DNA, 337 bp, Homo sapiens
cctggaagagtcctcccttccaccccggatatcactgtgaacctgattccccaggatcaaccatctgagcagataccttggaatgtccccagatttcagagcctcggaccagcagcaacacactctgaagtaggtctcagaagacaaaaagctgaaatcaactcatgcttcctgctacacagaatccactgagaggaaaaggaaacttcaccgaaacttcagaaagctacagaaatgacatccattttcacaatcccagaaggaaagatgcatctgaagggaataaaaacagagcaatggaagagtatttgttaaaataaatggctttgacagggca

SEQ ID NO: 311 - DNA, 468 bp, Homo sapiens
atagaccagccggtgctgatggggtccgggacttgacgatggcgcctgctcgttcctgttgtgttctatctgaggcatgattttctttcgtttttgggaggtagagagcacggggcagaggttgcacctgacacattagaactccgttgtcactgctgtggctgttattcccctcggcaagagccaaggagcaaacaggacgtgaagatcccggtgttacacatccaatcgttcacctccttccaagactatgacattccaggaaaccttcactgctaagaggaactaagatctagagtatctcctcgaggaagtacaactgcattataaattaaggaggaatagtaacaaagagcttgaagacatgcacagctcacaggccccgggtggaggctggcgacatcagacagacagaaccaagacatctgaggggcaaccaggaggtgcgtgtggctgcagagcacacag

SEQ ID NO: 312 - DNA, 2281 bp, Homo sapiens
ggggtaacgggggaaactggggaagtggggaaccgaggggcaaccaggggaagatggggtgctggaggagagcttgtgggagccaaggagcaccttggacatctggagtctggcaggagtgatgacgggtggaggggctagctcgaggcagggctggtggggcctgaggccagtgaggagtgtggagtaggcgcccaggcatcgtgcagacagggcgacatcagctggggacgatgggcctgagctagggctggaaagaagggggagccaggcattcatcccggtcacttttggttacaggacgtggcagctggttggacgaggggagctggtgggcagggtttgatcccagggcctgggcaacggaggtgtagctggcagcagcgggcaggtgaggaccccatctgccgggcaggtgagtcccttccctccccaggcctcgcttccccagccttctgaaagaaggaggtttaggggatcgagggctggcggggagaagcagacaccctcccagcagaggggcaggatgggggcaggagagttagcaaaggtgacatcttctcggggggagccgagactgcgcaaggctggggggttatgggcccgttccaggcagaaagagcaagagggcagggagggagcacaggggtggccagcgtagggtccagcacgtggggtggtaccccaggcctgggtcagacagggacatggcaggggacacaggacagaggggtccccagctgccacctcacccaccgcaattcatttagtagcaggcacaggggcagctccggcacggctttctcaggcctatgccggagcctcgagggctggagagcgggaagacaggcagtgctcggggagttgcagcaggacgtcaccaggagggcgaagcggccacgggaggggggccccgggacattgcgcagcaaggaggctgcaggggctcggcctgcgggcgccggtcccacgaggcactgcggcccagggtctggtgcggagagggcccacagtggacttggtgacgctgtatgccctcaccgctcagcccctggggctggcttggcagacagtacagcatccaggggagtcaagggcatggggcgagaccagactaggcgaggcgggcggggcggagtgaatgagctctcaggagggaggatggtgcaggcaggggtgaggagcgcagcgggcggcgagcgggaggcactggcctccagagcccgtggccaaggcgggcctcgcgggcggcgacggagccgggatcggtgcctcagcgttcgggctggagacgaggccaggtctccagctggggtggacgtgcccaccagctgccgaaggccaagacgccaggtccggtggacgtgacaagcaggacatgacatggtccggtgtgacggcgaggacagaggaggcgcgtccggccttcctgaacaccttaggctggtggggctgcggcaagaagcgggtctgtttctttacttcctccacggagtcggcacactatggctgccctctgggctcccagaacccacaacatgaaagaaatggtgctacccagctcaagcctgggcctttgaatccggacacaaaaccctctagcttggaaatgaatatgctgcactttacaaccactgcactacctgactcaggaatcggctctggaagctagaggaaccagacctcatcagcccaacatcaaagacaccatcggaacagcagcgcccgcagcacccaccccgcaccggcgactccatcttcatggccaccccctgcggcggacggttgaccaccagccaccacatcatcccagagctgagctcctccagcgggatgacgccgtccccaccacctccctcttcttctttttcatccttctgtctctttgtttctgagctttcctgtctttccttttttctgagagattcaaagcctccacgactctgtttcccccgtcccttctgaatttaatttgcactaagtcatttgcactggttggagttgtggagacggccttgagtctcagtacgagtgtgcgtgagtgtgagccaccttggcaagtgcctgtgcagggcccggccgccctccatctgggccgggtgactgggcgccggctgtgtgcccgaggcctcaccctgccctcgcctagtctggaagctccgaccgacatcacggagcagccttcaagcattccattacgccccatctcgctctgtgcccctccccaccagggcttcagcaggagccctggactcatcatcaataaacactgttacagcaa

SEQ ID NO: 313 - DNA, 579 bp, Homo sapiens
aagaagtcctaccactgaaaggatgtgcgggtagaaatgagcaattgcaactagaagagcctgtgtgcccacaatcaagggtaaggaggagtgtcatggagcagctctctactgccctgagaatgacatccccactgttcaccatggccttaaatcccctgcgaattccacctcatcctctgccacttcccgtcactgctctgaagatgccctgatcttgtttcagtcccttggatgtacccagctcttctccatctttgcatgtgtcatagcctcttcctggaaaacccttcctgctgctcatcccagaactgactctccatgtatttactcttattttgagagaagggggcatttccaccaccagaagggaacttgctgtcttggtagccattgtcccctgacacctggcacatctactctatacagtcaccattcaagtggatgttgaatgagtacacttgtttcacagtttggttgggtaagccccaaagcttggttcccggtaggatcaggctttatgagtgggctgagtttctataaaagtctccctaccagtttccaatcttggtgaaacta

SEQ ID NO: 314 - DNA, 413 bp, Homo sapiens
actgacaaaactaccgaaccacgttcctggttgaggatacctgaaggtcgacatttatctgggatcttttgctgctgctttggtatgacttctatcaagatagctttcgacgagaataactgggagatgaaacaggaagctctatgacacacttgatcgaatatgacagacactgaaaatcacgactcatccccctccagcacctctacctgttgcccgccgatcacagccggaatgcagctgaaagattccctggggcctggttccaactgcccactgtggactctgaggcctctgcatttgcgggtggtctgcctgtgatattttggtcatgggctggtctggtcggtttcccatttgtctggccagtctctgtgtgtcttaatcccttgtccttcattaaaagcaaaact

SEQ ID NO: 315 - DNA, 8842 bp, Homo sapiens
ggagatggcaggaagccctggacatacatggtgtgggggctcctccagaggctgttgggatcctcctggatgtggtgtgggcatggaaggaaggccagtggagacaatggatgatcttgttcttagcagatcactggatgtggcagggagtcctaggacatgtgtggtgtgggcttcttcaggtgctggtggtgttggcatgaggaaaggaggtatcttcgagggacaatcttcttcttgtgcgatccttggagatgccatgaggcccctggacacatgtggtgtgggctcctttggaggctgttgtatcccttctgaatgtggcgtgggcatagaaggaaggccagtggccacgagggacaatcttggtcttgggagatcctggaaatgatagggagtcccttgatatgtgtggcatgggctccttcaggtgctagtggattccttaggatggtggtgttggcatgaaaggcaggcttgtatcatgaggaatgattgtcatcttgtctgattcttggagatggcaggaagcccctggaaacacatggtgtggactctttcacaggctgttgaaaccctcctgaatgtgaggccagagacaggcagacagcagatgtattgcagggagctggatgacatggcccttggaacctgtgcacatgcctgcctttctgatgcacgtccatgttttctctgcacctccccggtggtgttggtataaaaagcaggcttacatcagcaagggatgattgtcgtctcatgcgatcctgggagatggcagaagtcccgggacacatggagtgtgggctctttcggaggctgttggatccctcctgaatgtgttgtggccatggaagtaaggccagtggctacgagggacagtcttcatcttgggagatccctagagagggcagggagccccttgacatgtggaatgtgatctctgttgggtgctggtggatcccacaggtggtctggcatggaagaaggccagaggctgcgatggatcatctttgtcttgggagattcctggagatggtggggagcccctgggcacgtgcagcatatgtggcgtgggcttcttcaggtgctggtggatccctcaggatgttcattgtggaaccagcacagattttcatacgaaagttatttctttttaacctcaaaaagtgacagaatggagtgtatcatgaaaaagtctgacatcaaaacctcaaaatgtgatattgattgggtgagatagaattccatggaatttcattgccaaaccagtgaagtgctaattttgacatttgtaccagctaacgtagctgtgaagaaacacaccaatacacttctaaggacagcatagaccaagatctaggtttcatatggatgaatttattcttccctttgaggcaagacaagaaggaaagaaagtattgggaataatgctgccctcccatcctcaagggccagtgggaactctaatattgattggttttcacagaattccatggactttaactgctgaaccaatgatgcactgattttgtcacttgtaccagctaacgcatctgggaggcaacaaaacaatactctcctgaggtaacatcgaatttttagtaaattcatttttgtgtgttgtttttattatttttttaagtaattgagaatttcattaggtgtgcaaggagtcacttaatacaaatagtattaggcattcaatactctcatgagatatctgagccttcagtttcttttattttaacattttacatttttctcaactttaacatcagaaacatcctataagtgtaataaaattcttatactttacatatagttacatagtaaatcctcctgtcttatttaagtttgaaaaatgaacatgtatacttctcattcccatgtatataatctcttcccacagaatgaggtggaccaagaaactgggcttcatacggatgaatttatttttttccctgtgtggagacataaaggaaaagtatagtgaataattccgcctcccacccacaagtccccatgggaattctcacatgttaaaaagcattttgtcctgaaaataacaacaatttttcttagggaatcaggacactccaatgacagtgagactctggctatgccaggcagccatgggctggtcattgtgctgctggtctccatgattgaatagtgtgggtcattggtgacagatagctatgtgctcagtgtctgccacatatctcaggttcaaagtcccttttataaatgtgcctggatggatgacgacttaaaaatgaatctcgttggaatctgagcaaaacgagtgagcaaaccacttctgtgcagttctgtgaactgaggtcaagcacagggaccatgccaggcaaacacgtgcagagagttcagtttggtcagcaactggtaccaaaatggcctgtggtattggaaaacaaacccactcacatagcttacagcacatgaattgtacagaggtctgtatgtgtttgtatatatttatatatgtttgtgtacatatatctttggggattatatggcatttctttcagtgtttggctggcagtgtccatactctcatagtaaacagaattacacaagagtagagggaacagtaggaaatggttttgcctaccctagagtcttttatacatgtttttaggtgctataatcttgtgtgtgaggtcagtctctcaggttcattagatggacagtgtaaaaggtattatgaggttttacatattatttatctattaagtaaaagaaatatatggaaattgaagagtagcttttatctattaaagaaaagaatgtatggaaattgaagggtactttctatttgtggaaagtcttaacattttaatttccttattgatcttgtcacagaagttggaatttaagttttgcctgtcactcaaagagaagctttttagacatttgattaagggattctagtagatgctatagtaaacatttctaattgtaaaatgattaaatttgcaattcatagagttttatgtggatttcattgcctgatattcattatttttattagtgggtttcatagatgtttaaagggagatcctagttttattgtgtgatactaagggaggccttttggtcttagaaaactgactttcagtactacccatttccagggagtgagcataatttttattctcataccacatgggcaagtgaatatctatggtttatttcttataactcgtcattagtaattatgaaagtaagaaagttgacaaatgaaactcttttaattatgagggtttcatttgtcgacttcctacttcctcagtgtgctttgtgtattggaggtaatactggaattgcatggaattcctactgctgctccagtaacctgctgattttgtcacgtgtaccagattcgttgtctggcaatgagaacaatacacttcagaggtaatattgcaatttttagtaagtgcatttttcctgggttcgttctattattttattttagcaagtaagattataattggtttttcaagcagtctgttaatccaaatggtgtgaggccctaataatctggttagtcatctgaagtttctgtgttctttgtacagtatttttatacttcctctgttttcaaataacattaggataccctactagcaaaataatttagtatattttatatacttgtgcatagtaagcctgttgtatatgtacactatttgcatggttggcaaattacatttgcactttttatttttctataattttttcctattttcaaaggttaatgtggaccaaaaactagatttcatataaaagagtttattccttctacttgaggtgtgacatgaaggaaagtaatggaaataattctgccctcccattctcaagggccagggggaattcaaatattgaacggaagtgattttggaattgcatggaattctcactgccatcccaaagaaatgctgatcttgtcactcttacctgtttcattccctgggggcagaacaaaaggacgcactccaaagatcggcatgaaccaagaactgggtttcatataaaatattttattctgtcctcttgagatgtgacatgagaaaagtattgagaatacttctatcacctcatcttcaagaatccgtaggaattctcccatggtggactttacggttaacctgaacaggtcttggaaaaaggactttaaacattctcctgttctgtggaataagtatacttttttctggacatacaccttgtcagtgagttccatgtgatactagagttgcatagatttttaacctttacgccaatgaagatctgaggcaaacattgccccttttttagaagtttgcatttgtcactgataactgtaataattgatcttgttgaaaagcctgggaaatgaagatctgatatgtcacttttaccggcttcctcaactgaaaaagaatacaatgaaacacgctgagaatttttgtgctttctcagtcttgctgatgatctttctatgggcctgaagcgtggagagtgccagagaggctgatcctcagcagtgtggcagaggaaagttgggtgcgactaaggggtatgcggtgcccacatgccactgggtcctcagcagtaccacctggtgagcgtcactcttgagagctgagagtaggtgggaagcagctcatggtgagagggttcagaggccgcctttccctctctgcgcactgcccagttcttctagtcacatgtcccgggacagtaccatacctgtgtgtgtcctgcctgcattgctgtgaccacttttagtggaatcaggtgcagtgcagctctgcagcttctgcaaattgccacgctcccactctcaagcaggttgagtgctacgagtgatttttagaccatttgtttattcccttatcatggctttttgtgacttcttcctccccagtccgttgggtcacctttaaaggtaaagtaatcctgaggtggttgaatttacggaaatgctatgcattattgtgaatgggatgttcaccgggccaacatcttcttggaactttgagcaaactgatagtctggttgcacatttgatttgtctggcagtaaatgttggacagtatttggactgatggaagctagagacaaacacattgactattgttgaataacactggaaacatcttaggagagcagtacattagctaatttaataggtacataaactgaatcccactgtcttgtgcttgacggaccagcagacacatatgcttgtatcgttctcatgtttctacatgtttaccctattcccacaggtcaacaaagacaaggcacctagccccacatgaaactttattcctttcccttttgagatgtgacatgaaagaaaataacagaaatgatttttccatcccatcctcagggaccagtgggaatgaattttaccatcccaccctcaagggccaggtcaggtcgctaagcattttgtcactaaaatattgcccttttttagggattatgtaatactctataaggcactgtctgtgctgggcagcatggagcctgggtcattgctgtgttgggggcttggtctccatgacttaatagggtgtatcagtgtgtcccagagaagtgtactccagagtgctcattttctttcatgtttctgaagcaaacagtgcccccttttttagaagtttgcatgtgtcactgataactttaataattgatcttgttgaaaaacctgggaaaacagtgagttaaataataacttctctgaacatgaggtccagcccaattacctgccctaagcaaactatatggaaggagagttcagtttgttcagctatgtggtcccagcaaggactgtggtactggaaaactaaccagcttacatgcactagagaagtagaattggacagtgatctgtaggtacccagtttggagatgaaattgcaactctgagttcttgattggcaacataaatacgttgatagtaaacagaccctggggaatcagcacttgagttgtgaaaagcgggaaatagctatgcctacactagagccattcacacttttgctggagctgcaataatcttctaagtcatgcttgctctcgtgagggcaatgagatggtcacaatccaaggagagttggggttttcacttttcatttctctattaagtgaaaaaagtatatgaaaattgaaaaatagatattacttatgtaatcttcacagtataatttgcttgccaagcagtcactgggatttaatcagtttctttgtctttcgtttttctcataagctgagagagtaattttgtgtgcacagaagtactgtcttcagctacatgctgcattaaacattcctagatgtgaaatgattaaatttccaagtttttaaaatgtggatttttctggccacttttatatctcttcaatgggtttctaatggatttaaggagagagcctagtcatgatgaatggtgttgtgttgggtatgctgaggaaactttgagaccaatgtttcagaaaaaattatttctatactgtcatgtttcaagtaccgagtattgttcttgtcatacagatggtccagtgaacatctctggtgaattccttacaaccaacctcttgttactaaatattccattaggaatgttttgtttctcaactccctgatttcccctttatagattggaagtgatattggtggaagacaacattttgccgcttggaattctcacctccacaccaaagaagtactgtttttgtcatttgcaccagcttctttctccaggaaagatcaaaacgatgcactgcaaggttaacatccaatttttaatacatgtaattccctggattatttttgttgtgttattaaataacttagaattttttttacaaagtctgttgaaccaaacactgtaaggcattaataacctggtgagttatttgaggccttttttcctctcctagaatttttgcacaatttatattttgaataatatcagagacatcctagtagagtaatgaattagtacattttatatgcagatacatagtgaagcctcctttcttatgcatatttgacaaatggacatgtatatttctcatcttcccatatttttactccatttccacaggtcatgtagaccaaaatgtgaatgtcatatgaaagagtttaaacattgcccttgaaatatgacagaaagtatcagaaataattataccattccatgctcacaggccagtgggaattctcacagtaagcattttgtccagagaatattcttcttagggaactataacattccaatgataatggtagtcagccatgtggctggatcatcgttcctgtatcctggtctctatgacttagtgtggtgatggtgtcattgtgtccaagtgtgacagaattgttagtgtgtagtgtctgtctcctatctcaggctcacagtcccttttataaacatgcctggattgatgatggcttcagtatcttttggaaatctggactgagcaatagaattgcttctctcaaattgatttcaagtcatataaaaggccatgttacacatatattgttaatctgagggaggctgtgatcatttaagttgtattttataaacactaggaccaccagtaagaaaacaattcaaaaaatattaaaagaacaaccaaagaattaaaatagaataaccgaaaagatctgtttaacacaaaagaaggcagttaaagatgaacagaggaaccaataagacatatagaaaacagataggaaaatgacagacataaacccagccatatgacaattatattaaatttttaagagattaggaaattccgttgttttttaaacatgagcaactatacgctgtctacagaagagacactttagaacaaaagatacaaatagttggaaagtaaaaagatggaaaaagctatatccagcgaatccagaagagagcagaagtggctattctgacatcagaaaaaagagactttaagataaagtattgctagagaggaagaaggatagtatttaatgatagaagggttaatatggaatatgtaacaattacaatcatatcagcactaacaacagtgcccaaaactacatacactgaaatttaacatgattgaggggatcaataggcaattcaacaataaaagcttttgttcataccctcttcttaatcagtgataagtcaattagatagagcatcattgaggttacaacatacttcagcaatgttgtcaaccaatttgacctgagatagatagatagacagttagacagacagacagacagacagagaaaacttcacccaacaacagaaatacaaattattttcaagcatacctggaacattctccaggatagagtatatgttaggctataaaactgtactcaataaatttaagattgaaaccatgtagagtatgttgtgtgaccatagaggaattagaaatcaacacagaaataaatttggaggtcacaagatatttggaaattaacacactttacagagcccattggtcaaaaatatatatattaaactagaaaggccgggggtggttgcttacacctgtaattccagcactttgggaggcgtaggtgggcacatcacttgaggccaggagttcaagaccaacctgggcaacatggcaaaaccccatctctacaaaaaaatacaaaaaatgagttgagcatggtggtgcatgcctgtagtcccagctactcaggaggctgaggtaggggaatcacctgagcccagcaggtagaagctgcattgaaccaagattgcaccactgcataccagcctgggcgacaaagtgagaccctgtctaaaaaa

SEQ ID NO: 316 - DNA, 379 bp, Homo sapiens
ggtacttctaaacttcgtggaagagccctgtttcataaatctgagacagccttggtctgagggagcaaagacagagaattcacgtgctgcccaggcatagccacatagcaggtggacatccctggacacttttctgacaaagcacgcaatgtggggacaacacagaaatccaagaaaggcaagaccaatttcaaggcactaaataagtggactgagacaagaagtacacagatacttcccagaacaaaagattttatgtcatagaccctcattggattttcctggaagtacggagagttacatccagagaactctgaacattttggaaggaccccaatcctgcaaacaatgaatggcaataaatcctgggactggaaag

SEQ ID NO: 317 - DNA, 1870 bp, Homo sapiens
aaatgccatcccaattcccctgatgttaaaagaaacatacagtctattcactggttttgcaaaaaacactaacctacaaacccttctgggccaacaagcttgagtgcgatccggtctgcaatgatggaggaattgccatgtgcgatgttggcaaacgggccagcatggacaaacactggagtgccctgtggaaaccaggacaccgtgagctgagctgccaatcctgcttcaaagtgggatcacacattcaacggtatggaattgatttggaatcggaaggaagaatacttcccagagggaaaatataaagtcatctcttttatttcagtaacgtcccagtcacaggtgtgaggaagaatgagaagaaagagatgagcaagtggagaaggtcttgactacccaggttaagtgtgcttaattttttttttttttttttgacacggagtctcgctctgtcgcccagtctggagtgcagtggcgtgatctcggctcactgcaagctctgcctcccaggttcacgccattctgcctcaaccttccgagcagctgggactacaggcgcccgccaccatgcccggctaattttttgtatttttagtagagacggggtttcaccatgttagccaggatggtctcgatctcctgaccttgtgatctgcccaccttggcctcccaaagtgctgggattacaggtgtgagccaccgcgccttgcaagtgtgctttataaccactctgctctgactgtccaaaaccaattcaagaaggcaggagtcactctgctcacctccagtgtctgcatgagattgggcttgattgcgtccttcataagcactgtcagtgcaccactcaccccctacaaaacaaatgtgtgcagcatcaactcccaccagcaaaaaaacccaaccttctgaaaccaatatttgacattctaggcttacccatgttagccatcttggaccaattgatactttcacctgaattggaccattcatggtttttttctggatatgctatgaagttgccaattattaaattatttattttttgagacggagtctggctgtgttgcccaggctggagtgcagtggtgcaatctcggctcactgcaagctccacctcccaggttcacgccattctcctgcctcagcctcccgagtagctgggactacaggcacccgccactatgcccggctaatttttttgtatttttagtagagacagggtttcattgtgttagccaggatggtctcaatctcctgaccttgtgatccacccgcctcagcctcccaaagtgctgggattacaggcatgagccaccacgcctggccaaagttgccagatagaatacaaatgacattcacatgtaatatctggaaaaacatgtaactctagaaacaagcatcttaatcaagctcagctgctgactgatgtgagaaatccattctagactattttagagcacgacaatgctcgttcccagagtactcagttatttgtaactctggtatctgggcagaaatttctataaataccaaactcaatatgtgtcttccaaagctgaaactgcaatattacgcaagagttcaataccaacttttaacatcaggtcactctattaagccatcaaagtgtagctgaactacctagcaacaaagataaagcaatggtactcttgatgttctctgcaaattgaagtcatacacccacttttagagatgcccacaggatgaagatgttactcaaatcatctggaacttgtgatctattactaaagcataccagctattattcactctgatgtactttttaaacatttcataattatcttgtaattagcaaaataggattaaattgatgaattaattgcaa

SEQ ID NO: 318 - DNA, 451 bp, Homo sapiens
gttagcgggagaggcagagatattcagaggtcttttaggatgcgctaaagggtcgtgagggctctcttaaaattttcttcacaagcggttatccagtcgtgccccgcggccctgctgctggccccggggatctgagtcgtaccctcttgtttttctctgagtcagtcttaaggtgaaatgaagtgtggcccagtggctcctcactgtcgcttctctagttttctgcctccttttagaaaatgtgctaaagaacatacagacacagagcagacaggccacctttgcaaccacatggaggtttgtctgatattgaagctaaagaagctaagctggaagacagagagaccaagtcctgatgacattgtttgaacccagagatccagacatgcctgaaaactagttttaccactggacttatccgttgaatgagccaataaactctcttttatac

SEQ ID NO: 319 - DNA, 1114 bp, Homo sapiens
attcatggctgaagcgtctgaaacaagactaacaagactaacgagattaacaagagaaaaacatacaaatttttaaaatataagttgtatgtgacatagaagcatttataaagaaaagaagaccagaagaaacgggtagacctgggtatttttatgctacttttgatgaaaatgggaatgcttttggagacgcatgagtgaataaaaaaatatgatctaatggtaataaactagaggaaacagagcaaagtctgttcagattcttctctgtgatgctttgtcttcagagctccttcaggttggaaggaatacctttacttgggggcatgtcaattcgtttttctcacttgattcatctttatgacttcctgaggacagatctaattctaaagtaaccagaagcctggccatctcagagcagcaaatccctcaaccttggagcacaaatgatcgctgatagagtctgcataaaatcatcttcctctatctgacagccatgagcagagccttgggggtaaaaaaagccacagccttaaatctcttcactcagaaattaccatgaagataaaataaataaatggaaaggactatcaagaagccaacaaaacataaacaccaaaccaactcatcttgtttcactttggaaataaactgttcccagatgtgagaccaacaaaattaatattaagcaattaaaccagtaaattataaactgatttatcatttgggaagtttaaagtacagagagatgaggtacctgtagccagaattacacatcatttcaaaatatgtagacaaaaagaaaactgaatgaacagagaaacattgcagcaatgcacagtcttaggacgaatgttgctgtttgcagacagagaatgtttgccatcttgtgtatagcctcaaagccatactgagataatagcattgttgtcaattgcttgaaaaattttcacattcaatccttcatgctatattggttggaagaggagggaagtcagttcttactgattacttctcagtgaacttctaatatttgcactgtcacttccattcagggtaatgatgtgtgctgttatttgcacagatggtcccatgagttttgagaccacagcaa

SEQ ID NO: 320 - DNA, 596 bp, Homo sapiens
atgagcccaaggagggaaaccagaagagccccccaggctcaccagttgtttgttggctccctacaaacatgtcattcaagtggctaatcttacaacagcacaaattcatctaaccagagatactctattatagcaaagaagaaagataatttcattgagccatcctgttttacaggtaaggaaaccaaaggccatagaagacttgccttatgtcatgaagaaagtttatgttagaactcagggctcccaattccactgttctttattctacacctgggtggtcacaactgaaaatgttttgcttatttctaaacagaaatcattttttgacatgttcattttaatgatgtgtctatgcctggggctaatgtcatgaaaacaatgtgtctggtaaggagaaaactgaaaaagtcagcattaaaaagacatttaagtccatttcaaatgcctcccatatgcagactccactttatctcctccagttctctaaaacccttcactccttggctttttctggctaatacacacatctagctaagaaagctcaacttttctttttactagagatgttctctctgtgtgtgtgtgtgtgtgtg

SEQ ID NO: 321 - DNA, 867 bp, Homo sapiens
gtcccttctttccgctccaacgcacggagggtgaggtcggtacgcggtggtggcgtcacggcgccagctcctcccgacgccgagaccatgggggctcagctaagcggcggccgcggcgccccggagcctgcgcaaacccagccccagccccagccccagcctgcggcgccggagggcccggaacagccccggcatccgccccagccccagccccagccccagccccagccccagcccgagcccagcccgtgggggccgctggacgacgtgcgcttcctcatcgcctgcacttcctggtactgacggcgtcctccgcaggatgtcgcccgtctgtccgccgtcccctgtggttcttgcctgccttgtctcctctccccacgtccctgcgtctcttacaccccctcccacccgaggctccccagagatagcagagaattcgaagaggtcgccggggactggaaagaagtcccggcagggccgccttcgcagtctacaccccagcctgcttcccagcctacacccagacccagctcagaccttcgtgaccaccccatccctttctccggctggctgggtcgggggcatccctctctgtcgctggcttccagaggcaggacaggcctcctggtaagcccgcaaagttgctgacctcctgacttcgtctgccttttattaatatctgtattgctgataaccgtgctcttgactatgtgtcccaggtcatgtcccaggtcatggagaagcccgtgccacagtgaccctccccatactcctgggggggctgctctccatcctggatcgtaaggaggcatcatcaggctgtgttcctggaaccccaataaccctgggcccccagggccagcctgt

SEQ ID NO: 322 - DNA, 844 bp, Homo sapiens
agcttcggcacaagggcccaactggaattccacttacggacggagtctccttctgtcgcccaggctggagtgcagtggcgagatctcggctcactgcaagctccgcctcccgggttcacgccattctcctgcctcagcctcccgagtagctgggactacaggcacccgcccaccacgcccggctaagtttttgtatttttagtagagacgaggtttcaccatgttagccaggatggtttcgatctcctgacctcgtgatccgcccgccttggcctcccaaagtgctgggattacaggcgtgagccgccgcgcccagccccaggcggaaattatttcaactgggtcctgagaactgggcacttttcaaggattgtcagcaaggagcaacttcccaaatatacatctaaaaagatgacaaactcatgtggaatgtggatttaaggaggaaggcctgatcttttggccagaaggagattaaaaagatgcccctcaagatggctgtgcctgtcagctgcatggagcttcgttcaagtattttctgagcctgatggatttacagtgatcttcagtggtctggggaataacgctggtggaaccatgcactggaatgacacacgcccggcacatttcaggatactaaaagtggttttaagggaggctgtggctgaatgcctcatggattcttacagcttggatgtccatgggggacgaaggactgcagctggctgagagggttgagatctctgtttacttagatctctgccaacttcctttgggtctccctatggaatgtaagaccccgactcttcctggtgaagcatctgatgcacgttccatccggcgc

SEQ ID NO: 323 - DNA, 1522 bp, Homo sapiens
agtcgtgtgtacatcattgggaatggagggaaataaatgactggatggtcgctgctttttaagtttcaaattgacattccagacaagcggtgcctgagcccgtgcctgtcttcagatcttcacagcacagttcctgggaaggtggagccaccagcctctccctgacaagcaaagtggatcagcaaaggctgcagtcaccagcatcttttccaaccttaatgaactgtatcctcaaaagaacactatcagactggctctgccgacttccagttctggaacaagatggttaaactcatttttccctgctctgctcctctaaatacaactaagtaccttggaaactattcagcagacaatgataaagggctctgaaagctagaagaaaaggtgtacttgcaagaaacctcaggacttgagtaacagcaacatggcaggccagaaagcagacccagggaggatagcacatgtcttcggctacactggtgaaggcatcgtgcctgctccacagcacatttttattcaagtcttggacgagcctgaggatgtctacaagtggaagaaaagaagccactggagcagaaggtggggaggataaaatttggagcaagattctcaaggaagcaacaagatcctaaggaaaggagaaagagactacctactgcatttctgtcactcgctgaaaaggacactctgtcagaaaatcttctagcaaacttcaaagggcaaaatcaccccttgttactgataaagcccagagagcttcagcagctaacattccctggacagggcacagcaaggatttgaacctaggtcagtctggccagaacacccacaagctttccttaactcagtgtgctatctccccacgactaggtcactactgctttataatcacctttgtagccaccagtggattttgctcatcagtatttttcaggcaattgatactttagatattcagctgcaagacgtatgcagttttcattgacatcttttggagaaactgacaaacctggacttgacttaatgcctttggaaccttccaagatgttatataactctagatagaaggctgggcctccatgatgtcaggaatgttgcattcttatttccccatagataaacccatttgtccacaaagtcaaggagtcaggcagaggcccttgccatggggctttttaggataaagcaacaagcctggactttgctctacaacagggttttgcatagggagtggtatgaccagatccctcaagaaagaaagcttagagaccaggccagagtccactgcagtagcccagtcaagagaggatggtgacttggacttgtagtagagccagttagaatgaaagaaattgacacattcagaaatggttttagagatagagtcaaactggacctgataaagaactagagaagcggagtgaggataaagagaagagccatgactgactcggaagattttgtcttgaaaaacttgagaactcaagacagagtgaaataaaatcacatgtgggaaaaa

SEQ ID NO: 324 - DNA, 589 bp, Homo sapiens
gatttcaatttggaaaatggcatggaaataatccagcttgaacatcgtcctcctcacctcctggactagggcgagggccccttatatttcttcatggcaattgtgtcacagttcaaacgctcgtaccctgactccatctgggatttggaatgcactcagggaagtggctgtgcatggagactagaaatggaagaggcttccaaggtcatgcctttcaggctcccttcaaattctacagctactgtgaagagagttgcattcccacagagaacatgtcagactggaggaaaattgtgacaaaaggtctccccaaaggtctctgaaacttcgatcttatctcattccacaaggcaaaggccagtttcctaaatcaaagaatgaaacaaagtacatctttttcaagcattgttttgacatcactcccttttatacaactggacaggcactcccattctctttaaataatttttaaacactcctgaactttggcttggagatcctcatttgaaatgattttatcactctagacatactagctcatattttttaacttcaacctggcaaaagttaatatccctcataaaactct

SEQ ID NO: 325 - DNA, 391 bp, Homo sapiens
gaaagcgggctagcctgcacgcacgccaagatggagctccaggctagcccacagaacagcccagccgcagccgtcctaccagaccagcaccttgtaaccacagtctaacccagcgggcaccaggcgattgtgagtgccacggggctgaggcctgcgccgacctggtctgctggtgctaccaggcttgaacagtcttcaaatccactgctattaggcaaattacctggctcccgctgaactccagcacctagaactatgtcacactcgtagtaggccgctgcattggttgaacaaatgattttgaaagaatgaatgtcttcctctgtgcctgcatttcctcagaaggctgtaacaaagattaaataggaaaattcgtggaaagttcaattac

SEQ ID NO: 326 - DNA, 734 bp, Homo sapiens
ccttccacactgtgggaggtttgttcttttgctctttgcaataaagcttgctgctgctcactctttgggtccagactgtctttatgagctataacactcaccgggaaggtctgcagcttcactcctgaagccaaggagaccacgaacccaccgggaggaaggaacaactacagacacgccggcttaagagctgtagcactcactgcgaaggtccgcagcttcactcttgagccagagaccacgaacccaccagaaggaagaaactccaaacacatccgaacatcagaaggaaaaaactccagacacgccgcctttaagaactgcaacactgcgagggtccgcggcttcattcttgaagtcagtgagaccaagaacccaccaattccagacacactaccaaaggcagaggggagctcctagacaaagatattttgcttacaaatggaacatatcaaatcaagcttttgtgaacttgagggaagaaacaaagaatatgaagcctaaatggaagtgtcaggaaatggtcgccttgcggacaaggaaacagcagcctggaaggccaggagagggcagactacccacctaaccctctgcagaattttgtgtggaccctggagaccagaaactaacttctcctgcagagacaaggtcttgctctgtcaccctggctggtcttgaactcctggcttcaagcaattcatccatctcagcctcctgagtagctgggattacag

SEQ ID NO: 327 - DNA, 494 bp, Homo sapiens
cagacagcatacaccatccccatcatggccttcgccttcgtctgccaccccgaggtgctgcccatctatactgagctcaaggacccctccaagaagaagatgcagcacatctccaacctgtccatcgctgtcatgtacatcatgtacttcctggctgccctcttcggctacctcaccttctacagtacggtggcaccggtgggcagaggcctaggctaggctggggggaaggggctggttgtggccatggtgccctccataccgaggcgtgtggtgcctggctgtgccttgccgctgtggaggtgagtctgcatgccaatccccacagtgttggggtcccctaggcagctcagatcccacctccttcctggggccacctactgaccaccctccctgcctgccacagacggggtggagtcggagctgctgcacacctacagcaaggtggacccgtttgacgtcctgatcctgtgtgtgcgcgtggccgtgctgac

SEQ ID NO: 328 - DNA, 183 bp, Homo sapiens
cccagactccaggctgggtgacagagtgagaccctgtctcttaaaaaaaagtgctgggattacaggcatgagccaccgcgcccggcctcatgtagaacttttaattgaactttttgtccccgtttacattataatgtgaaaataaaagatgaaaatcaaaatgaaagcatttgttgatttgaa

SEQ ID NO: 329 - DNA, 6606 bp, Homo sapiens
ggggtctcgggcaggggcggggagcttaccgacctcccgcccccgctgcgcgcgtttctggccctgccagtgtctccgccggttgaaagcgcgtgtctgcgtcgggttctgttggagtgcgttcggtgcgccgtgggtccgcgctgcttccacccaacttcctgttagtttctctcctgtcacaatggcatgatctcggctcactgcgacctctgcttcctgggttcaaggattctcctgcctcagcctcccaagtagctgggattacaggttacattagttatacactctggaggtgacttgacctgtcattgtgaacaattattgctcttggacgacccaggacataggccagccagtacgtaccccagtgtgttggagaatcgcgctcggcttcttcctctgtgctgagtcatgaaagttgccggagcaggtgcagttacacaacctccaggtatgatcctgtttaaggactggatttaggataactacttagaggttaaaagtcacaagggtgtatggatgaggctggagtgatctgggaccaaagacatctaggcttgctgtcaaggcttctgatcaacatgagatgaccgccgtgtggtaaactgatgaaccctgaccctgatcaacatgagatgaccgccgtgtggtaaactgatgaaccccgaccctgatgaacgtgagatgaccgccgtgtggtaaactgatgaaccccgaccctgatgaacgtgagatgaccgccgtgtggtaaactgatgaaccccgaccctgatgaacgtgagatgaccgccgtgtggtaaactgatgaaccccgaccctgatgaacgtgagatgaccgccgtgtggtaaactgatgaaccccgaccctgatcaacgtgagatgaccgccgtgtggtaaactgatgaaccccgaccctgatgaacatgagatgaccgccgtgtggtaaactgatgaaccccgaccctgatcaacatgagatgaccgccgtgtggtaaactgatgaaccccgaccctgatcaacatgagatgactgccgtgtggtaaactgatgaaccctgacccattaggctttggctacagaatgtggaaataagttgtgttactacatgtgtgtaatcctagggtgcaggacaccggccgggaggttccatagagtgatgggttctgcaggtaactcatcctctagtcctctgtaagctcctagaaggaagaaattatgtcctttagactaataaaattcctccaaaccaaatacagcacctactgtgaagacacaaagatacttttagaatagtaaaaactttatccattgagaaattccttaatgaaacagtatccaagaagtcatttgccagcagatttcttagaggtgcgataaagaagaggacattgccagtcgtcacagcagctgcaatagctcctctctattgttaaacagtgggatatcttgtgcaggttttcagttgacaatcaattttaaagattagtttcggtccccatcaatcaattatttattaacccatcaataaaaatttaaatgctctgtgaggtacaatagctattaaaagagacagaggcactttctgtgtccagaggggcttttagtctgctctggaaagcaagatgcgtgcagatgagtgacgcagtgcatcgtgtggatgcaaagggagggactcacatgggaaccagaggagctacgaagggaggcagtggggactggtgggtcgagacctggaaataacacatgaataggcaacaaaggtttcctttcctcttccatgcacttcagtccttgaaaaacgtcttaccacggaattccacagcgtaccaagcgattccacagcttgatggcacactctcctttctcagcattcttgaaaatggcgtgtgagccaagccatcttactgagaaattaccttaaaccatttgatgaaccaaaaatattttgtaatacccatctccgacattaggtaggcaaatcacacagaaacaccgaggtcttctgagtcatatttatctgaaaaatcacagcttgggtgcatgtgaagccagaggagcactcctggggcctgcggtgccatcactcagctcccctgggcttcacatggccatggagcacccagcaagtgtaggctctgagccttcagggaggggcggcatcagccagcaccatcgtctcctgggtcttgtgcctcttccttggttgcggtgttgtcagggccagaattgggcaattccgggtgacatccaggtgtggctgctgacacggagcacaggtgaggttcactgaggtaagtgggccatggccttgggcttctagttcagagcacaccatccactcagcatgtgaacccagctccaaagcgtatgtgtgcatgtgtgtacctgtgcacattgcgcatgtctctgtgtatgcatgtgctttgatgcatgttgatgtacgggtgtatctgtgtattgtgtatgcacacacgagcatatgtgtacatgaatttgtattgcacatgtgtttaatgcgaacacgtgtcatgtgtatgtgttcacatgcatgtgtgtctgtgtactgtgtgcaacagtgtgtgcaagtgtgtatatgtgggtttatgtttgtacagtgtgtgtagtgtgtgtacacatatacacctgtgtgcatgtgtacatggtatttaagcatgtttgcacgtgtgtttgtgcttgcatgtgctgcgtgtttgtgttggtgggatgtggggaggctgctgtggagacaaaagctggagagaacttggtagagtaacccaggtcaggaaatggcacctgcaaaggaaggctggagtgcctgggattcacgttgaaatggccaatccgtcagctgggctggacacagccatcacgctgggcagctgtgaggttaaaacagaaagtctgggctgtggggaggctgagaattgagatgcatgtatgagatgagtcacgagggccaagtggtgtgtgtgagaaagcaggcacagcaccactaaacactaaggagatttcaggggagttacgggtggagggaggacatcagatctaccctggaagttaaacgtgtttcgagtgcattaaatactatgggccacagacgccttgtctccatatctactcttttataaatgaagtaaagttcttgggaaatacttttctcactctaaagctcacaatctatcttgcaaaaaatattttaaattccatctcaaataagccagggtgaaaagggagcctgtgcaccagacactgccagccttgcctggctctcgccttcttgctcttccttccccacctgctggggattttcttaacgatggagatgggtttgggtttgtcctgctgtgctctgctccccattcccggatccaaggtcctgcctctgtcctgtcccctgagccacctcagggatgcagggtcccccacctggtcaagtgcccagtgctgtgttgtcatttgcaagttcttcctgtgactgaactccaaatggcactgggactgctgactccacccactggacaacccgtgttcttgcttttggggtttctgaaacagccccaagactctgggcatcttgattttgctcccattgcttctcaggacaccctgctcctgtggtttgcagccccggccttctcttcgaggacgcctctgctcttctgcctcacactcggattggaccttcttcagcacagccagtggccgaggcttcctccctggggctcagtggagcaggacagatgctgcatccaaactcttccattgggttccagtctgttccagtcatgcccttgagcctctaaagctcctaggtgagagacgtagcagctgacagcacttcccacttgatttgggtggactccagcctccccagcaacaataagagatcaaaagcatcgttgaggaagcagcttgctgaaacgctgagtgcccgccactctcaggtcaggtgggaccggcaggccagcatgagttcctgaacacttggttctcaatactggccacagccacactgtaaggggaaacaagagggcactgtatgcaaacatctcttgaactctggagtctgctcaccttcctgcctcaagcccctctcccacgtggtccagtcaccattctccacagagactaccctaaaacccagcgactctcgtgtgcctgcagaatggcacagcccgttctcatagcagcactcctgtttaatcagagggatgttaacgaccaagtcatatttgctcgatttgtgttcaacatatttcatttgtaccgataaaacttaaaaatatccccacacatgcattgcctattaaagagtatcttccaggtacacctcccttacacatcagttaacttgataatttcttcccattcttgtgcaataaatttccttcctgatcagctctgtccagcagcaacaataatccacgtagagacatgcaaactaaaagtccgttagtggaggcacgaagctgatgaggcttggaaaaaaatgaccgatttgattaaaattaggacccatgggagtggagctctgcctattttagaggcaaagtaaatgcctgggagtccaatcaccgacattctgtttgaggtttctaatcacaaggaagatggagaaaatgcagaacaagtggtcaagaacagggagataataaatagaatatttatgggctgaggaaaacaattaccaggggaaagcccaagaagcaaagatgaacagagaacgtgctgactgcgctcgtttggaaaggcctcatggccaaaggaggagaggcattatgaggagcagtgaccgagtgggcaggacccccggggatcaggaaaggtgcacggggggaaatgagaggcctgagcggcttcccagcgaaggtttttgaagcacggtttgattttctctctccccctcaccatccccaaattttagttgtgactatctccaggtacatggcttgcgacaggcggtgtataaaaactaatgtcagtttaattttaaaaccttagccattttctggaacttaaatatcaaagagaaaatgtccacatatgatgttaattgaggtttgtctcactggtgatttgtgctgattcaattcctgtttctttttttttttcttaaggggtcagttttagaattgggagataggtgtataacatatgactatacagcgcaggttggttttttaacatagaaatatctgcctttaaatgagaactgaaaacggagcttcttggaggccacctgctggtggcagtgatctgaccgctgtttaagctttctttgaactcctttttttaaaacagcctccataatcaatggtgtacgatctactctcgtggtaaaacttactcagtgaagagtgtgttttattttctgaggagctgaactgttccaacctgagtattctgaataaggacagtggtcgagcatgagtgatgccatctgggcttagaaataagtgggcctaaaatctgattgttttcatacattgttcagatattgacgcaaatagcaatttattttgtaaaaaatgattggtatccggaacttgcaacagctgtgtgtggcttgaagggagatgaagtggtgaaggcctggtttccaccgaagctctcacagcccagcctttcactgtgtggccgggggaagggtgctccgggtgggggacgggaatggtgggactggggatgccacgggacaaggctgctggcctggaaggtagtcacgtggagaaccgcaggagatgagattggaaagtagtaataagccatgtggataagaacagaggagcgggttttaagggggacgtcctgaaatgctgctcatgtcgtttcagttccatagaccacaggaaatgcaggtgagagggcagcccggtgggaaggaaggaagagggtggtggtgagccaggtgagtgtggagccgcccagggcaccgtgctgtgcgatagctcaggcatcgggtgcttctgccaaacccttcagcagctggtttggggccaaacgtccttcctgtgtgagagaaggcagagcctaggcagcattccaaaccccatccagatgggaggctgagtgcagagcaaacggagcccagcactccagagccgtgtcccttcactgccatgatcacatcacaaacagcgaggcttggagaggacttaagagctccttcaatgccatcttccatccactgcgtgagccagaatagaaaaaaaggaataagaagaggtcggttaagctctctattaagttgagaaaatgggaacttcaggtgatcatgtgagatattcaagttaaaaaaattatttaaaaagcacattcttattattaaaattttagaaagtacagagaaggaaattttaataacctacacctagaacactaagatactggtaacgtagaaaaatgtgtagttaatgccttgatggattcttttctatttttttctctagcaatatttatgtctatccacagaaagcgtacactcatgtatttgcatggctaatatattttatgtaaagttctatatatttctcaacatttcacttaatatttctttataaacatttttccagtgaataaaaatttttccaaacagtaa

SEQ ID NO: 330 - DNA, 416 bp, Homo sapiens
tccaagccccttacaggctccctgctgagccctgtaaacagttgcgactcggcagggagcctgtaagcacctgggaccctcagaatatctgtgtgtcagcgtactttattcaccggtcattgggtcaggggtctgcaagggacagactccccacagctggtgacccctcgagaggagccctgcccccagctggtgccccatgtgaggcgctgtgtgaggaactgtgtgaggaatgctgtgaaggaaacgcgacgaaccgcccgaaaacgaagacagaacagcatgtggagactcacacagtgaaattttcctccaagaagtactgcatgaacataccaggaaaaccaaaagaattcacaggacctttgaaagaagtggcttgccgctgcaaactccatgagacagctgaaaaactg

SEQ ID NO: 331 - DNA, 467 bp, Homo sapiens
cccctaggtcgcggggcagccggggcggaaggggcttgttcattattttgagagtttgttgtgaacgtcataacctttcgtccttaaatattgccgatacttgacctacgcaagagacaatgtcatgtgattcagcctaatatctcagaggatgcagcattcaaggttctatcttggaagcagagactgtgccctcaccagatgctgaacctgctgagcaccctgatcttccacttcaccttcatcagaactactgctgtgattgcacctgccatcttatgcagaaatgacctgaagacagactgaaacaacgtgttctacagcctgaaaatatctaccttgacttacagttttattaatgctggtgtgatcagactggacaaaaattagcatatgttattaactgatctaattcaagtgccaattcttaatagaaacacaaaacaataaaagcaattcagaaaata

SEQ ID NO: 332 - DNA, 425 bp, Homo sapiens
cttttcttcttttctcttctcttctctttttttttctctctctctttcattcacattatagcttgagtcagaacttcattcctttttaaggctgaaggaccacattttgcttgtttgttcatgtgatcgatgatgatggacacttaggttgtttccactttttagctatcgtaaacactgttgctaatggaatatgggtgtacaaatatttcttcaagatcttgctttcaattcttttgggtatatacccagaagtggaactgctgcatcatatggaatccattcccagggaaattctcaccacatagcacatgaacacaggtgccaggatgcagctgcaccttcctttgtggagcaaaaacttggaaatatccttaaaagtgattaagtaaatcagagtatgaactgtgctctggagtgcaaga

SEQ ID NO: 333 - DNA, 511 bp, Homo sapiens
atgcacaaaataagcctggctgtggaaatgcttatttgttgggagggtgcttgtttggatcgatgatgagaataattgtctgaggatgctgagggactcattccagatgtcaatctgaggtccagatgtgtggccctccaataggacaaataagactctcagagcctggctctatttggggatccctcagtgacaacatagtacctctgtgagcgtgccttttctatctctccgaagagggcattagcatcctgtcttatgagtcagtatgcactttagtatggttagtgacccaagactcactttattttgttcattttgagcagagaattgtagatagatacatatatgggaaatatgttcttgattaacaaatgaaaaaatgaaaaagtttcagtcaagaaaggtcaaggaactgtgatgtatagtgaaggcagggaacactgcatgcctgtattaaatattgacaaaggaaccaattttagtgctttgttatttttactgttgagta

SEQ ID NO: 334 - DNA, 792 bp, Homo sapiens
gcgatgaggaacagctgatcacctgtggaagtcatttgtcctaaattgtcatggacagaccatgtgccttacagcaagaaaattctgtgaataaacaggaagccagccagccagggaagatgcttttgtgatatatcccagcatgctgatgaccccaaggaggaccactggatacctagcaaggaaaaagaagaactgattgaagagtggcaaccagaacctcttgttcctcctgtcccaaaagaccatcctgctctcaactacaacatcgtttcagggcaatatgataaaattgaaaaatttcacaaatgtcaggagaacaagatctggtgtctgggtttcaactcttagagcttcccagctcgtagctatgctcctgaattcctctggcagccctcctcaaggacctctgtgagacaaagtcagaaatgacttcactggagaccaagagagcccacagagctcttcctgctgcttcttctacccttgtactcactcggctctctaaatttgtctcagctccaggtgcccaggatgaaaatctgtgaaacaaagcatcaggaatccagaagaaagactgagcagcaattgataaaaaacataaggctaagggtctatacaactagatattggaatttagctagaggcatgagtaacagattctagggggtgaggtagagggagacaggagcagcacgtatgacatttggtcatggctgacactttctgtggcacatgttttataaaggcttccaatggagaccaatttcacctgagtgcatagtcagatcc

SEQ ID NO: 335 - DNA, 570 bp, Homo sapiens
agtgcggcctggacactggggggatggatctgcagccctcccccccgacaggggaaggccccttcccgggtgtcccaggccagaggccgtcgcgtccctcccacggccgaggctccacacctcccggaccgactccgggccagggtccgcctgctccggttctggcccccgcgggggtgacgttcgggacgtcgggggctcgcgcagatccgcgctggatctcaggcggccctgatggagacaacaggaaggaaagagaccttcctggtcacacttgggccacaggagaacaggcagcggcccaggaggatccagggtcctgatggtggttgagaagctggttcttagtgatcactcagaaacgtcggcctggccttgtggggtcagaccttgcatctcagtcagcccagggagaagaagaagatggtccacacccaagtgcagggaacatcgtggcagtcggctgggtgcctgcgtccaggcgaggacacctcccgcatcagggaaacacacgtttctggagtgaggaggctgaaggcagggcccagaggagagctgagccatggaagg

SEQ ID NO: 336 - DNA, 5428 bp, Homo sapiens
ctaatagagtggtataaatcaaatgctattggtatacaaaaggacaaattttgtcagccaagtgtatgggtatcttcaaagagcacaggtgccatctgttctgagctaatgacccattgaagaaggccacaccaaatttgggggaaaagcagcataaacaaatgccagagtattttccaggcaggttgtatttggagaatctcctaatgttgtatatttaatttgtcctttgtccaagaataatgcaatgaactaggcaactagttgaataaaaattgaaaccaagttcaaacaagcctattgaaaaatgggcaaaagactggaaaaacatggccaataagcgtaagaagagatgttcagcttgatcagtcatcaagaaactacaaatcaagaccacactgaggctgggtgtggtggctcatgcctgtaatcccagcactttgggaggctgaagtgggcaaatcacttggacaggagttcaagaccagcctgggcaacatggtgaaaccctgtctctactaaaaatacaaaaagttagctgggcatggtggtacacacctgtaatccctgttactcgggggctgaggcacaagaatcacttgaactctggagagagaggttgcagtgagccgacatcagccactgcactcaagactctcgatctctctctctcaaaaaaaaaaaaaaaagaccacaatgaaatacaactttggactcagtagactgacaaaaattaacaaatgttacacagaatctcttatattgctggtaggagtataaattgtttcaattatttttgaaactaagggtttgcattatcttgtgaagtttaagatagattcacatatatgctcaagcagcaattccacctctgggtatttacctaaaggaaatgatagcatgaatgccccaggagacatggtcattaaagttcttagtagaactgctcacaatagcaacaacaaaccaaatgcccattgacgagagtggatgaataaattacagtgaaatattttgcagtcaaaattaacagataaatccaatatgacttaacagtggtttacagcgaatgttttgtttctctgctgacacatcaatacttgtgtcttcatatgtttagcatttttattctgaacttatatgtggttgaaggtcatctgtgggagtcagaaactaaattgagcatgctgcctccagagagaattagcatttgcttgtttttttcgggtaacatactgctatggactggggccactttagccctgtttgagtatcctaggctattagtagagtcaacttttacttcttacagcttattcccaaggcttattctccagtgtaaccctagatttattttttattatttttatcttttttaagattcaagggatacacatgcaggtttgttacatgagtattgcataatgctgaggttcaggcttctgatgaccccatcacccaagtagcaaacatagtacccgataggtagttttttagtttttcaacccttgccccactccctcccttcccatgaatccccagtgttagaaatgcttgttccccagtgccgtaaagaaatagcacttgaacataaatttaatttcttcagcaaggccatttttactttctgcagaaagggtacactcactagcagttttgtcaccagagtacacagaacaaaggagacagggtcatttataacctgatgcgtccacactactgctgtgtctgatttccactggctggaacgggacctcacattctgtatttgtcctgattggctagcaacttagaaccttttaaaagaggcaaaggcagaggagaacaaaggaaggaggaagtaacttgtggaatgctgagaaaggtaaaaacaccttcaaataaggaagaggaacaggctatgacctaatgcttgcttggaccagtataagcatgccagggcaaatatttaggctaaattgtgggagataacataaagtacattgatttctttattacagatagcagatatttaagaatgttggcacaggtctttgaataaattttgcttctaaggaaagttactgtttattcctaattagatggggaagaaagtctttgaagaggaacgtctactttttttttttacaccagtgtctattgttcctatctttgtgtccatgtgtacacaatgttgagttccaacttacaagtgaggacatgcagtatttgtttttctatttctgcattaatttgattaggctaatggcctccagctacatccatgttgctgcaaaggacaggatttcattctttttaatggctgtatagtattccgtggtgtatatgtaccacattttctttatctagtccaccattgatgggtacctgggttgattccatgcctttgctattgtgaatggtgttgtggtaaacatgagtgcaggtgtctttttggtagaacgatttattttcctctgagtatatacccagtatgggattgctgggtaaataataattccatttttagctctttgagaaatctccaaacagctttccacataggctgaactaatttgcattcccaccaacagtgtgtaattgttcccatttctcaaccctggaagggttattcagatagtgtttgccagactgctggaagtgtatttcactaactatagtttgattcatatgtcttccgtgacttatctgtaaattccttgaaagaaggaacttctgacctaaaattttgaataaaacattaaagttttagggaaatttggctgggtgcagtagctcatgcctgtaatctcagcactttgggaggccaaggtgggaggattgcttgagcccagaagttcaagaacagcatgggcaacatagtgagaccgccatctcaaaaataacaaataaaataaagttttggggaaaattcttatatatttagatactatggtaacgttttaataaaataaactgagttgcttttcatgtatttctgttttctaaaaattatgtgctatattaattacctgttcctgccctggagatgatgtttggttatattttcaggttctttcactatttttatttttgtctgtttggacttacaacttttatctatgttaaatctggtatttatacttccctttaaagccatatattttatcaaaaaattattagagaaaatttatactcacatggtattttctaatattaaaaactccttaaaaaaactcatgtctgtcaccttgctcatttcctttttttattttttgagacagagtttccctattgtcacccaggatggagtacagtggcacgatctcggctcactgcaacctccacctcccgggttcaagctattctcctgcctcagcctcctgagtagctgggctggcaggcgcccaccaccatgcccggctaatttttgtacttttagtagagacgaggtttcgccatgttggccaggctggtctcaaactcctgacctctggtgatccgcccacctgttgagtgctgggatacaggcatgagccaccacgcccggcccaccttgctcatttctaattttgttttatcttctgattatattttttcagaaatttgtctgttagtttcttcaagaaattatcaatttatccttttagaaatgtttaataatttctattgttatttcttatattctaaccttttttaatttttatgtttttgtttttgtttttttgcatttcttcttttctcctcagttcattttcgattctttgtttttaaaataacaccattggcctggcgtggtggcgccacctgaaatcccagcattttgagagtttgagatgggtggatcacttgagcccaggagttcgagactagcttgggcaacatggtgaaaccctgtctctaccaaaaaaatacaaaaactagcaggacatggtggcatgtgcctgtagtcccagctacttgggaggctgaggtaggataatgacttgagcccgggaggtcaaggctgcagtgagccactgcactctagcctgggtgacaaggcaagaccctgtctcaaaaattaaattaattaaataacaccataatttatgggtgtgtatttatttatagctttagccacatataaactcttaaaatgttatagtgtattttattacttctaagtaacctatgattttatttttacttcatcttaactcacttattgaagaggttaatattttaggtagttgaaatgttttcctgttttaattgtcagtattaatttctagttataaatttggactaaagaatgtgacctgagcaatttcttcattttggatattactgaagttttatttgtgaccaatatttgaaaccatttcatggttcctgaacaagaaagcatggtatgtgcttcaaaatacaacattcaacttatagctgtattcagtgttgttaattgtattttgaaagtaaaaactaaccattggtttttgtctacctgatatatatgtgcctgatagtatcttgttgtcccctgctatgtttttgtttctgtcaatgtatcatattttaaatcatagttattttataaaatgtgattgtgagttattatttaaaccatgccttctttagaggttggaccttttatcagtgtgaataactctttttgtcccttggatatcaattaaattgaattctaatttttttttttaaccttacctcaggtgctgtttggctcctgcagccaaatacactgatgatttaattaaaatgtttatctcccccaaattttaagaactttatttgggttatttggaataatgtataaaatatctatatagattattatataattcagggggaagcaaattatcagaacaatttcatgttatacaaataacatcagaaaaatatcttaaattatatggcatattctattgattcatccacaaatttataagtccttaccacctttcattatattggtactaggcattatagtagtgctaggcactatagtaatgctggggtataaacaagaataaaacaaaataagttccttatttcaggtaacttacagtataggtcagtggttcttagcttgctttttaattatgaattcctttgaaagtctagtaaaataatccaacaccattattccccattgcacatacccccagatgttttagacatattttcaattgctccatggaccttaagaaaacttggttggtgtgcagtttggtgtattatgggtaagactggacctggtgttagaaaatctgcatttgaggctttgttctgacagtgtctagtgtaaacatgggcagaccacttaaacctctctttagtcttctctgtagaatgatgataataccatctaattagcaggattgttgttttattcagtgagacagcatatgtaaataacttagtaaaataaaaagcaacgtgtttataa

SEQ ID NO: 337 - DNA, 5067 bp, Homo sapiens
cagggaagccaaaagattggacaccccagctttaaatgtagagtatttaagaggttcagttaaatgtactaaatcagacttgtgtgatttagacacaaaatctgtgtgtgtgtgtgtttggtcttttaaaagatactgcatgtacaaacatgatttctaataattgagggtttattaagtttttccctttaggctaaagttttattttattctgcttggatagtaaatacagcattttaaaatgatgatgctaagtgcttttttaatatatgcatgctgcttcaataggtcttttaaatatagccaaggcagggtaatatttcctgagtgatgatagaattatagaaaatcatgaaagatgtgtgcccatgtttcattttataactgttccagtcatattgctatgaattctagaattttaaaacctgccacacttattttggatgttatatacacataatgcctcaaatttccattatttcatattatttttctccatttccctcgtgtcaagtttcattttgttttcaatgttttgtttttataatattgccattttaatggcttcaatcatgctatgacagattgtgccaatttagctttaaaaaactcatgggctacctccatgaactcacacatgcggcattgttaaagaaccttttttaaaattaaattttctccagcttttcattttgcagcatacaaaaaaattgaaaaattggtataccacctaaatccaaccattattaacattttgccacactagctttatctctgttgggacactttacccctacatactccagcatgcgtgacctaaagatatggacatcttcttaattaacctcagtgccattatgacacctaagaaaatttaaattaattcaggtcacttcatctaagttcaaattcaaatacaattgcccctctgtaaacgtgggggattggttccaggacccccacctcgtgtataccaaaatttgggcacactcaagtccttaaggggaaaccgcgtataagaaaagtcagccctccctatgggtgggtttcacatcctgcaaataactgtgttttccatctgcatttggctgaaaaaaaatctgcatataagtggacccatgcagttcaaatctgttgttcaagagtcaactgtattcccagttgtctcaaaaatgattttttatagcttttttgttttggaacgagggtaaaatcaaggttaatgctttgtatttgattgtctcctttggtcttgaagtccccttcctgcaccaccacctgcccctcaatggcttttttataccaagagactgaaaatgctacctctaatgacttttctccccatgatagtactctttgaaggaccaaagttactttgctcctattatgtggtttgatttgttccctttattcctttcatgtcctttgaactggaagtcaagtctataggtttgattaccttcaggttaaatgtattgggtaaaaatatttcacagattttatattgtatcatattaaaaggcacagataatctcattattaatgttggtaattatttggttaagatgatgactaccccattgtaaaggttattgtaaagttctccctgtggtaaaggtcatttgttcacccttagtaatctatggagtaatgttttagcaccaggagaatattctgtttcccaatgcctttagcatcaattgatgattcttgactgaatcatttattacactggggtgcaaaatggtgataaattttttttagtgctctaaatttcttctacatttattagtttatattcttttttaaaataaaaaagtatatttccctcctgtttctctaatatccctctttaaaaaaaagaccatgtcttcatgaatttaaaaaaaattactcaatatattatagccaatcggtcacagttctttttgatgctcatatatattgtgagcctctagcccatgtaagtcacagcaagctagctcttgggttttttttgagatggagtttcactctgtcacccaagctggagtgcagtggcacgatctcggctcactgcaacctccaccctccgggttcaaatgattctccttcctcagcctcctgagtagctgggactataggtgcctgccaccgcgcctggctaattttttgtatttttagtagagatggggtttcaccatcttggccaggctggtcttgaactcctgacctcgtgatccacccgcctcggcctcccaaagtgctgggattacaggcatgagccaccgcgcccggccactcttgtgttttttaaacatgaccacattagtcttttagtccttatttgctttaggcacaagaaatctgaggcttaccttatatttgtcttgttccaaatttggattatcagctaattctccaaggagccctataccttttaaggggagtgggatttatttaattttttctttggagtccttctagccagtgaatggaatttattatagaatccattgttactgagctgtcattgtttctaggccattttagtggacatagctaggaaatacaattttaaaagatcatgaattcaaattaatatttacaactaaaatttagcaacatggccaggtgcagtggctcatccctgtaattccagcactttgggagtctgaggtgggaggatcacttaaggccaggggttcaagaccagcctgggcaacagagtgagatcctgtctctacaaaaaaaaaaaaaaagataaattttttcgaaaagttttatatgaaaagtgtactctgaaaaaatctagctgtcatacctatccctccattcctaaccatctcttataagtaattattatccatctcttataagtaattattataagtattttcttagttttccaatttatctttcatgtgtttctttttaaaaagcaaacaaatatgcatattgctgtacttactgtgcctctttcacaacatggggtctttataaaatttctttggatgtttagaaaggtttgtatgctctaatttatactgataacattttatataatgcatttagagtccccaatttgcttgtctaggcctctactatttaatttgacacctttaaatgatgttctttgactcttatctaattgtctatgtgaccgtcagtgaatatattatctgttcatattttctgtagtcttatttctttttgattagaacatataatatttacacactattttcccatcctaatccccacctttgtaataaaattaattaaaattttaaaaaagtatatttaataacctactgatacttacctgaagtctctctggtcaacttttggctggatgaagctcttctgtagagtattcaaggagggcttgtaagtactgtacaatattctctgagttgtgacatgtttaaaatttcttctggagcctagatacttaaagtacaccttggccatgtagaaaatccttgacaaacatttccttttcttgagtttgtctgaatttgtgcttcactgttgggttgcttgatgttatcatcaagaagtgtggcaccacttgatttttttcccttttggaaatgacattttgtttgttgttttttacctagagacccagataattttttctatattattttatctatgatcctttttatctcatttttgttctcatagctgttttattcctcttctctgtatttcttactttacttttatttgtgtctctcaggtaccctgtgatttagttttcatttttagatgattttatcttttcagtatattgcctatgtttgttcaactctcattttacatcttactattgagtttaaaaatttttatttgctgtgttcttttatatgtgcaattaatgatattcatgttggagtgttgtatattatttgcctctgcttcatattgtctagagggtagtattttctattgattgaaaagttttcattttctgttttttataatagccttgtatggatttttggtggcttttctattcatgattaaatgtgtaggatcttcttcaatcagcaataacaggtggctctatagaatggagggtagaagggatgtgggtgacttactcagtttttagttaaagaggaccctcttctgttagcatggtgaagtgcagtttctttaataaattgtgcatggtgggggtgggatttggattctgtgatacaatcttgtttctttaggaatcttttacttttggccacttgcctttctttccaaggaatcccactccctttcaaggtgcctcatgaactgttttcatgaactttccaaacattggtttctgcttgtttctaagcctgattcttggccttctcattaattttcaaaacttccaatatccttccaaataattcccttttgcttacgttagcgagtactagtttgttagccagtgttagtttctgttgatcctaaccaaaaaaccctaactgagatatcagtctcttagcgcaaagtttgtgaatacggtcatccctccatatgaggaggggagtgggaattggttgtgggacttccgtggatatccaaatcagtggatgctaaagtcccttacataaaatggcatagtatttggttatcatcctccccatacatcatctctagattatttatagtacttaatacaatgtaatgctgtgtagtcatactgtattttttacttgtatttttgttgttttgtgggatttaaaaaatatttttattctgaggatagttgaatccacaggatactgagggccagctgtattcacaacccaaatcacatacaaagcgacaagttcatacacaataggcctattagaacaggactgttctctcttgtttatcattgcagcctttctagcacaaagcctgggacattctggacatttagtatgtgttaaatttctcttactacattatttccaacagtatttactgcaatctgcaattaccttccttttgttttgtaactgtgtcccccactagaatgtaagctctgtgcagatagtgtctcatttattgatgtatccctggcatctaataaaacactgacaacac

SEQ ID NO: 338 - DNA, 565 bp, Homo sapiens
actttttcctcctgctggaggagtctgcgttgcttcctgacctcttcaacccaggctttttcatcatctgaactctccgaactttctgcatcacttggttttccttccggctcttcctcctcttcctgagaataaaaatatggattcagaagcctaaattcttcactctcttcatctacttggaagtcagggttctcaaacataactttaaatcgatcatcggtgagaatattaggaagactctacaaggaggaaaaagcttggaagccagatgaaacggcttactcagaattgtttgtcaatcagagtaaacagccctgaacactgctggaaaaagctgacctgtttgtgatggactctgactctgctgaacagactactttactatttctccactgttgagagtaaacaagattgcaggcaaattaatccaagtcaggtcataaataaaaaccaagtgaagcgcttttcatagcgaaacagtcctaacccgagaatcggatgcagcagcatttcctacagttaactccatggatcactagtcccaagagatcttctgagaaaa

SEQ ID NO: 339 - DNA, 549 bp, Homo sapiens
agaattactcccgaactctaccagctgaaatcctcctcaactcacatcagacaagacggccctgccacttacctgtcagatcactttgggcagtttacaggagagaagatgcagcctgggagagatgcagcaggtgtctgaggccacacagcaagtcacccagggccaggatctgaagctgggtctctccagctccactgcctgggcactttctcctccacagcgaccttcaggtcatcatgaggagcctttcggactaaagctagagagctgggattccaacagttcagcaacccatgacttctccatggcagctgctgcctgaccacctagtgcctttccactaagattgttccttccctctcctgaagattatcctcctgcccctctctcccaaacatctgcggtgtgcacctgctgcccaaagttgaacttttttttgttagagacagggcctcactgtgtcatccaggctggagtgcagtggcgtgatcatagctcactgcagcctccaactcctgggctcaagtgaccctctcacctcagctt

SEQ ID NO: 340 - DNA, 616 bp, Homo sapiens
ggcaggcaacgtgttggaccttccggagcttctcagaagacagagggttttcttttgaggatttaaacctcagacacagggagctgacctattcaccttagaatcctctggggcacccattacagtgtctgtaccaaggaggcaacaaagaacggcggaacagactggagcagaaggaccacccagcagagccaagccaaatcactgaccctcagaggcctgatgtgaatgcttatggcttcagtccattggattctgcagtaatctgccgatctacagtattaccacagtaaataaccgatagacctgaaaacgaatgcatgccttgtgccaaaattgcaggaaacctcaccaggagaaacaattttatatgagggaatgtactctctcctttgcattttccctcaaatctatatttttagcccctcacttgtctctacagagcctcagttgcttaatctaattgctgactgaacatctccaggaaactgtgtgtacgtgtttgtattcatagtatatttatttattatctgtttacttccatgggatatagtctccataagagagtagtcatcattgtatttgttgatgcttaataaataatcattgaatgggc

SEQ ID NO: 341 - DNA, 711 bp, Homo sapiens
gtgacgttccctacgcggtcgggcgttgggtttcgcggcgctcgccgcactggttgttcagcaccttcggtccggttgaggttgtcaagtcggaccaaacaggttgtttctctgcagtttccaacatggcagggaggtttaatagacatggataagaagtccactcacagaaatcctgaagatgccagggctggcaaatatgaaggtaaacacaaacgaaagaaaagaagaaagcaaaaccaaaaccagcaccgatcccgacatagatcagtgacgtctttttcttcagatgatcctatgtttccttcttcctcatcatcgtcttcaggaagccagacagattcaagtattgaagatgctgccaagggaaaaattaagaagaagagaagagagaaaacaaataaatgggaaaaaagaaaggacaaaatatgaaacaccaagaaaaagagaaggaaaaaaaggaggaaacaaccacatatgtcacctttccaagagggactgaaactgggctgacccttttgatttccaagctcagcgttttggtgtaaggcggccaaagaaggatgcggagcccagcactgtgaagcctacaaaaacattgatgcgctggcttggggatttgaatttgaacatctttcacactaagttcagactcatgaaaccaatcttcagatgctctgtaaaccacataataaagagtttggaaattat

SEQ ID NO: 342 - DNA, 658 bp, Homo sapiens
gtctgcctaactgcaaaacaatttggttggcttataaattgctgcctctatcatgtgcttctgaattaaaaggaacggatggtttttaaaggtttatctgtttcattattgatgcagaatgacctcgtgctgacaaatttcgattttcacacggtttctttgctgatgcagtatctctgccacccatgctctagggcagcgtggagccacttcagagcatggcttttgtgagccagcgcccagcagggtgttcttttctgagtgcaaagagagaatccactgacctcatttgcttccatcctgtgaacctctcagtgtgtttcagaacaccagggtctgaacagagaagcttcagaatactttctccgactagagaacttttttatggtgggaggaaaaaatgttgccagtcccacttcacagacacctggaattcatgaagtctgaggacttctttcattttactttcaactaaaagctctagcacgaaacagcaaaggctcacagaactaaagatcaggaggtggccctgtgagagggtgttcagcctggatccctggtgaaactccatcattgagcagcatatctacttcagaaagcgtggaaagaaaagagcctggtgggaaaagtctatcaagtgatagtgacgtgcccttat

SEQ ID NO: 343 - DNA, 365 bp, Homo sapiens
cactacaggcaagaacagcaaacctgggagaaactgactctataaccagtggaagaaaggctgcgtagccatcgccggatctctaggggaaaagagaagacacagagacacagacctgccccggaggaatccagagcccacctgcccagagaggctcctcctgatttccctggctctgggcacccccttaaaagccctttatgccatctttcctttcagtcaaatgatgcaggatttgggaccagacagcctttgctcaaatccttccactgttacctaccagcttggtggccttggagaagttatttccctgttctggatgtgcttcctcttctataaactagagacgctacaaattcccacca

SEQ ID NO: 344 - DNA, 505 bp, Homo sapiens
accggaagtcccgcctctgccgtgggcctgcgagaatcgaggcactcgctggcgtacccatgtatcgaaatgagttcacggcctggtaccggcggatgtcggtggtctacgggatcggcacctggtctgtgttgggctcactgctttactatagccggacaatggcgaagtcgtcagtagaccaaaaggatggctcagcaagtgaagtacccagtgaactctctgaacgcccaaaaggattttatgtggaaacagttgtcacatataaagaagattttgttccaaatacagaaaagatcctcaactattggaaatcatggactggtggccctggtacagaaccatgactggctgctgaattctgaaaaccaggacttggttcaacatttaaatttgatagttgccctgattcccattttgggtttgtgaaaagtgtatgtatttaaatttgctgtaaaacataatcactaataatatgcaataaatattttcttgaaggaaacta

SEQ ID NO: 345 - DNA, 2886 bp, Homo sapiens
ggctgccctcgggcctggctcgcccgcgggcggatggctccgggtctctgctgctgaggatgtggctgccgggcggaggtcgtccactcccctgggcctttctccgcgagccctcccacgccgcccgctcctctcccggggcgaagggcggggacgaggcgcgccgaagccccgagctgaagagaagggtgggggcatgagggcgctggagtgaggaacagattggagccttcccacttcctctccaatctcagcccccgggaggaggggtgaggccctcgagggggcccggagttaaggaggaatagaccgtttctctctctcctgtctcccccgcctctgcccgtcttccctctaagccggcctctaggtgcagaggctgacgtccaggatggggaccggggaagcctctggagggtatatccgggaaggcaccaaggctgaagtgagagcggttctggggaaggctttaaaaagcagatatggaccagggtagagttcgtacgctgtagcttttcaagaacaccgatctcattaattaaagaacagcaactatttaattccagttataaactattgttttccagttagtctgggtaggtgtggccgtttgtagaatagttagattacattagtctattgcgttggtacagttgtctatagcttgagcatataaaaactcctgagcccagcagaaaagttactttccaataccagtctccatcctccgtgctttggaagttgcatcgttttccggtttttcgtactcaaagaacactgtcaattatgacagctctgtgacctctgaaagatgcagtctagcacctcagttaagaatatggactctaaagtcagactgccaggcttcaaattccagttctgcgacctcagcaaagttacttaaccaagctctcagtgccttgttttcttcatctgtaaaatgaggatgacgtcacagcattgttgagagaattaatacaggctccagacttgtgaatggagaagtgttgaggtgaccccagctccagccaccagctgacgacaaccataccggagatcctgagagctgcctagctgaccccaggcaccccccagacttattcagcacttagaagaatgccaggcaggctttccccaccaaccaagatggaataacagggaaaagacatacccttctatcttcaataattggaaacccagacaaagtttatgaaacgctggttttcaagacataggacatcagacaatcaaggacagtaaacactgagatgggaaacaaacaaggatgttacaaaggacacagatcaagagccagctggaagagatgcacagggaaggggtgcggagctcccatgccctctccagggcaccaccctccaggcacctccatgtgttcagctatctggaagctccccagactctgtccttttgggttttcatggaagcttcattatgtaggcatgaataattatatcattgaccactggtgaccaacccaaacttcagatcctttcccttccccagaggttggagggtggggctgaaagtcccagccctctaatcatggctgggccaccatttacctcattagcatacaaaagactcctgttgctttagagattccaagggtttgggaagctatatgtcaggagacaggagaagaccaaatatatatttcacagtatcacacacacatactctcttgatcacaggtgaagttttgcccaaagcaacagaagtgaagcaagcttctattctcacagaggtttgggtccggtagatactaataacttctattctctgatgcattgtagtagggcagacattaagcatttcatgtgcattttttttttctttttgagacagggtctcactctatctcccaggctggagtgcagtggcactaacacagctcactgtagcctcaatctgcagggcttaagcgatcctcccacctcagcctcctgaatagctgggattacaggcatgcactaccatgaccagcatatttgtattttttgtagagacgggttgttactatgttgctcaggctagtcttgaactcctgacctcagcctcccaagtagctaggaatacaggcacatgccaccacagccagcatatttttgtattttttgtagagacagcttactgccatgttgcttaggctgatcttgaactcctgagctcaagggctccacaggccttggcttcccaaagtgcaaggactaaggtgcaactgccacacccagcctttcatatgtattatcttatttaagcttcactttacaagtgagaagggcagccttggctcagagaagttaggtgacttgcagcaaatcacataattgctaagtgatggatctgagctttagccccaggactatctgaccttgggtctaaacttatactactgtatttttcgttaagtcagtcagagttctatcctttgacagaaagtataaccttcttttaaggcagaataagaccctctgcccaaccctgctctttctttctcctccgcactaagaagacagcgaatacagtagagggttttggactgggatagtggttgcagagaagatctggaactaaaaatatggaccaggggtagaaatggtggtgattccaccaaacttggaaacacttaacaagaccccataacatgcaagatatgcaagaaatggggtacattttctataccagtgccttaagtaaaaaaattccttgttaaacaaatgatttagagaagacagaaccaaatatatatatatagctgtgtgtgtattctaataaaggttgttaaagtcttaaagttagtggtgggagaaaacaataaaaaaatatgaaatctccctatgttaataaactaatttcaaataccaa

SEQ ID NO: 346 - DNA, 748 bp, Homo sapiens
ggcattctgggaaactcaaaccgtcaccgagctttctgtgaagtacttaggttttcccatgtagagaggtagcccagctcaatttgaggatagcgtcttacttactgaaaggcagatctcaaagccatgtcccaaaaggcagggagtctgactctctcttcaaagcaaatagatattctaacacatgaaggacaagaatatcaccttaatacaacaaggttcacattcaggctctcaacggtgaagcaatacaatgaacaccagtgaggtgtgaactcctctgcagacatggttggtgctctgcaacctcagtgaacacccctatagtgcaaagaaaaaagggaaatcaaacttcatctttttttccaagattgtcctctgcaaagaaccttcatttcagaaacccagaagttttcaaaacaactgtgggaaagagagatgaatttgcaggccttctgaactctacccacaaactctcaagagaacccacccgctgcagcctgtggctcccaactgtcctgcctacgcccaacagggaactggggatccgtattccagggaaccctctggaaacgtcacactcagttagcagattcttgagggcggtaactatagttttcagatctttgtgtcctctgtacctggaccaggtagagacttgataaatatctgtagttgttaaataaatgaaatgtttatctttgctgatctcttaaaaataaatcagttttacctacttgccatgcaa

SEQ ID NO: 347 - DNA, 655 bp, Homo sapiens
ggagtgcatgactcatctcctggcccctccaggaaaccggagaaggcagaaaagggcaagaatgttgtgttgtctttgggctgtggagttcatgattatggacactttctgaattattggcactaagggcacatcctgcttagcatggaggctggacagctctgggaaagcagagattctttttagggagtccagagcatttttttcttctttcttatcccctctttccaatagagatgtcagaagggtgactgttagggttgatacattatgtggtgctctgtttttttgagcattgtctactcagagtgattaccaaggtggagctcattatgttacctggcacctgcaactacttgcctcatgttggactaaagtggaaagactcctattgggaattcactcagggaggcaccaggcattgttagaaaagcagtatcgcagagcacttaagagctgagccttgtgatcgggtggacttgggtttatgtcctcgcactgtcgcttcctagatttatgacctcagtttcctcatttctaaagtagagacagggatggagggtggggagaatatgaattaatttggattaaatggatgagaatcagaagtatttatttggaattggtgtgaattggagcacatggggaactgaaa

SEQ ID NO: 348 - DNA, 3231 bp, Homo sapiens
atttttgtaactttttataatgagacttacacattgatttaaattatatacaggatgctcagccagcacaaagctgtggtgagatttgggcccaagtctccgactccagattccaaaccacattaaaaaaaaaaaaatcacctgcagactgcctatagctttaacagtctctgtctccccttcttcacatccttccggtggagaaaagtttgtgaatattaagtaaatttgattcaatagacattttatttttttgtaaagatgatggggtcttgctatgctgctcaggatggtcttgaactcgtgacctcaggtgatcctcccacctctgtctcccaaagtgctggaattacagatgtgagccactgcgcccagcctggtttggtagtttcttaaaagtgaaaattagacctaccatgtgacccagccattccactactaggtgtctacccaagaaaaataaaagcatgtttccacacaaagacttgtatacaaatattcatagcaactttatttggaatagcaaaaaaaagggaaaacaacccaaacagccatcagcaggtgaatggataaacacatggtggatatccatacaatgaaacactgctcagctgtgaaaaaggaacaaactattgaaacaatatccctgttcaggagcaggatttggagaatataagaagcatatcttttataatttaaaaacttgctttctaagatttgaactgaaagatcttttttgaagatgagtgtcatggaattgacatgatttgaagtgttatggcacttcctttgaataaaaaaatcaaagttgctaacaagttccatgtacttaaaaatattgggacagagcgctcaaagctatgaaaagttttgggccacccatgaatatgagataagattaacaagagaggagaaggaagtgaaaaatatggctttccatgcatttccaattgtatgaattaccattgaaggctagtgatgaaatgttactctctaggagtcagtgttttcacatctaaaaatggtatcagtcatagaaaaagcttatctgtctactgccaaaaagggaagagggtaatagcacgtattgagcacctactgtatattcagatgaggtcctgccatacgaaattcagtccccactgttctgggggccatgcaatcgtctttagataataggtgtggggctaggggttccgctgtgaagttaccttccttcccagggtgctcagccagcacaaagctgtggtgagatttgggtccaggtctcagactccagattccaaaccacatttaaaaaaataaaatcatcacctgcagactgcctatagctttgacagtctctgtgtctccctttcgtttgcatccttcgggtggagaaaggtttatgaatattttagtaaatttgattcaaaagacatttcttgattatcacattggttctcaaagtgtggtccctggaccagtgacatcagcattacctgggcactcattagaaatgcacattctcaggcctactcctgactcccaatccagaaacacagtgtgggtccaacaatctgttttaacaagtcctctggttcgctccaggctccagggtgggacagtcactggtgcttctgctggctgggacaacagggccccactgtggaacttgcagcccgtgaccccctcctaacggctcctctcagttcccgtggtcccaaaagccctctgtcccgtgcagggctgccccacagtggccttccacatcctcctgatagcagaggcccccgccacccccagggccacctctgcagctgtgccgcagcttctctgcccaggcacctgcactgacacggagcaccctgtaggttgtctgcttgaggcctttacctaaatgcttgccgcagctgtttctaaactacaaaagcacacaatcatgaaatgaggcagaggtgggctgagtgccacaatggatgccaagaggaagagagatggacatggcgctgggaggctctgggcaccactggaggggggcgctgagttcccgggctgccccggctgggagaggagtcgagtcttaatctcctttaaggaaacataataaataaactactttgccactagagtgatttatgtgttgatttgggtggaatctctttcatgaacacattttatgtctttttaaaaaaattagattatttcttggccaggtgtgggcacagggtggctcatgcctgttatcccagcactttgggaggccaaggtgggtgcatcacttgaggtcaggagttgaagatcagcctggccaacatagtgaaaccctgtctctactaaaaatacaaaaatttgctgagagtttgtggcaggtgcctgtaatcccagctacttgagaggctgaggcaggagaatcgcttgaacccaggaggcagaggttgcagtgagctgagatcatgccactgcactctagcctgggcaacagaatgagactccatcttataaataaataaattagatttcctaccactacagtgaagcataattttatgatttaggcaactaccctaaagggaaataaaactaagtgagattccacatggtctcagtaatacctgtagtgcaaaatcaaatgcttatagggagtgaaacagaatgcggccgatacctgtggaaaagagtgcttcaattgtcttatgtctacgaccagcctaagctcatagccatacaaatatatataccatacatgtgctgaaactaagttaaatttcttgtttttaattgtcttaagtatcaaacttggatcatcagaacatgttggaaaaacacggctctgaagccaacttattaagcacctgtgctgtatcgaacattttacatttgttcatttaacatatctagataaatctactcatttacagctatagtgatccaagatttcatcacagcagattaaaacaaaacctttaagttaaaaataatttaaaatcagtgaatatattaatactatgagagtctttgcctatgagaatacagaactttggcccaaatgtttcattaatctacagggttatatacatttggagcacagttttgttgtttgtttgtttgtttttaatcctcttcccaaaaatgggtttctttaggcagctcgagactcctgtgttagacaagaggaaaaggagtgggtgcctctcgactgggaccagtggacattattatgggaatataccagtggtggcaggttgatga

SEQ ID NO: 349 - DNA, 1911 bp, Homo sapiens
agccccatcagcccctcagcccttagccctcagcccctcagccctcagccccctcagacccctcaatcccctcagccctcagccctttagctccttcctcttttccatcagttggtgttctctgtgcccccagagctgtgctctccttcttatggggcaacctaaattcagagagcaccctggcttggtttgccactttgttgtgtgggcaggttcacgtcttccaccagggcctttgggtggcatatgacagtttgggactgtccagtctctgtactttctggggcctctcctgttgaatggctaggcacctgcaggtgtaggggctcagggtcacctccggcctgcaggtcaatgtcttgctgctcctgtcctggggagggcagctctctcctagcccaacccaaaagcccccagaagcctccacacagccagctccggagtctgtccttggcttaggtggcttcaggactgggccaggcacctccctcacaggacaatcagacatgaagggtacctttcaatcacacaatcctacacagtcctagacattaggtgggtcctctgccctctgcaggtgacctcatcagagagcccagcagcatctgcccatttcctgtctacattctcctccctagtgcactgggagtgggaggagagcccaaagctcccccagatctttaggaagccccactgtcaggctgagtggagggccttagtgacaagtgataacttcagggaagtccagagtgggagacacatctggggtccagcttgctggtgggcactccctgctcatgcccacagcctcgaggggaaaaggtcataattgacaggtggttcctggggtcctgagatccagcccaagggatgggacgacatgctaggaaggggaaagtgacagaaggttcatatgcatcacacaccactttgacaaacccatacatagcattcactatagtgaatagaaaaactcacgaagcaccatagttccagcactttgcaaatatcccccacccaatacctttgaggtgagagttaccatcattgcctagttactggtgagaaaacagaggttccatgacgtgcctgaggcactgagggggatgatgtcagcacttgtggccgcacgtgcaggcacacgccctccatgtcacaccagtgcactcactttgcagatgaggagcgatgcctgagcactgggatggcatcattggcttgtgttggacagtgcctatataggagtccagcttctacccacttgttccagtctatccacattttccaccaacagaacgagtttactagaaacctctcctcaaattggtacaaggactacatgacatggcatgtgatgacacacacacagaggagatcctttttccagcatgcaggaagaggagatcccatacatgggcttgggggtggcttccctcactgcagtgtccggtcccccagcagctctgggagcaggagtgactatctccgttttgcagatgaggaagcagaaccataaaggtgaccttttttctttttcttttttacatttaaagttaaattggtctcccctcaaaaaatgcttagacttaattattttaattatcctcacatatactcctccggcttctttactgaagtgtaatttacacaccataaaacttaccatttgaaaacgtgcaattcggtaatctttagtatattcataaggttgtgcaaccaaccaacaccattatctaattttagaacattttcatcaccccaaaacgaaacccatacccatcagcagtcactcttcgttacctggtagtaattacctacccctaccctcagcccttggaaaccactaatgtactttctgtttcttcagttatgcctattttggatatttagtataaatgggatcatacaata

SEQ ID NO: 350 - DNA, 1298 bp, Homo sapiens
gtgcgtagagtttaagcagtgtggagatatttcttcacttttccttagggtgtccacatcaagaccctgaggccatcttaccacccttctggatcagaagaggccttcagagccctccgctgccgagacgcggcagactcccagagcggctcacccactcatcgaagcggattctgggcggtttcgggctgacccgcgctgtcagggcgcggactccattccgggcgcattgttaggagaaggggcccctcggggcggcgcgcctcgaccctgggctcccggtgcccgcagagggcggagatccgcggcgccctaggccacctatccgcatcttctcgagccaaacccccagcgcttacccggacccgacggcccaagcactgactcccaggcaagagtcgcccttcctggtccccagggaactgacactaccgcgggacgttccctctaggacagtcagcaggtcccaggagcgcagcacgcaacagcgcagagcagacccagacttttcccggggtgagacccggaggcccgcgctctggaccgtcctccctacccagcctggaggccggcgttccccggcccaacccggagacctccccgcctccctcctgggccgccgcgcgccccagttggagcagcctcgaggggctgggccctttcggccggactcccttctcccggacatccaaaacaggttaccttgtccacgctctccggaccacgctttggacttgctcacttttatttaagagtccgacgggggaaagagggaaaaaaaatccagaggagatccaagtcaattggaagaaaaaatttcaaaagggtgtccacagaggcgaaaaaagcccaggctctaccgaccttcaaactacaacagagctttcaggagaatgcggagagacggcttcccacccggacctcaccagaaacccgcacaccccagccacattgctcctcattcagccagaaaggactccaactccaccaccaggaggccccccttcctggtgctggccagttgcagaggctgttcatggcatcccacaggtggcgactgccccccaccctcctcctagcactttagagggtccctctgtggcagacaccatggctaggtttctctttccaactcctgttggtctggcaagtgacagatcatcttcactacattaatcagtagtcacccgaacattcctatactgtcccccaattcctttcagcaccagctgcctcccccactggaattattcaatatggaactagattaaattgaagacttgccctttagtttttaa

SEQ ID NO: 351 - DNA, 312 bp, Homo sapiens
ggttggagaagaagaacctagtgctgaatccagggtttgtgacaaggctggaagaacatttggtctggctagttaaagtgtggaaagagattcacgctcgtgccaagtatcaagagggatactctgatggactgttcagagccccaatttctgtaactatcacttctcagtgtattgaaagatgctaaacattagaatcaactgaactgactttatcattttattacactatatcaaatcgggttctttgagattcttattctccaaacaatgaaaggaataaatataaactgtgcctgacaaatgaagaaa

SEQ ID NO: 352 - DNA, 563 bp, Homo sapiens
cagcttctcttgcagctcgtgcagcttctggcgcgcgccctcttggagctctgcgcgcagcggctccaccttctggcggtagagctccatctcctcctgccacttcttctggaagtcgtccagatccaaatggcaaaccttcttcatccaccaggacccaacccacaggctacttattgctggaaacctacgttgttccttggattgaagtaatctctccctcctctggtgcgcccacagcacttgcaccaacagtgggtactcaacagactagcgtgcctgccgaagaaggggtcctctgacaatcaggggacaatggggaattatgctctccagactttctacacacacaagtcacacaggaaggaaggtaaagagaaactagagaaaataatttttgaagaaaaacatttcaggaagtattgaaagtacacggtaactcagcctggggcaggggtggagggcagcagcactgtttgctgcagctatgctccttcctcagtgccctgcacacccgggacttgctcggtgagcatctctcgtgtcagtgacagctagtgtga

SEQ ID NO: 353 - DNA, 3329 bp, Homo sapiens
ggcagtgttttgacgactgcctcactaaaggaagctaaaagctgtgctgatgcctcccagacgagcctcgttggaagcacagaaccttcacggctcggagccgctgacaccgtgacaaagggagccctgctcaggatgcggcagcaactcactgtgcatgtttttacagctcttctccagtaatgctgccatttccactgcagaccacaggataaaaggaccgcttcaccgtggcccaggatacccttttaagtaggagagccagatcaaggaaagagacaggaaagcagatgattttacctgccttccctaagtgcactcgggaagagaaggatcatctcaaaaagggttaaggaatgagatcatggaaatcacttacacacgcggtcgcggcttggacttggctagtgaggccggcctgcccactctgcttccattcactcagacacagcttgggcttttcctccaagtgctggtagcagtcatttatgagggaggaaaggagcagaataaacacacttctcagctcccaggcactctgtgtgtgtagacagaggctcgggtggatgagaaacctcagcacacccatgatctttgtcaaggctggagacttgcagtgcacactccaggcctgtggaaatggttccacctgggtccctctattgctcctcagctgccacattagggcacctcgcccaagtccacgtgtgggatgtgcctgcctgtggcccacctaacgtatgcagtctgtctggagtgccaggcacaggctcctcacgtgggcttcagctggaattgaaaactgcatttctcaagaatcacattgcctttgcctcgtaggctcagttggatctccaagtggcggtaccgttctctccacttcaaaaatacacagaaacatgtggaaatgttctgtcatccagaatgaaaagcatgtgcaccaaattttcacagacctgattcgaatgtagataaaagtgcaaaatccagaggagggaacacgctatagaaatcctgtcttctatactataatttaatcatcgtgtgccacagaatgtctttgcataaattacaaccacaataatagcatcactttcacaaaaggtggcctctaatcgatttgactctccaagagatggctgggtttttcaaagcagagaaatgatgacctgcagtcttaaagagctgttgattgcacctggggctcccgtggccggcgcccatcgagcagcccatcctggctgttcccttgttcagctgattttcttttttatcttgacatttgctaaccgcttggtttttattttccgggaagagaggattattggcaactggcaccacccccatgtctggaggagggacgtttctaggatgacccccagagtggagaaatagccgagtgctttggagtcttctcagatgtggacgaaaacagttcgtgagctgcgctgagcagttccggagccctggctccctttccccggggcctaagcccccaagaagagagtctttttcaggaccatgggagcaggttttaaaaggctttctattgaagcgaggccgtcagccagccgtgcgtgtccgcattgtggtggtcccagagccttatggacaatcctttgaaagaatagggttgggaagattctcaggacagaagcggctaatttccatccttggagctttatctcacaaaggatatttgatagaaagaaaaaatggagtctgtggaagctttgctcctatttccaaatgggttgactctggatgcaaaggaatattttcacatttttcccaatagaggaaagcttttagtgccaaaatcctcaaaggagaatgaacatcacacattacacatgtatgtataagggtagaataatatggtacaaaatccagtgagtacaagcacacaatgggcattcagtacaggttaaatgaatatgcaagaaaaattcaaagttgttgttgctgtttataagggtggtgattattaatagatgcaaatgtatactcccttttgtaatcacagcaaggtaaaagtcttatctctgatcattaccatgaggacacttaaatatttagccctggggacaaaatggtttgtaggcaggacgtcctgtgtgtttatgcacacataaaatgccgccctggccccaggactgcaaggcctctgactgcatcatttacattcaggggtggtcctgatcaacatggccccatagaataatagagggaatttcagatagtacagcgttagataataagcgctttccactgactctgtttacatgtggaaattagaagcgctgagtgaaaaagagtagtgaaaataaagacaggaagtatatacacaacaaacaatttttcctctctgcaaatcggattattcccttgcgcaccccctgcaacccccatctatgatgtcaaactcaatggactgttgaactaatagcctgggagtcaccagcgtgagagtgtgtatgtccacgctgtgcaacttgaattaggctggccaccacggctgtgtacagctaccccaggaagagcccctcccctcctcagcatttcagtggaaaacgtgctgactgggacccagctacaggaatcacatttgggcagagagaatggcttatccttttcatgaggggtcttgactcaagaacacttgccaattctgcttgaccgtttcccattctttacggtttttcctatcactccttagactaagaaagaaaaatctgtaggaatgattcggtgggatttctcttttgttcctaaataaaccttatccctggatgagctcgttcacactagggaagttactaccactggctttgaagccaggcagatctgggtgttccttcccatgtctttatttgctttgtgggggatcttttcccagcctttctgctttcatccttcttagtgagagcttcttcagctgcagaacaggggcaataatgcctaccttgctgggttgcagcagagaatgctgcttatgcaggaaaataaaaaaacacatagcacacaatgggagcttaatacataagaattataaacagtcttttgtgtatatatcaatgtatttcatgtccttaatgtttatttaaagcaagtacattcttttgaattaagcataaaaaggtcataaaatgccagagatgtgcttatttgaaatgtttgcaatgctttgcaattgttttaaaataaggagatgatataacagggtgttacctccgccactaattagttacgtaatcttagattatgtcacttccctgggtctcagttgtaaacagttgcttaataaataatgtttgttttgctttcat

SEQ ID NO: 354 - DNA, 3210 bp, Homo sapiens
aggtactgttgtatatatttttttgcctgttgattttgatgagatcttaagttactgtggatgagggtgatgcctattaagcagttgattcaaatcatattctctttaattcttaggataaaaaggttttctgctatctaactttcactttgtgcattgactggtgttggttaataatgttttcatgacccgggggtttaagtggttgtgctgcttcacacatggcctcctgcttctcatgttgctatgtcacattatctgaagggaagtggggatgggatgaaaggccttgtaaggccacctatatactgaaggaagttgtagtgaatcacagtccatgctcattacatatcaaggcatttgaaatagaagttactctttttcttgggatgttgacctcagttgatcaggttttacagtgtcctatgatcagaatagaggatgtgatactggaataatcattttctaccattgagtaagtatttatttataaattactaaatgagtggaagatcctgggtactgggaggcaggaggttgcatatttgagttgataagttgtactactgataataaagataactgacacactaaaacatacttggtacactgaaatacaaattacggttatgtccagtggtatcaccaagtgacaaactgggagctaaatagttcagaaatgccctagtctctaggtccagtttgaattggttatggaacaaagaagccatttataaaagggaagagatttttaggttttgcagctaaggtttatagtaggcagcgagggaatgattcatagtgattgtagcagttggtttaccaagcactaaagagattggtgttaactccataatactgatagactgattggaattacattttttctcttgaatttaccaggagtggttgtgaatgtcaccttttccatcttttaaattacatccttgcaggtggtaatcactcaaggaaaaggaattatcagagtaacaatagttcctgttactgacttgatatggtctctgccagaatagcttctcagattaatggccactctcaggggaagcatttctccttgcattggtttgctggtatggatggcccttagattttggcatgagtgattatgcagcctatttgaagaaaacctgttttcaggacctttttaattaaatatggcctgttacatgagttaaagtgtcatacgataccattttttgaccacttagttgatgcctctgaaaggaagagagaatcagatcgctaaaatttgatgtgtcgtcagtgtggatcctactcagtagtgtcacaacgaggctgaaaatcatattaagtgcttttaggacagaaacgtaaactgctcaggtaaaataaccttataaagagaaataagcatatattgcagaggccttggctaggttcatgatgacacaggaccttgtctgaacataatgatttcaaaatttgagcttaaaaatgacactctgaaatccagtcagtgtgcctcactagacttttcgatttcaagattttctgcagaaaatgttttgaaaactttgaatacttaaaaatggcaggtgtagtattgcactttgctagttgctcagatacccttttttatttgtatagatattctgagttcctttttttttctacatgttgtacgttgtcgaaagctaaaaggaaacttatccttggatcacggaaggcagaggcatttggtgagatggaaacaaggatgtgtaaaaatgagacgaccacctctcggattaaaaaaaaaaagtgccagagttctagggttctaagtgatgtccaggaaggaggaggaataatatttatggagcatatattatggaacacagtgagtatagtacctgcctttaaatgaatactgttggttttttaggacagttgcttttttttcttttttcttcagctgtgtgcagttgattaacttgtacagagcctatcacacaatagatgtttaagaaatattaagtgaatgaatgaggcagcattgctaatttttgtatagtgagacagtatctcacagtccaggctggagttcagtggcattaacataactcactgcagccttgaacacctgagctcaaacgatcctttcaccttatcctccagagtagctgggactacagtcgcgtgtcaacatgcctggctaattttagttttctaatttttttagagttgggatctcactatgttgcttagactggtcttgaactcctggcctcatgccatcctcttgcctcagctggtattgtaggtgtgagccactgtgccaggtactaattttttttatgttagaaaacaagtttttaggtattttatagttacttccttatgacaatatctcatcagaatctaggcctatctgatatctgactccatacgtttataccgtgtagtcagccattcccagatagaggtcatttgagttacttagtgtttaccagcacttgtttactaccttgcgatgatatttacagtgtatttttgggtatggttttggggttatttggttgttgttaaaatgcctgtaatcccggcactttgggaggttgaggcgggtggatcacctgaggtcaggagttcgagcccagcctggccaacatggcgaaaccctacctctactaaaaatacaaaaattagcctggcgtggtggcaggcacctgtaatcccaactacgcaggaggctaaggcaggagaattgcttgaacccgggaggcggaggttgcagtgagccgagatcgcgccaatggcactccattcagcttgagtgacagaggtgagactcccatctcaaggtaaaaaaaaaaaatagaaatcagcaactgctatttgagtttacaggagtgagaagtcctctcttgcatggtgagatggggaacatttaattcaatagaaatatttgagaccaggtatggtggctcaagcctgtaatcccagcactttgggaggctgagttgggtggatcacctgacatcaggagtttgagactagcctggccaacatagcaataccctgtctcaaagatacaaaaattacccaagcttggtggtgtgtgtctgtaatcccagctactcaggaggctgaggcaggagaatcacttgaacctgggcggcaaaggttgcagtgagccgagaccatgccactgcactccagcctgggtgacagagtgagactccgtct

SEQ ID NO: 355 - DNA, 1924 bp, Homo sapiens
gtgcttggctacagccgctgctgcctctcgcgaactgggctccggggctcccggctcccgagaactagaagagaaacgcgagcgaagggatcgaaacccggggggttaccgacttgcagacaccgccaggacagtctgtaacgcaggaagatcccagcggctccgggtctggtgaggggaccataagcatgactgatagcgaatgaggaagggcagccctaaacttttcaagcaaagcctcagagttttgggttcactcattagcataggaaatcgattcaccgaaaacccaaacaaagaaaaacaagccgacagtccaggcaggatgcaggcaaatccagttcgggattaagggtaaaaggctttttgggttttttttcctttggtttgattttttaaaatatggggaggggggtgacatctacccgattctaggctccggcaggaacgcaatgggttaatgaatggacaagccgcggagtattgatcggctgccgccggagaaagaaagaaaaacaaaaaccagaccgaacctgccttcccgctgtggctgctcggcgccccaattaagcagggtcatctcaggctggctgcatgcctcagctgaagatcccagctcctgtcaatgccacctctctgcttgactgtctccttccagattcgagcaggtatgagctgggaagaatgaaggcagggcatgcccgtgtgccagctctgcacagctggatagctgaggaaagatgtggaggagaagccggggattgtgtggaagtctaagggtgttgtttgccctttgggttccagaagatgcatgccaggaccctgggtggcactgccaggaagcaacagagaggagataaaactcacagcagacagacttgccttaacaacaactcccttgaattaaaacacgcttttcaagaaaacaaattatcagttcgatcagcaaacagcagagaagtttctctcataatggcaaagaagggccgggttgctgaccagtgaaagagcttcagaaaaggagaggggagatgagatggccagaaggagcaagagcaccgtacatccctggacaacctcattctaatgggtcaggggctgggacgtgcattttggagtgcaggagaagtggcaactcacaaatgctagattttcttctagagatgaccaagctgtagttcttaaagcagtggcactagggcagaaaactctcacactttgatgtgcacacacagcccctggggatcttgttgacatgtagattctgattccgtaagtcgggctgagattctgcatttccaacaagctcctagatgaggtccattttgctggtccatgaaacacacttagaataagtagcaaggtataggaggatactgactttgctcagtgatgcttgggcttccgtccaaactaaaataaaacaaaagcagacataaatggcccaattcaacagcctgagaagtttggtgataatgacccaagccctggcctggtgaccaagtggctgctcagagagctctatctccaaactccttcccttcctgcctcccctccaagagtgagtaatgtgccagagttcattggggtctgctgtccccagggaaaggtggcccagttgccaagtgcaagtgtatagaacggcttacctgtgcaaagctatcagccctggacctatgggcctagaaacattacttgccactcactcactcactatcattcattcatttctgcaacaaacacttcctgagcatatgctatacaccaggccctgagctcagctctggggatacaggatgaatggcagattgtgccatcaggaagccgactgcacagtcagcccgctggagcacatatgaaaaacaatacggatgttttgatttattatcatattgatcattatgatggtagcgtatacttttgg

SEQ ID NO: 356 - DNA, 662 bp, Homo sapiens
gggttccgcttgactctgcattctcctacttccctgcctgcttactctctgccatcatagttttttgcttcaaccttcaaatgtagccattctttttctaaagcggtacttattctctttattagttaaaattattaattttatgcacttactgttctagctccaattttgcatttccagttccctgctgggaataaattaaattggcagaagctcagtctaagtgcctgcaacagaatttgtcccatatccatacaacttgctcctccacaacaaatgggagaatcatcctcttacctccaggctgtgatggaggagaagctacccctcagcacaggattttggtagaataagaataaaaatgacaagtcccttcctgaaaagctcttcattgtctcttgaaaacggtctgtgaaagtgccaaaccaccagctctccagatgtggctgaatatcaaggtaaatttaatttagacttagcttgggatccccgtcataacaaatcggataaagcgcatgcacacacatgtgcacacacacgcacacacactcagacatgtaaaacccatcctagacagttcaaacaaggtttgagtaccactttccacgtatcaggcttacaaggtgccaagaacatagagttcctgaccttgaggagcctgc

SEQ ID NO: 357 - DNA, 565 bp, Homo sapiens
gagcatcgtaaacattatttcaagaggtttccgaaaaggatctctaaaattatcagagaattcacaattcaagagtacctaacgaagaagaagggaaattaatccttcatatggctcaagtgttcacaagaaatgtggttgccagctaaagaggagaggagaaagattctgtgcaactgaaaggtctaccttaaacatcacagtccaacattcaacagtaccacagtgcatctacaatgtcccaagctttagctccgcaccctacagctgtctgggtaaaggagagcatgtgagtggacccaaagaatggctaggtaaagccctgtccaagtctagaacagcaacagccatgctgcagcaatgtggaaacagacctgaagaaaaaactagcactgtgaggatggcagacggaagatggaaagagcttgggtccttgaggacactgtggaactgctgaagagaccatggaattgagctgaccagcctccattcttattctgtgtaattatacatgtctatttttttaaatctccaaaccaaagaaataaaactcttcccaggcttc

SEQ ID NO: 358 - DNA, 2380 bp, Homo sapiens
gaggccccgtgaggacacgcgcggtggtggcggtggcggcgggcgcgcggccgcagccggaggaggacggcgggagcgtgcgaggagctggctcggttatttcggagcgagagccgaggccgggggaagttcctgcggagtgctcaagggcagaagaggtgccgcgtcccgaagaggggaagcggagaagtttgctgctgcccgggtcgcctcgcgacgctgagagaatcgcccagccctccgcagccgcccagcgagaaccggagctgcggccccgcaccggcgtgagtccagctgagctgacacgccgagccggttgtgcctttccgagggaggaatgtgccgtggaatccaaactttggaaaacgtcccacccgaattcccagcgagcagcaaggagaccagagcgtcgatggagccaccgttagttgcgggagggctgtccccaagaggaattcatcactgtcgtccgctgggagggaccaaccttgaaatggggttggtggagagagggatagagaagagccggcgtgcttataaataacaaaacttagctatgaacccttccgattcccaagtggggaagatggggtaaaattctaagtgacttctcgctccgaagagggataccacaaaaagcggagcgcagggtacttggcgtataataagccatcaataatttatgggtgaaattgagagccaaatataagatgataaactgaagaataaaaacagctgacaaatactgtatagaaaagattgcgttggaatcataactgtggattggaagtgatgttaaggattattggattgagtatttgtagctgaatttctgctggcatttctatcagtggggaaagccctcacagctccataggtaatttttgttaggggaggaagaagtgttgttctgtcacccacccccaggcaaagagtcgctgatctaattctccatttctttctttctttcctttctttccttccttccttccttccttccttccttccttccttccttccttccctccctccctttcctttcctttcctttcctttctttcctttctttctttgaaacggagtttcgttcttgttgcccgcgctggagtgcagtgcagtgctgtgatctcggctcattgcaacttccacctcccgggttcgagggatcctcctgcctcagcctcccaagtagctgggattacaggcgcacgccaccgcacccgggtaattttgtatttttaatagagacggggtttcaccatgttggccaggctgtttgaactcctgacctcaagtgatccgcccgcctcggcctctcaaagtgctgggattacaggcgtgagccaccaagtcctgcctaatctcctttttatagttgaggaaagctagtaacttgactgaagtctcatatattagagctgtaactgaagtttttaagtgtctcaattctgcaactattcgtttttctatcacatcactgtttggcatatatatagcgggaaaaggaaaggctggaaattagttgaccacacactgattaagcttgaaacatatttctactggagaaaaaaaggtactgtaattttggcataggcatcacatattgctggagtggaaagacccatgcactcaggtcctgctttctataatctgtgacctcgggccagtcactccatttctcctgaactagatcactgatgatctgttgaaagaaaaaatatggctagtaatgccttaattatctcacagaggttttacatggagcaaaaagacaatgtatttttaaatgtactttgttgaaggtgtgtgttgtcgagacaatacagcagtgaagagaaggcatgcaaagctgtcttgttggagtctggctaaagagcaccaaagcagcctgttgtgggatgtcctctgggggccacctggacttgctatgttaacatggagggactaggcaggggtatgaagaaggaagcccagcagagcaggaggcagcagcaacaatgagagattggttatccatatgacttggatctgtgtccccacccaaatctcatgttgaattgtaatccccaatgttggaggtggggactggtgggaggtgactggatcatgggggtggatttcttatgaatggtttagtaccatccactttgtattgtccccgtggtaatgagtgagttcttaagaaatctggtcattgaaaaatatgtggcacctcctccctctctcttttgctcctgccccggctatatgatgcaatttgtcttcagccatgattgtaagtttcccgaggcctccccagaagctgagcagatgccagcatcatgcttcctgtacagcctgccttccatgagccaattaaacttctttcctttacaaatta

SEQ ID NO: 359 - DNA, 3792 bp, Homo sapiens
gcgcaccggaacgccgcagccggcgctcggtccatccggcccgtgggctgtggggccccgggcggcggcggctacgtagctgccgccggccttggccgcggccgggcgggcggatatgtggcttaaatggcgcaggcgtcggggcctagaggctgaagggctggtcgtcctaaaaactcgtggacgtcgcgcacggttacccggacgcaggcccgcccctctggggaaccgcgagctcctcgcagctgggtggggaccgtcctcgcagtggcggcctccaccctgccttctcgcttagccaaggcttctggaaggctcgcaaagtgtctgttgttggaagaagccgggccctgactggcgcgacggattctcccagccgctcagcagagcgtctgtaggtcggaagtgggggttgtattggaatatgctttttgtctaatgatgttagataaaaagcaaatttggagcagttttcttattcgagttcaaaatggttcataaagcagcgaagacaactcaaaacatcagtaacacatttggcccaggaactgctaacaaacatacagtgcagtggtggcttaagaagttttgcaaggaagagagccttgaagatgaggaacgtgatatgggccatgggaagttgacaacgaccaattgagagcaatcattgaactacatgaaaaattacagaagaactcagcgttgactattctacggtcattagggtcgttcagcattcgaagcaaattggaaaggtgaaaaagcttgataagtgggtgcctcatgagctgagcggaaatcaaaactatcgttttgaagtgtagtcttcttttatgctacgcaacaacaaaccatttctcaatcggattgtgacatgtaatgaaaagtgaattttatacaacaaccagctcagtggttggaccaagaggcagctccaaagcagttcccaaagccaaacttgcaccaaaaaaaaggtcatggtcactgttcggtggtctgctgcccatctgatccactacagttttctgaatcctggtgaaaccattacatctgagaagtatgctcagcaaattggtaagatgcaccgaaaactgcaatacctgctgcctgcattggtcaacagaaagggcccaattcttctccacgacaacacctgactgcgtgtcgcacaaccagtgcttcaaaagttgaaggaattgggctacaaagttttgcctcatccaccatattcacctgacctttcgccaactgactaccacttctgctagcatcttgacaactttttgcagggaaaacacttcagcatggtgcagaaaatgctttccaagagttcgtcaaatcctgaagcacggatttttatgctacaggaataaacaaacatttctcattggcaaaaatgtgttgattgtaatggttcctgttttgattaatagaatatgttttagcgtagttacaatgatttaaaattcgcagtctggaaatttaatttttgcatcaacctaatatttctatggtaaatccttgcaaacatggaaacaatgcatttggcccagtgctttgtggttgtgtactctttttctttgtttttttaatagatggcattggccgggcatggtggctcatgcctgtaatcccagcattttgggaaggtgaggtgggtggatcacctgaggtcaggagttcaagaccagcctgactaacatggtaaaaccccatctctactaaaaatacaaaaaaattagctaggcggggtggcgggcatctaattccagctacttcatgaggctgcgacaggagaatcatttgaactcgggaggcagaggttgcagtgagccgagatcacaccattgcactccagcctgggcgatgagcgaaactgtctcaaaaaaaaaaaaagttggggtctcgctgtgttgaccaggctggtctcgaactcctggcctcaagtgatcctcccatcttggcctcccaaagtgttaggattacaggcgtgagccaccacaccctgcctggttgtgtactcttttaaatactaagtttttaatgttaaatgctgcttttagatacactgtaaaaatacacctatcaatgagtttttttattaaaaacattgcaattgtactagactttaaatactaagcaataattcaggcttcaatgttggtttatagttttctcatttctttcatttaatacctctgtaaaatgaagcagttacttccattttcctgaggtgagataagtgccctgcacaatgttataggcccagtaagtgagactggagctctgatctaatccctttgacattaaagtttgtgcagtaaaccagctatgtcagtttgccacatttgtaatagtgttcaataaattttcacttaaaggtttaatattaaagtagtagcaagaattcataaccttaattggctttaacagcttttctttccctgaaaacagatgcatatgtacacatgcacacagattgcttacaatatcagcacgtaaaaggcctttgcacattgaagtcggcactgctttggtgccttttttgttttttggctcggtgttttgactgcaagtctttttggatagaattttatagttagaaagtagctaacacttgggttttataggcacaaaaaacaagtcttatactagctgtactttattttttgagttcttattaatgaggaacatccacttttgcattgacagtgatttcaagattgctttatcagcctttaaaggattcttgactagtcgtgcacatcagaactgccaggtccccagtggttctgaagcagtaagctttgggtgggctctggcatcagcactttcactaagcttcacagataattctgatgcatactccaggcctgaaccactgatcaatttgaaacatgcataacaaagcaaaaaaagttttgtttcaccttttgaaatacagttaactcttttaccatgccagagatcattcagagagacaggtcgttgctccggagtgatacagatctggcagtacccagcccttgtgtgtgtgcgttagctcagcacctgcccacactgcgagcccccgtaggatgtgccttgtccttccctgtttcagcacttaacacactacctggtacagagtatgtagtgggcatctgttgaatgaatgcttttcccagtagcagtgtattcatacaatattaatataattgtcccctggcttacagataaaaatgaaagcatcaagtgcccagtgagtgagacccaggtgttcttcctccacccctagtggtcccctgggcaggtctttttttttttgtaacactcaccagtctgttctgtagtcaatcattgattgacttgtctgtgaacttggaggaactgtttcatagtttcattagcacagagtaaacatgtttgccatgcaaggttattttgcatctgcatttaagtgataatgttgaatcaatgaaaagtgttgattaagcagtagttgtagatatgctaagtttttcaaattactaatatcaagtggagattgtttttacttttaagggtattgcttttgtgatagcataaataatggttttccttttttgtaatgtaaattaattgctggcaacttttgtattcccatagactggggaagcttaattgcctttacaagtacttatgtacaactttgtatcaaattttctgtaatagtttatgctttagtactatatatgtactaataattttatctgacttctgtttatatcatttgtacaattacatggttgtaaaataaacttttaaacctca

SEQ ID NO: 360 - DNA, 1727 bp, Homo sapiens
agctcctgccgccgccgcagccgctgccgccgcagcgaagaggccatgttgtgtggtgtgtggggcggggggaggaggaggagggagtaaagcctagagaggagacgggagagagacaccacacacacggcacaagatggccggagaggcagcagcaccccgagctgtcaggcgttccgccgcggccgcgaggcccgccggccggcggggagctacgcccggacggccagcaggcccgcgggagtggggctgccgcggctgaggcgaggcgggccgcgcgcgtcggcgtcacagcccgcggcagaggcgcccagggcggccgggcccacgacgccgaaagcgccgctgcggttgccgcctcggaggctcccccgggccccggcggctggacccggcgcgggcgggaggctcgggcgggcggtccggcccgggactcgggtttgggcgaccaggaggtgccggtggccgcgctcggacccggtgacttaagagattaaaattaatttggttgctgttggttctgaacaaataatgagttcttttatttgaggtatgccattttgaagactgagacgttggagttttatcctagaggataaaggaaatctttgggaaagtcagtattttatatagcaaaaatatgaacctcaaactgaatcctctaaaggccccatacaatgaagtagacattggtggaaacatttacacccagtcagcttgaagagtttcaaatggaccctaccactgagaaatcaagatggcagtctactatggggaattgaggaaaaatggattaatacaagagtcctgtgataatatacaaccaagacagggttcttttaacatggattccatgcagtgaatgaagacataggtttcttacccaacacaaatggacagtggatttgactttctaaagactttttttgtggacattttgacatttggagaagaaagatggcacactaacccagataatagtttttatgcctggaattttttgcagtttgatttgtatgcgtatgacctcttgaaatgttaatttttaataaaatttgtaacacttaaaaatttctcagtttgggtttttttttttaagtggaagtttaattaaatgtttagttttattttagtaatactttggcctttgtagttgccgagtggtaaagtgtactgaatatgaataaagctggtaaattggaaatggtgtaatcgaaaacattttacttggtttatgaagatttacgtttttcacaaagttgtgctcttagatggtcatttggtttaaatactgttttgtttgtgctttcatgaaacacctttcaaaacaactcaatgggtaataatagaatctgattttaatctgccacaagattttaatgaacttgaaacaaactgcttgttgctcgaaaattcaggatgagtgatacacatatacttctgaattattttgtgttgattgaaatggtttcttaagctttttaatactataaatacatcttgctatagaatattcatctgaatatttaaattaatgtctcctattgtcttactattagaggaagaagtgttggatttatgggttagggtccttggagtattcacaattttttaaatttgaaattatgtgtgtaatccattttatataactttgaagtaggattaatatcttgtatcgtctttattttgtacaattggggatttagaataaatgaattgcaccctgc

SEQ ID NO: 361 - DNA, 2063 bp, Homo sapiens
gatggtttcagctagataagactggaagacagcaaggacttggaaatgtactcacagaccctcctacccgtgataactgacttcagagcacaccttcattcccacctttctatattttaacatgggattgagactgggacagaggttaacaaggcatctcaagccaatcaagaactagatgcacataactgcatttgatggggaagtaaaaattactacaaatttaaaaaaaagtgtatatacgttcaccaagtagctataattctagggtcttatttttaaggaaaaaaaaatgcattaaaggtagaaaaggagaaacataggtggagggagaggaagaaagctggagaggaaggcattttgaacatctatcactattatattaggaacttcacatgaaccatctcatttacctctcacaaaatctatgagattgagacaatgctgcttattatggcatcgttaatcatagtgaaaaattgaaaacagccttcttgtatactgctaagaaaactggggccttaagtgggtgcaaatgtttgtctaaaccaatacattgactgctctacaagaaaatgctggtgtggtccttcagatattctgccagggttctccactgagtgaactcaaccagaagccaaaggacatggaaacccattgatgtccctcccaggacaaggtggatgaacagaaattgatctgaaaggacaaatggaagaaatacaatgcaatgttgatgaaatttcatcctctgcccctcttccctccatctctctcacctcttgttcgtagaaatgttccaccccaaagcagcaatggtacctgaaccacgtcagtccctggtggacactatttttcatacacaccttgaggaatgtcctggaggaatcgcttggcaatcttcagacgagaaatgctcatgactagaagagaccaaaggatgctaccaaaatcagtccctgtcttcaagcaaaagtgctcactgcatttcagatcttctcggaggaagagtccagcctcacctaagacactcacctgcacaatgaatgacacgtgacattgtcatggcagcttttgtcctgacctagccttaggtagcactgacaaatccactgcgtgctcactattgggtcatttgacatttggaatcggtgacctgacaacactgccgtacggaaaggctaacggaaacagaggctgcagccacagcccaggaacggtggtctttcgcacacatggggcagcctctgccacaactttttcttccaaggaaatcaacacaaatgaaaactggctgatgctctggtccaccagaggctgaagaagaaaaccgcaaaatggagactgcccaattctaatttaattcagaagaacaaacagggcatcactcagcggacttcaaatccccagtcagaagattttgcccgtggagcaaatcgtttcatgggccatctaccccacctactccctcctgccacagcaaggaggtgaaaatagctcatgaagccatggggagttcaaagtggaactgtgaagtttcccaagctccatgcaggtcactgaagtccaccctgcaaacaacagtccttcaccttctgaagacctgtcacctatgaagcagcaaggaaggaatttcttggctctgcttcctggcagtcattacctgtgatcttctatcccaattggttgaccctagcaactgagccccatgaaatatgtatttagtggactgaatgaattggacaattgaatcagaaaaagcaacaagaactcccaaggttaaaacaagtccaggactacactcctctcttcctgcctctccacattgatctgcagcttctagagaagactgagcaaagagatgctggtgtctttgacttcagggaagagcaatgtcaaggagagaggccagcagatttttttaaatctctattcacctgtcactgtccagcctgccattgtggtgggtgaagacaacatttagggattctagtgctagtaggatacaaacaacatttctattttgttattaagtaaataaataccactctttatcaacctgc

SEQ ID NO: 362 - DNA, 529 bp, Homo sapiens
gttccaatgagaatgaaggctgaggtgtgcgcctttttttttttttccttcttagtcgtgtgtacatcattgggaatggagggaaataaatgactggatggtcgctgctttttaagtttcaaattgacattccagacaagcggtgcctgagcccgtgcctgtcttcagatcttcacagcacagttcctgggaaggtggagccaccagcctctccttgaataactgggagatgaaacaggaagctctatgacacacttgatcgaatatgacagacaccgaaaatcacgactcagccccctccagcacctctacctgttgcccgccgatcacagccggaatgcagctgaaagattccctggggcctggttccaaccgcccactgtggactctgaggcctctgcatttgcgggtggtctgcctgtgatattttggtcatgggctggtctggtcggtttcccatttgtctggccagtctctatgtgtcttaatcccttgtccttcattaaaagcaaaactaaagaaaacagaa

SEQ ID NO: 363 - DNA, 3148 bp, Homo sapiens
acaaagcaatccactgacgcagcagtccccgcaggcttttgagacacacattaggagaggactctgcccgctgtctgtctcacaatctgctcgaaatatcttggtcaggaatctcaggatgtctagtgaccccgagtgaggtgctgccttttattcctgagcatctttggaagcaggaagcagggagcaacggtagcgagaggtattcggatctgagtatcagcaggaagaagaaacagaggaagaagtcccccataaggaaggcgtgaggagcgcaggaagcgctgtttccctgcctgagatctttattctactaggtctttattctacgtagccgatacgctgtaaaattctggaagagaaggctaggggtttaaggttggtaatctctcagaagatctgcgtctcggtgacggaaagaactaagggtaagtgctgagaagcctctctttacagccagagaacgagccagagccgagcttgagaatgacgggatagatctagcagttatgcccaaggaagaccctcggccctttgaatttgaaggcactgaaaatcgtataaatgttttcatataaacgtatgcatctttgatataaataacaaaatggcttttagcacaaattttgttttggaaattttgaaaaacgtcttaataagaggaatgtttactcttaagtctgcagtagattttgaacaccggcagtaactgtacaaatatatcagattagttttaatagccatctccccttcccctacaagtaaaggagagtactacagcagtatgtactctgaattgctgctattgaagaacccctgagcctgtgcagcgtggcactcctgtggtccccattactcaggaggctgaggcaggaggattgcttgatgccagctagaggctgcagtgcactatgagaacacctgtgaatagccactgcattccagcctgagtaacatggccagaccccatctcttaagaaaagaaaagaaaccctgaaccagaggagcagagctgccaccacttagtggtggggatggggcagaacagctcagggcaagacacaggccttggatgccaatgccagccgtcagatattgagcaatgtgtaagtggggttagcctgcaggagaacctgctcgccacctcctcctcttcattctttaggtgatccccattgacctagacaatatctttaatatagagttctcctgatttttctacacaattttacagggcatacagaatatatttcctgtccaataatgacagaaatacttgattttgaagagtaacagttatagcttggaatagaagactggaggcagtttgagggccgacttcagagtcctggttgaaatgaaggttgagaagtataatgcagtcagtgcaggtgactttcagctgggtatctagtcctatcagaggtaaaaactgtggttgccctaaccaaaacaataggactaagagaccttaaatgaaagatgaaagttattatagagagaaatgatcatactggcaaacaattcacctccaagaattatgatgtgactctttgtcagatactcacagatggaattctaaactggtagcagaccctgaaggacaatgtcaccatcagaaccaccaacaaggacaaactgtccctctcctgcatcaccctgcataccatctgcatccacaaaaatgctcattcttcaacaagcctcctatttcttttgggtgactgggaacactgcccagcacctccatcacatgctttagcgcttcccaccctaacttagggtcccatatgcctcctgtttcttcttgaccagtgacctgccactgtgggcactgtcattctacatgtcagtgagtgcagagtgctatggttaccatgcagactatctttgagctgactctgcaggccagtgaccagggttcaacttgctcagtgtcatcctgaacctgcatgtgatggtggatgaccattgcaaaaatgcaaggacactatgccaggagttgcagccaagtggggccctctttgatgctgcaccactcacaatgcaacccagctatcccatcaccaaagtggacaccagctggggcataaaggctgactgtcctatcatgtgcttcaggccagctaatgtggctcttcaaactagggatgtgcacgagctagatgcgtgccgtgtcactgtgggtaacagagatgcaacctgccaaggtttgttggtcaccgtggtcaatggtgaatcatcacgctgaaacatcacctggttgctgctcatagtttgcaggagttgctaccagacctcagcaatcgcccagcacccaacagcaggcagcagacagcacccaacagctggcgatggccgttgccttgatctccatgctgtttctcctcagtgtgactctggccatctctctgaacctgcaatgccccctatagctccattgcctggggctgttttcagctggatctctggtccaagcccggatatggagttgtctccaacttaaagaaaggaaatttgccctgttcctacaacgtatgtgtggttttagatatttttaaaatcttaatttctttaactcaagaaacagctttgaaccaggtattctctgcagtgccagcaatgaagctttgttttatttttgtttttgtagaaacggggttcactatattgaccaagctggtctcaaactcctggcctcaagtaatctgcccaccttggcctcccaaagtgctgggattgcaggcgtgagccactgtgtgtgggcagcaatgaagctttaaatgttgcatttgattcaaatgtatttgtgtgatattttaacatttttattttatacttaccatccttttataaatcactcctgcgtgtttttggttgctgaaagtagggagctctacaggtttacttactagttcttatgtatattttaatttacctcattagctcacaatttctttggggaaaagtttatgcctattaatgtgtattctgaaaagttacattctctgttaaagagttacttccttgcaatattgaagatgatttattgcacctttaaatttctactctttggctccatgtacttgtctttgagaagctgagaaactgtagatttggttaagaactaaagttctctttccaaaaa

SEQ ID NO: 364 - DNA, 361 bp, Homo sapiens
ctcagttctttggaaaaattaggtaacttgaacgtagggcacatgggctgtcacaccaccccatttagagcccttattggcatagagatgataaaagtggactctgtgatggcctctcatgatctcaggatagcaggataggggaactctgagtcatggccaaaataattggtcaatgtacagcctcagacagctgggaataccaccccaaatcacttggataaggagatgttttccttatcctgtgtctttaactctgagacggatggagttgaacaatcaacgattgttaaaaatgtaccaaatgtgtaagcatcatgaggtgtttaagctgagcttttaaattaaaattctgctgggt

SEQ ID NO: 365 - DNA, 712 bp, Homo sapiens
gttccgggtctccacgccctcctggtttgcgggcagccgcgaagccgcgagtggaccgagcgagtgcagctgcctccgcggggccgcgcctggccgccgcctccctttacctccggccgccccgtggcaggtgtagaagctgcagaggccgcagcagcccagcgcgccccttccgtgtggccgcatgccacccgcgccgcgcccagcattccagcgtccaacagagcatgcgtgcaccattccagcatccggcaacaatgcaccagcattccagcgtccaacagagcatccgtgtaccattccggcatttggcaacaatgcaccagcattccagagtccaacagggcatgcgtgcaccattccagcatccggcaacaatgcaccagcattccagcgtccaacagagcgtgcgtgcaccattccagcatccggcaacaatgcaccagcattccagcgtccaaaagagcatccggcaacatcccggtgtccagtggcacatgtgcacctggacgttccagtgtggtgagctttcaggcacggagcaaggccaaagggataaaaagatgaaggtgacgcagtactcccccttatagtgcctacaggccttataggccagacagatctggaaataaataattcataataaaaaataattacagaataagaggcataataaccagatagaaagtattgaataaatctgtaagaaatg

SEQ ID NO: 366 - DNA, 7844 bp, Homo sapiens
accttgttcttgagctgtccggttgccacagggtcggacctggaggctgcagaccatcgtggccctttgcagtgttcggaaacatatgcgcaccccagaaaaaaacattccttggaaaagctgaacaaaatgagtgaaaactcataccgtcgttctcagcggaactgaggtccagcgcgttgcctccagcagggactgttggagtgagggagagcttccactagtccctataggttccaccacccagggcatccgcagggacagttgccgtgggaggtccgctgcctgctgtcaaggaagatggtcgatgcttctgagaaacaggccctgcgggttcctggatttggtgtggcctggcatccacggtgcaccccgtgctggcgggtggcccaggacggggcagttgccttgagaggcccaccgcctgctggcatgacagatggtcagttcttccgagcagtggaatctccatggagtcgtggagtcggtgtggcctcgcatccacagtgcaccctgtgctggtggatggctcaggacagggcagttgccgtgggaggcctgccgtctgctgaaaggaagatggttgatgcttctgagcaatgaaggccccatggagtcctggattcggtgtggccttgcatccgtggtgcaccccgtgctggtggatggctcaggacggggcagttgccatgggaggcgcaggcctgctggaaggaagatggtcgattctcccaagcaacaaaggccacgtagagtcctggtttcagtgtggcctggtatccacagtgcaccccgtgctggtgggtggctcaggacgcacactcatttcctctgcaccttcctggtgtcattggcatggaaggaaggcccttgtccaagaaggatggtcttcgtcttgtgtgatctttgagatgccatgaggcccctggatacaaatggtgtgggctcctttggaggcttttggatttctcctgaatgtggcgttggtatggaaggaaggccagtgaccgcaagggatgactttgatcttgggagatttttggagatggcaaagtgcttctaaacatgtttggcatggtctccttcaggctggtggatacctcaggatggtggcgttggcatggaaggaaggactgtgtctgtgagggatgatcatcctctcatgtgatccttggagatgccaggaagccccttgacacatgtggcatgggctccttcagaggcttttggatccgtcgtgaatgtggcatgggcatgcaaagaaagacagaggctgcaagggataaacttcatcttgggagatccctggagatggcagggaacccatggacacatgtggcatgggctcctttgggtgccggtggatcccttcatacggtagtgttggtgtaaaaggcaaacccgtgtcatgagggatggtcatcatcttgtgtgatccttggagatggcaggaagccctggacatacatggtgtgggggctcctccagaggctgttgggatcctcctggatgtggtgtgggcatggaaggaaggccagtggagacaatggatgatcttgttcttagcagatcactggatgtggcagggagtcctaggacatgtgtggtgtgggcttcttcaggtgctggtggtgttggcatgaggaaaggaggtatcttcgagggacaatcttcttcttgtgcgatccttggagatgccatgaggcccctggacacatgtggtgtgggctcctttggaggctgttgtatcccttctgaatgtggcgtgggcatagaaggaaggccagtggccacgagggacaatcttggtcttgggagatcctggaaatgatagggagtcccttgatatgtgtggcatgggctccttcaggtgctagtggattccttaggatggtggtgttggcatgaaaggcaggcttgtatcatgaggaatgattgtcatcttgtctgattcttggagatggcaggaagcccctggaaacacatggtgtggactctttcacaggctgttgaaaccctcctgaatgggcaaggactggatcgatgatgacttccatatgtacattccttggaaagctgaacaaaatgagtgaaaactctataccgtcatcctcgtcgaactgaggtgttgtggccatggaagtaaggccagtggctacgagggacagtcttcatcttgggagatccctagagagggcagggagccccttgacatgtggaatgtgatctctgttgggtgctggtggatcccacaggtggtctggcatggaagaaggccagaggctgcgatggatcatctttgtcttgggagattcctggagatggtggggagcccctgggcacgtgcagcatatgtggcgtgggcttcttcaggtgctggtggatccctcaggatgttcattgtggaaccagcacagattttcatacgaaagttatttctttttaacctcaaaaagtgacagaatggagtgtatcatgaaaaagtctgacatcaaaacctcaaaatgtgatattgattgggtgagatagaattccatggaatttcattgccaaaccagtgaagtgctaattttgacatttgtaccagctaacgtagctgtgaagaaacacaccaatacacttctaaggacagcatagaccaagatctaggtttcatatggatgaatttattcttccctttgaggcaagacaagaaggaaagaaagtattgggaataatgctgccctcccatcctcaagggccagtgggaactctaatattgattggttttcacagaattccatggactttaactgctgaaccaatgatgcactgattttgtcacttgtaccagctaacgcatctgggaggcaacaaaacaatactctcctgaggttaatgtggaccaaaaactagatttcatataaaagagtttattccttctacttgaggtgtgacatgaaggaaagtaatggaaataattctgccctcccattctcaagggccagggggaattcaaatattgaacggaagtgattttggaattgcatggaattctcactgccatcccaaagaaatgctgatcttgtcactcttacctgtttcattccctgggggcagaacaaaaggacgcactccaaagatcggcatgaaccaagaactgggtttcatataaaatattttattctgtcctcttgagatgtgacatgagaaaagtattgagaatacttctatcacctcatcttcaagaatccgtaggaattctcccatggtggactttacggttaacctgaacaggtcttggaaaaaggactttaaacattctcctgttctgtggaataagtatacttttttctggacatacaccttgtcagtgagttccatgtgatactagagttgcatagatttttaacctttacgccaatgaagatctgaggcaaacattgccccttttttagaagtttgcatttgtcactgataactgtaataattgatcttgttgaaaagcctgggaaatgaagatctgatatgtcacttttaccggcttcctcaactgaaaaagaatacaatgaaacacgctgagaatttttgtgctttctcagtcttgctgatgatctttctatgggcctgaagcgtggagagtgccagagaggctgatcctcagcagtgtggcagaggaaagttgggtgcgactaaggggtatgcggtgcccacatgccactgggtcctcagcagtaccacctgattggaagtgatattggtggaagacaacattttgccgcttggaattctcacctccacaccaaagaagtactgtttttgtcatttgcaccagcttctttctccaggaaagatcaaaacgatgcactgcaagtgtgattggtccagatagctgccttatccaactgcctcctttggaccacttcatcatgggacagcttgatgcaatctacttgacaagaccctggaaccccacacccctcatggaaccagtgtccacctcccagtcacagtgtgaccccagggaactcttgcctgcttgctttaaacccaccacttaaaagtctccacagaaaacctgtttgaatagtacccttgacccaataagggcattggcccctgggtgtctctctctctctctctctctctctctccctctctctccctctctctctctcgctccctgacctctgcgtgtggactccaggcatgccatatacccctcaggacctgaagcaaaagaatgaattaaagaaaactccagagaatgagctgacaacctactccctggtcagtggctctccatgcctacctgtggtctcttggacacccttgcagaagatgacttcctgggaactcttctgggagtgaatgttatcagcaaattcccaaaacaacaccccttagacaaaaagcctcctcacctatgcattgcctagaccacccactaaaggtgatggccacaaagaggtggatttgttgagttggtgccattccttctactgccagcttcaccaaaacaatgacacagtcttccttccgcatggagactcttctctttcctgtgttgcagtggatgcctcctgcagataagaaatgcttaactgagaaatgctcatgttgggatatcatcgatgagactttaatttgggcatggtgactgtttcccttgctgccacttgactcaatcccaggagcctcagtagaggatataatattacacaagatgctcaaaatggtggaattgctcagtgctcccataaatatacatttataattttcatttgccacatggtaaactgaaaaatacagactatattaaaaagaaactgcatgattttttttcaaaaattcaaagcatatttaaataatatataaattaaatgccctcctctcttccaattctgtccctatagttttcctctattaagtgaactacatgcattcttttagtggatagatgcacacaaacacacaagccattatggggaaggatccacgtgtgtggccatattgtaacacatttttctgcaaatcacctctttcatttaacagcccttattcaatggcctttttctttttcagtagtacatacacatctgtgtcatttgttgaatgacgacatgaatgttttgtagataaaatataattaaatgttttaagcatttctcactcatagatatttatgttagcaccaaatttctgtgcaatgaacctccctatatatcagtaattttgcatttgtctataatatcataataaattacttatcagttgaattactgggattaagtatgtgcacactttatatttatattttgaaaattattgcaagattgccttcaaaaatgtggttaacaactttatcttcaaatggcaatgaatgagattgccagctttcctacagcctcacagacaatggattttataaatatttaacatttttgccaatgtgatcacccaaactattgtcttaaattgtatctcttttgtttttgagtttggtcattttttcatgtttattagccatctgtattttttaatttcttctttatgtccaattttgtgggtgggaggaggatttagtctcttcctgatttcgaagagctcatttactatttcgggaaataagatttggattgtcaaccattatagctattttttacacacttttcaactttgtttttgttataagaatgtgtatgattgttacatgtccaagtataaccatgttcgcttttatggcttctgagtttcatgtcatttttggaaagatatatatattgagtccataaaacccttcacctatgttaaattctaattcttttgtgtttttttaattcaaattcttaaatcatgagaaatttttttgttttgaaatcttaaagttgccaagttacttgccattacttgcgattatttgccaataattgcccatttatctgtaccgccatcttgcgcatatgctgtactctcatctgtgactggctccatttttgttctgtggatttgtgtgtctcttcttctgcctcctgtctcgtgtctgctcgttggaagaaattacagtttagactgcaatttcatcaactttaataaatcaattgaggggagaattggtttttaaaaatattaagtaagtcttcgtatccaaggacaaggtatgtcttttcttattcaataattttaattactgttaatattttcactgtggtgatgggagtttttcttttaatttattttcttgttcattttttgtatctaaagtttttgttttgttttgttttgggggtaagttgtcaccttactgtttcttgttgcttttcagattttttcaaagtatagactaaatccttcacaaatatttaaagtttttattttcccccttcatattgatcctgattttagttatgttgacaaagtccacagactgttactatcagaacacttgaacagttatggaaatattacctacccttgatttaatcagagtttaatggtatgcttctttggtttgactggcacattgtcgctggtcatttcctcccaaagaccaccagaaagagctatgatcaagcaaagctgagtttgttaaacttacctgcagcaagggaaaacaccaccttgatagggtttaataatgtttcaaaatcaagaaatgaggctttggggtctgggcagggaactaattagaaatgggcaaaatttgtcatgcaataccttgtgggaaagtgagatgaggttcttaatgtgagtattgatggtgaaatcattttctaggtgagctgtttgcctatataaagatgttatcaatgacagaagaactatttgcctagataaacaaactgaatttatttattggtttacagttttatcttgctgggcaggactctgctgggggtggtatcaggtcttattcccaataggtaagttatttggatatgggtggtcttaatcatcaatgtgtaaaatgctgattttaagtgcgaaatactttgtctaccatgttaggaaagtctgccaccttttatcttttttaaggaattttaatcaaaaccaggtggtagatataatcaaattgttttgcagaatcaattttcctgttctctttaaagacttttatcactgtgaattaatttactattattgcaacttcctttaattccttgaatgaacagaccctactggttttaaaaatgttttattcttttaatttactacttaattgtgggtattttaatttgatttggaatttttacaagtatacaactaagtgaaattgatctgtgatttttcttttttgtgctatttttgtcatgttttgatatcagatattctggttgtgttaaaataattttgaggattttcttcttatactgtgttctagagtgggtaaaaaagccctagtctcactatcagtgtttaagtgaacacatcagtgacatcatctggactctcctttgtttttgctggtttggagttaggacatctagaagtttttttctttttttcctttttttgtatggttattgcttgttctttgttttgtgtcaaatttaacctgttttctcttagcaaatcacagctcatgcagattttcaaacacattagccttgttatacaaagtgttctttcatcattctattaaatttccattttcattccagttatagttatttctgctgtgcctttgttaatgaataagtttaaacagtggatgtttagcatcactagccttccccttccatctcccttaatcaggaccttggtataatttatcaggtattttttaaggttctaatttacttatatatattgtttctgtattcttttgtttcttttcttaataaattcttaaacctgtgtaa

SEQ ID NO: 367 - DNA, 580 bp, Homo sapiens
tgggtttgagagtttaatctgtgctctggcgcccacagtgctgcagcccctcatgggccagagacaggatgcacggggactcccagcccctacccggcaagagaggcatcactgaggctgcatctgccatgcgctcctggtgtgactgcaccctgtcaggcctgtgaaaggtcagcagagccaaggagcaggcaggagaggctggagccccgcccagaaccttggcgagctggtggccctgccaagtcctgctggccactgaagagggaatccagggcaaggcaggtgacctcctgggccaccagtctctaacccctaccccagcctagggaaggggaggacaggaagagactggatgctttgtaaaggacttcctgttcttggggacataactctcgtcccctcccagagccctggatgactgacaggcattccttggccaacacatgcttgagccgcgctgctggctgcagggcacctggatgacaggcattccttggccaacacatgcttcagccgcgctgccggctgcagggcacagaggctccttcagtggaattttgcctacgacacagagcac

SEQ ID NO: 368 - DNA, 499 bp, Homo sapiens
aggaacgcgtcgccgcgtgtccgtgaccagggcaccgcgccacggatgccagatcccaggctggagagagcgggttgccccagatccgcgggcagaggcgcagagccgaagcccggaggagaggagtttgagagccgccatcttcgggcggtgaggcaggaggaggctgcgggttggagcgcgcgtttgagcgtcggtgcgcgactgcgaaggaaacccgggcgggctggaggctcgacagcgcgtcgatgacgtcctcccggcctttcgagccgcacgccaccggcgcgctgctggctgctgcttttaaaagaagtgaggctgggcggggccccggcggggagaagaggctctgtgcagccggggcggatcgcggggaagttcctctcagcgcctcaggtgtctgggcgtgtgcagctgtgttggcgcacacttgccgctacagcccttctgtcagccctttagcttcgatggggcgctggtggccgcctccccctag

SEQ ID NO: 369 - DNA, 825 bp, Homo sapiens
atcccatgggccagcatttactgctgctggtttgttaacagaactccgacctcatggacatttggttgcttgatggttatgtgctgggagtagggaatgggaagatgattggaacacctggagtataagtggagtaaagagtacagaagaaatgcctctggcggaaaatttgaagcagtttctgtgcaagactggagctcacacatgaagccaactctgaggaagtacaaagtgttgtccccaatcctcgtaatatccagcttctttggcagcttgctctgcccaaaagaagataggagacagacagacagacaaacacacaggcatacacacagatgcgcagatggacagacaataaacttttcctggggatgtgaagaaagaatctaagaagtaaagatgggactccgtttcagatgatgaagctctaaaatgacttcagttgacgggtaaagcccatgacctctggcctcagcaggtttcagagaacaggcagatgggtgataatactcagaaaggcatccatttatcagtgagttttccttctaagctacatcccacacagcagctttgtgaatgccttcatcccacacctcagcaattttgaaccagaacaagtttccgtaaagggtaaggatgatctgtataaaatggtctgtgtaagaatgatctgcataagaaatgaaaagagcaggtgtgttcaaggagtcagacctcttagactctaagcacccccctctctcataataccttgtaactttggagacattctttaatctggttaaacctccattttcttggttatagcatgcaaataactaattc

SEQ ID NO: 370 - DNA, 793 bp, Homo sapiens
gtaattctggaccttgcatttccactttcaaggtttttctgaagacataaagacaaaaatgtatgcaaaatatgcatgctcactatagcactttttataataacaaaaaatataattagatattagaaacaatataatatacattatataaattaaattaatattcacatagataacaatttaaataaggcatatgtcattcatatgtgcaatgtatcattcatgtatgtttgtaaatatttagaaaatgtcttgaaaaaagcacatcaatgtgaacagtggtttcctctaatttgtggaatttatggatgaagagaatgaaagttacatatatgcatatatgtaactacagttatacataattatagttgtatataattatatataacatgttaattatattccatatgattatatgataattatatgtatatatttctatattctgatgatctttaaaataatttttaaactttttaagataactatagattcacatgaagttttaagaaatcatacagagcaatccagcatattttctaccaagtttcctccaatggtagtatcttgcaaaactatgctgctacatcaaaaccagtatgctgacattgatacaggtaaaacacagaatatttctgtcctcataaggatctctcatacagctcttatataacacactcacttccttcctgcccccatcgtctccttaacccctggaaattacaaatttgttctttatttctataattttgtcattttgagaatgttacataaataaaagtatacaaaattt

SEQ ID NO: 371 - DNA, 753 bp, Homo sapiens
ggagcagaataatctgcagctaggggaaggccaggctgggtctcagggtgagagttacagaaggatatgaaataatcggggaagaggcaagttacagcgggtatcctgatgcagaccatccccagccagaaacacagccgcagaactgagcccaagctccagaccaaaaactgagcccaagctcagggtctgcatggcccagagctggcatctgtccgggggactggcccaggcaaagtgaccactgtcatccagtccaggagctgtgagctgcatggaaagaatgtgaatgaagacacaactctaaatgtggaaccatggacgctatgtgagccagtgtgctccctagccgtccagaaaaacaaggcccacttgtacattctgcaagagcataaataaagctgtcctcaggcggcgtgctgtggtggcccatccttgcagtggcttcactggctgcacccctcagcaaggcctctggaacactgtgagggcagcacacccacccaacagcgtgggtaaaaaacggtctagctatggccttgccgcacgtggtgatcgctaacttaattttgcagcaaatttaatctgctctgtattggtattaattagaaatgttcaaaagctggtaataagggcagtgcagaatgggtccttcaggccaatttctggttctgggtatttgaagctcatatccctgcaaataacaggaagccactcacctgattcttttaactttgcgtcctggttatatgt

SEQ ID NO: 372 - DNA, 382 bp, Homo sapiens
tctttcttttcctccttcacaccctcctcttctgtctctctgcaacccctcctggtgatctctgagtctctgagcacctccgccttcctctcccactgcctctttctccccctcatcctctgggactcacattccctaaatactaatggcagggatttgctgtgccccatggctcagttaagttctgctccccagctctgccatcatctgcctttgcctgaaggtaccaggatggctctctgcaaggattcccaccaggaatgccaaagccagagacttagggaccaaaggacccagaagggagatctgaaaaattcctgcttaggggcgggtcctggaggctctgatttttctgggtattgagggacccaaactcaaccag

SEQ ID NO: 373 - DNA, 3361 bp, Homo sapiens
taatcttgcagcacctcagttttcccatttctaaagtgtgctgctaccttccatgcagggcgttgaggggcttccctacgttattacgcacaaagtcctcctcacagtgcctggtgtgtggtcagcatttatatgcctggcaccaggccgggggctatggaggcaaatcagctgggccctgccctcacagagttgacatcacttagtacgtaaccacattgggatacatgttttgaaggagaggacagtgtgtctggccagtgagcaacagtgggccatacgtctccagggaacccccgtggggtgtgggaggagggaagcaggtctgtcctgggggaatgtgtgggaccacctctgccctgcttggcagtaggtggatttcaggaccatgggcctgtgctgtttacagaaccttgtccaggtgcccagctgtgggagggcagcatggagaggaggaagagggggcccctagtagcaagcttcagaaacttgccacttcaggctagagagctcgcaccctcccacggcagcagggtagccatttctccctgactggggtgtccaccatggtgctctgcagccacctctcacttcattaagagtccacagatctaggagcagaggactggtctggagctgggcaagggcaggcagcaaatggggagtttttgctgtgtgacctgaggtcacttgcctgccttctctggactgcactgtagggcctggagacctgttcccctgttccaatttccccacctcagtgaaggcacaaccaacagctgctccccgggcatttccaagaccctccaggcccccagctctgaggactagggtggaggcagtgtttctccccagcatcaagtgaccagagaagtgaagtgaccccactgccgccacacagagccacacagtgcgatgtctggagctcctgcctcctgcaaggtggagggtggggcttggccaggagtgaccagactacagagtgaggggtgtgcttgtgggggtgaagggttggggtgagaactgagcccgagtcgaactcatcctcctctgccctgatgcactgtgcaacttgggggagtcactgtccctctctgggcctcgctttccccatcttcgataggacttggctctgcctggccactcctcctccaatgggggaattcctgggcttgcctctgtcttggctccagctcaggtgtcagtctcagccctgtcccagccaggaacaatgggccaggcagggccagtcaccccctgtccctgggggctccacccacggccctggactattttcagcccttgcagatggagtcagaagaggattttccactcccagtacaatgactgccctggaccattgtccagcagtgacgcgggggacctgcctgccccaaaatatctcctgcccctagtttccaagcctctttgccctgctcctcacctcctggccctgctccttacctccccaccctgatgtcatttcctggggctcttaactcctgaaggccattgtgaaacatcacgtgagactcctgggagacacaaccagttggaatgagttttccctcctggcagggaccccagggattgtttggctgcttagtgggactggtggcccagagagggctgtgccttacccagtcacacagcagtcagtgtgaagcttaggtgtaagcccagggctctttggctgctcccactgcctcagccaacttcattagctccagtctgtggctcctggactggagctacagtggtgagagctcaccactgagcttcctgggatgggcacctgggatagcagcccaagtggtgtgggtggagaggtgcagctcatgctctgaccttggagtgagcccagtgcaggggcctgaccttaaaccctttctccccactgagtcccatttttaccaaatgtggctgttaggaactgaatgtttgtgtcccccgccccacaaatccatatgtcaaaatcccaactgccaaggtgatggtattagaaggtggggcctttgggaagtaaccaggtcctaagggtgcagccctcatgaatgggtttagtgcccttacagaatggaccccagagagctcctcaccctctttccaccatgtgaggatataatgagaagttggcagtctgcaacctggaagaggtccctcaccagatcccaaccatgctggcaccccgatcttagacttccagtcttcagaatggtgagaaataaatgtctcttgtttctaatccacccagtcggtggcattttgttatagcagcccacgctgactgtgactgaactcagggtgacagagcagcagctctggggcaaaggggagggtgggggccacagggcagctgatgcaggagcagggctctggcacagttcagccatcaccaattctgggactgcaaattcagtttcttcatctggaaaattgaactggtaataccaatacctcttttcccggtttactagacagagacaatgcagtgaggcacaaacatgcaactgtttgattttcctcccacccatgctccctgctcagtgacgtgtgattttcctttcccatccataaactgcgcatttggcaaactccaaacttttgagtcacttttgggtaacaaagtcaggtttaagatttccatcgcctgcttaattgaatgctcacctgtcctcttcccccatgctgtgaggaccttcatcactcctcttctgggtccctctctcctctaggtgttggggcagggtggggaggaaagggaccaatgtgtctttcctggtgatgctacagccctctcttgctgaccttgcttcctgggccatcagtgccccctgcacagaactctccaaacatcagtccacacctttgtaaaaacagtctctccgctaagctatcccaaaatgacctgattagagtgtgcaacgtctttcctgctgggactctgactgataccctggtctccctgagtgattttcctgcacaccctgctggggatgtggaagcctgtccccctcccaccccacaccccacacttggctgagatctcacagtggcaaagatgtctttgaatccatggtgcccagggttcagcgtgtagagtgaggtggggtgtgtagagagctggggcaaggaaccctgagaagatgtcttaccccagttgtttccaggtttctttagaaagcgggctattttaccccatgtgtcctcagatttatgtcctggaaccaaattccaaatcagcagccacatgaaaagtcccctcctctctggcgtggaattaaactgttagacctgcctttgtgaccaaagcaattgtaaaacgtgggggaggaaattaaaagcctgccaccttagtcca

SEQ ID NO: 374 - DNA, 657 bp, Homo sapiens
tctttgtttttggtgttttagagtcggtgaaggctttaaaggaagtaggcagctggaacccggctgtggcgggttgaaaagcccgggcgtttgagagctgagacttgccagttcccacaggccaagccaggcgtctgcaccccattctcttggttccgacgaatatgctctccatgagggtgttcttcagggcctaccacaatggctggcactagagaagggcacaaaattgaagaacagtgaagacaaaagcaataagatgattaaggccatgtgagacagcaacaatatcaggttcctgaacacacaacaacataaaagcagtaaagaagctgagggatagctcgctcacctggcaggatggtgttcgggagactcccgcagttggaatacgggcttggtctcaaatgaaaagagtcctgcagttctcgggaaccttgttgcaccagaggcacctggaagcatcgaaggtcatgtgaggaaggccacacctctgtttccaaggaggaagatgtcaccgatgcccacagcctgccacagctcggggctggtaggctcctctcgattcctgcacgtttctgcttctgacactgcttctacccggagagttgtgtatttaccaagagtcagttgtgtgattctcaaacatacttatgt

SEQ ID NO: 375 - DNA, 753 bp, Homo sapiens
gaggattgggatattccgactccttaagggcctggcgcacataaggtgtgaccttttcattcccgttgttatggagggccacatctgccagagcctggagtctgcgaaggccgggacccggttccccggcccacagtgggggtgtgcaaacccgagagaactgggttgcaaattcgtgaagaatcagcatcatgtttggcagctgagtattggagccaggagcctgccatgaggttttgagaacagagtgctgttttagagctggcagcagcatctcagcccaagagaaggttatattcccagaggatgtcagtcccaaggaccagtagctgccatcagtttggattctgaaaactaactggcatcaacactgggtgtagaaacatgcttgccttatgtatcagaggacatgctcagcagatccaagagatatatttggcaactttttctagaaaaggcacattgggtatcattcattacattcttgagtttttttgggtttttttttttttttttgagacagtcttgctgtattgcccaggctggagtgtggtggcacaatcacagctcattgcatcctcaatcacccaggcctaagcaatcctcccaccttgtagctgggactacagctcacagcacacctggctaaaattttttttttgttgagacggattctctatgttgcccaggctggtctcaggctcctgggctcagatggtcctcctgcctcagcttccaaaggcacaggccaag

SEQ ID NO: 376 - DNA, 3207 bp, Homo sapiens
gatcgacatgcacttggatcattgcagtttctgggcctgctgtcatctcccccttcagtacttcccacatatgactaccaactgttagacgatgtgctgctgccagaccagcctttcatttcttggacatccggctatttacccaggaaaagtcatcctttgactatttttcatgacctttctcatctgactcgtgatctgcccatcttgttactccctagcagtgtggtaagtgaattcttgtttctgccttaaatctacttctgtctcagccaaattcattctcccaagaagacaaggatcgaggactgtggagccaactcagactcgccacggctaacaatgtttcctgggatcgcctcccaaataaactgcttgtacttgaacccttgtctcagagttgactactggaagaaccccagataagacaatctgcgagtagacatgtcagataatgcagttagatatgaatctggaattcagaggagaggctcatgcaatttgcaagtcatcatcaaaaagatgtcatttgttctgtttgtctactgcaggaagacagattaccctaaaatttagtggctgaaaacaactctattttatcgtagcttacaattttgtggattgggaattagagcctgtctcatctgggcaactcttctgttccccatggcatcacctgaggtcactccatggtattcagctaccagacgaactcatctggagtatccaagtattcattcacgctcatatctggcaccttggcagggatgactggaagcctgggctcagctgggactgctgaccatagtacctacaaatggcctcttcagcatggcttcttaaatggctgctcggagctaccaagagacaggaagtagaagctgctagtttcttaagacccagaaatggtacaatttcattcctgccattggtcaaagcagtcacagagccttccaagaggaaacacagaccctcacttctcactgggaagtatgtcaaagagtttggggctttttttttgagaaggagtcttgctctgtcgcccaggctggagtgcagtggcaagatctcggctcactgcaacctctgcctcccgaattcaagcaattctcctgctttggcctcccaagtagctgggattacaggcatgcgccaccacacccggctaatttttttgtatttttagtggagacggggtttcaccatatgggccaggctggtctcgaactcctgaccttgtgattcacctgcctcagcctcccaaagtgctgggattacagacgtaagccactgcgcccagccctggggctgtctttaatccactacaacattgcaaagctgtgagccaggatgagaacgccagaggtatgaatgtggattaaaagtccaagcactgaaactttcaatgtttagagaccagtgagagaaagaaccagcaacagagactcagaactatatcatattctgctgataagccaataagatgataatgataactaagaattgacattggctttagtgatgtagacataattggggaccttgacaagagcagtttactgggggtggttgagttgaaactttgattgtttcaagagagaatggaatgagtggaaagatagtttgtgagtgctagcaattattcagagaatttctgctataaatgggagcaggaggatgtatcaggagctaatgggagaaatgaggtcaacattatttcctatgtagctttctcttatgcccaaattccactggatatcatccacttctggttacttctggtttgggatgtataggtgaaggaatagttttggatcctcctttattacctgttttatttgcataattggacaataactaaacttgctttaaatatctcttaaagcattttaaattcaaatttggagagaggaatatgagagtggtttttggtcattgtttagccatatacaatattgtcttaccttctgcatttgaagtttttgatacctgataaatgtttgtattgtgtagttgaacaagaatttgccacatgaaggtttacagttgtagttttatgttaagttctttacagtagtcccctctcatctttatcccccacttggaactatctacagtagttccaggacccccctcccagtggatgattgaaaccatggatagtaccaaaccctatatacatattatgtttttcctatacatacatacctatgatgtttaatttctaaattaggcggagtaagagatgaacaacaactaataatgtaatagaacagttgtaacaatatactataataagagctacatgaatgtggtttctccctctcaaaatgtgttactgtactcacctatctttggtccatggttgtctgtgggtgactgaaactgcatataaggcaggggactactgtaaccacaggtgttggaaggcagcatagcagagtagttagggtcaggactgcggaggaagactgcctaggttcatattatgatgtaaactctccatgcctcacttttcttatctaatgcggagataataatagtaactcatttgtaaagttattataagtattaaatgagaaaatacatgtaagacacttagagtatcacaggtcatcacttacttagtatgtagtaagtatttgatgaggttagttactattcttattgagcagtgaatcagttaggaatgctttcggctgcaaggaggagaatactgatttacagtggcctcagtgagaagcctgcatttctctcacagagcaggcactgcagaggtaggcagctgctaaaacaggttcctttctacagctccaggggtctgagttggccactcttcagttccctcggacctcccctgttgtttgccacaccaccaatcatcacattctcaaaggcattcaaggcagaaagctgggaacaaggaagggcggagagtttctcttcaggagcctccctcttactagagaagaaaaaaacctgccttttatgggttcttttgtcttgtttttcatgactgtcttcatttgagaaagtcctcaggccaagaaatggaggtgctggcagttggagatcaggctgtccatagcacactgatgtggcacaggcaaggaatatggctgaggcaccaatttgctgctactgctgtctaacaggcattggaagtcttatgtgttcaaaaataaacttctgatttctactcccaaa

SEQ ID NO: 377 - DNA, 1482 bp, Homo sapiens
gaatacattgattgggttttgatgttcaaaacccaatcaatgtaaatcactattaactacaaaataaaagcaatatgatcatctaaatagatgtagaaaaaaaatctgaaaaaaacccaacacccattcctgattaaaaactattagaaaactaggaatagaaaagcattttctcaaccaattgaacaattgaagggtagctatgaaaaacctacagctaatatcatatttcatgataaaagatggagttttcttactctaaattcaagaatcagggaaaagtgtctgctctcaccactctatttaacagtgctggaaatattagccagcaaaacagataaagaaaaataaataaatggcatagactggaaagattcatagttggcacaattatgtatatataaaatcctcaggaatgtacactttacatactagaatttaaaagtaagtttagcaactgtgttagttcgttttcatgctgctgataaagacatacctgagactggacaatttacaaaagaaaggtttattggacctatagttccacatgtctggggaggcctcacaatcatggcggcaggcaaggaggggcaagtcacatcttatgtggatggcaacaggcaaagagagagcttgtgcagggaaactcctgtttttaaaaccaccagatctcatgacacccattcactgtcaggagaacagcatgggaaagacccacccccatgattcaattgtctcccacaaggcccctcccataccacatgggaattatgggagctacaagatgagatttgggtggggacacagagccaaaccacatcagcaacatgtcagaacacagaaaaaatgtaaaatatcactgtatttctatgtactagtagtgaactgtcagatgttaaaattcaattgcttagaatggcatcaaaaatatgaaatactggccaggcgttatggctcttgcctgtactcccattgctttggaaggctgaggcgggtggatacctttgaggccaggagttcaagaccatcctgagcaacagggcaaaaccttgtctctactaaaaatacaaaaaattagctgggcatggtggcctgtacctataatcccagctacttgggaggctgagacacaacaatcacttgaacctgggatgcagaggttgcagggagctgagattgaaccactgtactccagcctggggaacaaactgagactctgtctcaaaaaaaaagaaagaaatacttatgggtaaatctgacaaaataagtgtaagacctgtacactaaaaactacaaaacattgctgaaataaattaaagaagacctaaataatcggagagatatactttgtttaaaggtcagaagtctcagtattgctaaaatgagaactcttcccaatgcagtgctaatcaaatttctagcaggctttttgtagaaattgaaaagcagatttgaaattcatatggaagtgcgaacaaaacc

SEQ ID NO: 378 - DNA, 557 bp, Homo sapiens
agaggcggtcgcacaagggcgagctggagcactagtggagttggcgggaaaggcacggctgcgggcgccccctgtccgcacggaggagccgaagtcccgcagggtggggtccccgcctgcgccgagagggccacctggtcgagagaacaggcgacacggaaacctgagaaactcctctgtctggtgcacctaaccctcttcctcataaagtgcacacgaactctggtttttccgttgcaaattttgctttctacatagaccataccattcgttgctctctgaggatgagctcctggcttcccagtccagcagaagtatctacatctatttctggaaaggacctgaacttggcttctcgtccttctggaaagtgaggcgaaaatgccaggctgcgcagctatcctgaggcccggcctggaacctggctagccacccagtcctgatacctcatctcctttctgttggataaagtcattggataagatcccccagggtcttcttaatactgaacatctgttcataatcacataagtgaccaagtatagtggaaaacccga

SEQ ID NO: 379 - DNA, 1836 bp, Homo sapiens
gaccattagtttccactgcagtgtttgcagatggagtcgaatgtaaccccccgggaatggagccgggagggtcagagaacgcggctgcgctctggatctccgaaggggggcgggggcctggaagaggtccgggcccagaatggacctccaggtccctgctgccgcaatctggccctgccctccagcctaccccttactcccagaggaagggacccagggagacccacccagatgccctgaaaggaggtggaggatgggggtggggcaatacgcagagtttgtctggtgaatgcaggaaaggggtgggggctggagaggaaaaggatggagcagccgtcagcttgtcaactccgcatctgctggctgcctcggccgggctccagcctgcgccctcgcccctcggaacagcgggacccaccaccctctctcaggcaccttcaggatctggtactgttctggagtggcccgttgcagacactgaaccaccagccagctgcatttgttgtcctggatgtcagtgccaattttgccggtcacactggggtccccaaagaggtcaaggcacgctgcaatcctgtaccctgaaaccagctagatgagcatgtcctatagaggccaaggctaccatgggcaccctctgggcatcgggccctgtctgcaatacacctgcaggaagagctcgatcaggttcagatctgtccccggcgggtaagggatgaatccatgatgtcatctgccaccaggaagaaagcttgcagctagaaagagtggaataagacctgcagggctcctcattactgttccttctatcagcaacagagctgctactttatatctgtatatagttttgcttttttttggtaggggacagagtctcactattatccagtgcagtggtgcagtcacagctcactgtagcctctaactcccaggctcaagtgatcctcccacttcagcttcctgagttcctgagaccataggcacataccccatgcctggctattttttttttttaatttattttttgtagagacagggtcccactatgttgctcaggctggttttgaacccctgggttcaaatgatcctcctgcctcagcctcccaaattactgggattacaggcatgaggcatcacagccggccagagctgctgcctttgacagtccctatgagctgggaaagtcaggatggggagacagaagacttctgtgctatggagacttggaaagtgacataacatgtttggctcagactccccgcctataaaatggaactaaaacactcttgttttaggttaagaaactagaacagatctttgacatctctaatgagccctagattattcctggtgtcagggagattaggaaacaccttcatataccgtactctattcttgccaaaaacctcaatgaatgcttaaagtaagatctattcatgaaactgacttcacattacttcctaaataaaagaaggctattcccacattgcccccagcactgtgtttgaacaccctggtgactaggaacacagccttacctaaagcagctccttagcagtgcaggtctaataaggtggaactgaaatctgactttgacctatgagtctcagacatctttaaacatctttaaacattaactaagggcttactcttctgagtgcccatctgaaggtacctgaacgtgtcgggtttcccactagaccatgatctccttggaagcagggacagtaacttccccctcttagcatttgcagagcctagcacagcattaggcctggagtgagagtttcctaaacacttgtctgacaaagaaattaataaaacactctaacattc

SEQ ID NO: 380 - DNA, 4660 bp, Homo sapiens
gacgtcatctgcaggccctggagacgcgactgcagttaccgagtttctaaggcctcgtcccctgacgggaaggcggcgttggggggcggctgggtttacccttcgagagtccgtgtgagaaccgggacacctgtcctgttgaaaagggggacgcaaaagctgaaaatgcccggaaggatatggcttccttgaactgcgggacgtgtagctgcagctgtggggtggaccatggaaacagatcagcaggaagaagagatggaagcaacgccatggaccttcacgtccttcagagtgtgggtgggcttgggctttgcagtgagagcaagtatcacccaggatggagatgggaggtaatgggtggccccgacaggtgcctcctactgctggcagcaaggagagagtgaagaggcagaatttccttggtctagactagagtctgggtcatgggcatggcagtgcttgagcttttgaccagaagcaagtggacatggatttgagcttcgggtaagaagggagacttctctccagggaccataggggctggcagctgaagaaggtgacttggcccctctctagagggtgaacgcaggatcaattcaaggccatgaagtggatgcagctgggagagcctgcttggtgcttttaaacctcaacatgtcaaccgcaaatacctcaaacactgctcacaccgtggtaaaatctagttgcgaaacctgtcccgcggcagccttctccatcccaggtgcccaggccccatctcctgggagcaggcagctctccccaccccgattcatgtccctcctacagcccaaggcaactccctgccaccttggtgaatgaagcacatcatgctgcccaggcttctgagctgtttgccgtgttgcggagatgcagccttcagccttggatacccacccactcctctacttgggcattgttttcacaggctgctcttccctgtagcttcagagaagtaggtcaagtaggttaactcgctttaagggagaagtgccaggggttcaagtcacccagcctggaggcaggaatcctgggttctatttttggcttcacagctaatccgctgtgtgacagtcgttaggagctcattctcccctctgggtctccctgagcccttctctaggtcccacaatttttttttttttccctgaagctatattccctggactgtcatattcttccctcttccctccctctgggaggtgctttaaagccgttggctgctcaaggctggcgccctaggcaagaggggctgcagttgttgtagctgatgaggaggagataagaggcttttctgtagacacagttgagctgatgggctgtgtgaggctggagtgccaggaaaccagactcctgtaactacaggacaggccctggtgatgtgatgatggggatgtgacggggatgctgaagcctggaatgcgagtgggggttcctgcgttttatgcaatggctgtagatttcctcccacttctaagcctccctttctgtgacacgcagggaaattcagtctctagttcatatggaaacttgggacctcactgtgctgcttgctcttggcagaggatatcatttgagctgtcatagcagaggaccacatttaccagggtgcactttggccaaagaatagtaacctttctaaggcttagttcctctggcctgaccaaaccagtcccaggaggcccctgggttccagtcaaggtcatgggagaggcccaccatggatgaggcctgggggagcagggtggaaattaagtgcccaggtatgttatggatagcctgcagccctctccaatccctaccctccaaacccagtgaagggggacatgaaacaggtgaggcagaggagcaaatgcgggtcaagaattccgaactatacttgacttacagtgcagctgtgatgtgcacattggtgtgtgccacgagacagcatagtgtggtggaaagaaaatgggttttgaacagagtgtcctgggtttgaatctctgcttgcccatgtactagagagtagtcgaacctctctgggcctcaatttcccagatgtaaaatgggaatagtagtacttaccttgcacgggtgctgagagaattccatgagacgacacaacccgtgtaaagtgcctggcataggcatatcacattagggcactcagtaaatgtgatgtcttttctacttgccttcctgtcataccggtccccatgttttggatttctgcagctaaagttaagaagctttttaagataggaatcccaattctcactttgcctccttttcatagctcacctaaatggctgacttctgttcagcacctcttcatgggtgcactattctggagagggagatcctagagttcccaccttctgtttgtttgtttttgtttgtttgtttgtttttttgtttggtttgtttttgtttttgagacagagtctcgctctgtcacccaggctggattgcagtggcgcaatctcggctcactgcaacctccgcctcccagtttcaagcaattctcctgcctcagccttccaagtagctgagactacaggtgcctgccaccacgcccagctaatttttgtatttttagtagagatggggtttcaccatattcaccaggctggtcttgaactcctgaccttgtgatctacccacctcggcctcccaaagtgctgggattacaggtgtgagccaccatacctggccagcccttctgttctagactgtgagcccgaagactgcattctctcccaggctcagtttccttatatacataatgccaccgtggtcaacctctacagcatcatttcctgcacatattttgtctaaacaccttgactgcacctcagagaagctgggtatgggccggattcctttgccatttaatgcatacagcccgcagaacaatgttgtctgctgagcccctgggggacagcagagaattggagcctcttttcatggttctcacaggccatgtgacacacagatgggagaagctggcatctgcagggccaaaggcctctggccaaggcacccataccaaaggggacagactggccaaagcagccttatccctatctccttaggaaccacattctagtgggatctgtttggtgatacaggttgggagcatgggtggggaagcctaccccaggcctgattcagtcatgaggatccaggagcaccctccaatggctgttgctaactacagttgccagataaaacttaggtggaatctgagtttcagaaaacaaacaaaaaatgtttttagtatgtctcacctactgcctggggcgtacattacaaatcagtccttatatatttgaaactcaaattacattgggcatcttgtatttttatttttttgagacagagtctcacactgttgcccaggctggagtgcagtggcgcgatctcggctcactgcaacctctgtctcctgggttcaagtgattctcctgcctcagcctcctgggtagctgggattacaggcgcctgccaccatgcccggctaatttttgtatttttagtagagatagggttttgccatgttggctaagctcgtctgctaaccctagagctgacaggaaggcttttgggttgggcggttttacggggaaaatactctgtaacagcgtttttcctttactctcacatcacaacaatcaacgcagaagagttatgaccaaatgtcggggtggggggggggcgtttccccacacaccaagcagctgggtgtcctctaatgcagtctgacactgaaaagtagtgtcagatcccacattggagggctcagtccccaagactgttcccccaacaccagttgtaagtccagacctccagaacttctgaccaactggcttcaagttggggttcccgtgactccctcttcgggttcaattaatttgctgaagttgttcagagggactgaaatttacaaaggtcagagatggtagaggaaagagtatggtaagtgtggtgtgcaagcccatctagtgggagcacagttgaggagggaacaggaggtggaagccaggtgggaaaggaagtctggggccctgttggaaggaccttgaatgctgtgttgttatgatagacagttttcctccatgattcctggctcataactcccatagcccttgttacagtcttttgttgtaatattgagtgtgttaggccacaggaaacagactctctccttctcctgccctcctttcacctgcccccaggcaggactctaatctttcctggactttccaatggttgttcttaagaccattcccagagaggttcccaccctataccccgggggaaggaatgctgacgttataaagctttcataaaaacccaagcggacagggttcagggagctttgggataactgaacacatcgaggttcctggagggtggtgcctgggggagggcttggaagccctgtgcccctcctcccacacctgaattgttttttctttttcccttcatgaaactcttccctgctccttgtatgtgcctccatagtcattataagattttatgataatttttacatgtctccccgctcctaagtaccttccacagtgtctagcatgtcatagggagtgattggtaaatagctgatagaaagaacaaattaaactatcagccttgtgaa

SEQ ID NO: 381 - DNA, 1489 bp, Homo sapiens
tgccactgccatgtaagaagtgcctttcaccacccccacaccctgccatgactctgaggcctccccagccacgtggaactgaggcagctgtatggaggccaatatgcagacaagggaagtaactcaggcattttgggggagaggtacagaaagaagagaaaagactgaactgactgctgttctgaacaagaactgtgactatatgtggtactcccagaatgctggtttcctttcagacccatcaagtggccatcctattggcttggactgaagacccccactggagaactgtctctgcagcctatactgatgacactggccactgtccagggctccaccccaaggagtccaagccccagacatttagccttagagagaatccagattttgcatttccagtgcagggattgatggagccttgtgtatcaaagtgccaatttctttctaacaagctagggaggataccgttgacagcagcagaaaggggtagcagtggtttgctttccaaatggtaataagaagggcctggcagtggcaacctgtccacgtatcattaaaaatggactctcctgcttcgtttggaattcaacccaatgaacttgaataaactctggacaatgaccagcacagagccctaagcaggatacagcaagattatttgctttactcatccactgagtacctaccatgtgccaaatactatgctatatgccgagtatacactggcaaataaaacagatatggtccctggagcctatgaatcttaccccatctagccacaaataataaaaataagaagaatctgaaggacaagtgggacagaaatactcaagcagaatgagggtgagattgaagtccctgaacatacagtgccctttacacttgatcttagccaaaaggccgagaagagattacagtgctttttaaaggtagcatttcacccagccaataatcaatccctttggccttcttgaggtgcaaggccacacactcaaattctttaatcaaacaataggctagtgcaaatggagctatttcttaaacccagctgtttacacagcagctacaaatctgttcagaaggaatcccccaccatccacaactgtctatcgagcagatgtgcaagagtatttgtctctcaccaccagggttgcagtcaggacaagagagcaggtttgaacgtcttcggctcctagaactgcacaagctgtgtcttcagtgcccagaggcggctgcaacgtctccccagttctcctctcagaacaatggaaattttttttagaggcgtaataggaaggtttgcattgaattattaaacaatgggtattgaaaaatatgttttctttgacctctgtacttctagcttttaccagtcagtgttttcttgtaccaaggctaagatatgtataacactgaaatggatgtcttcttatataatattttacaagcttttgaaaacctgtgccctttaataaattttaaaacgttt

SEQ ID NO: 382 - DNA, 216 bp, Homo sapiens
aaggctatactttcagggatcatttctatagtgtgttactagagaagtttctttgaacgtgtagagcaccgaaaaccccgaggaagagaggtagcgttttctcctgagcgtgaagccggctttctggcgttgcttggctgcaactgccgtcagccattgatgatcgttcttctctccgtattggggagtgagagggagagaacgcggtctgagtgg

SEQ ID NO: 383 - DNA, 716 bp, Homo sapiens
gcctgggcacagtgctgtctcctcagggtcagggagacactttcagaaggagtaggggcactaactcaccacccccacccctgttgaacccccagcacactgtcttgctcggctgcaagcccgcagctttggcctcagctgttaatcctctcagaataggacggaccagtggcagggaggaacgcgcgtctgcctgtggaatgagagactgtgatttcttaaccttgatggaaaaggggaaagccacatcttaccaaactcttccgctgcgtcgtagggaatttaattacatttggacatttgaatgagaagcagatgtggctctggcccgccggccagcagctctcaaaggacagccactctcctgtggtctgcagggctcagtgctatctcgtcacgctggagggtagctcggggagaccccttcctgggaactaggagccgtacacgcccagtgaggtcactagagcagaccctcccctcctgtgccacagatgctgacgcagatgagaagtgaagtgacttgcccaggtcatttggcacatctgtgacagaactgaggccagagtgaagtctcggcctcctcgcacagtcctcctcctccctgggccatccacagggagtggtagggcagggcttctcccacatctggccgatcctgagcatggctccagccagtcctcagatacatccaaaccagcgacagaggagctggg

SEQ ID NO: 384 - DNA, 555 bp, Homo sapiens
aatgcacagcttctccgcggtcagcgggctggtctctttgagtttggaggccaggaacatgcagacagcacccaggagttgcagatgggacttcggagtcgggaccccagccaagaaacggtccagaagaatctaccataaaaccaacagactcctcctgatctctacctgtgctgtctgcctctctagttccggacactgagagctggtgccctgtggccacctcaagctggaaccctgcaagatcaccaagaagactgcatgcctcgctctagccttcctaagggaaagtagactcctgtttttgagagaaattacctgatttcaagagaaacataaaggactttttttcccttaacattccactcgtaaaaatgaagtttggaagaacttctgcaaactctgagtgttttggtcaattgaccttttactgtactaagcaaatctgaagccacaaatacattggggaggaaggtatacccttcacaaaagatccgtcacttagccagatactctgttgccatgcttctttaaataaagcacatttctggtata

SEQ ID NO: 385 - DNA, 800 bp, Homo sapiens
agaatgtcctcatttgtatggtcaaggctgggttgcagagaagtccatgttgcagctcatggaaaaaaagaaccaaagggactcaagaacactggcttatgtcttagattggagatgacctggaaagtcaactttcacccataacccattggcctaaaacaatagaaggcaactggaaaagaggcaaggattctaactacatactgcagaaaaaatattcacacctgtcaaattccaacagctggcattgttgttgttctacgaataagcacacacagaatcctcgtgaatagttctttgtctcttgctctagtaaatcataacctgcttgtagcttttttatgaaccttcaggaataactcttcagaggatgctaatacatcattaagattaaattgaacctcaaaggtgggttttttttccaaaatgataaaggccaccaacactgcaaggtttgccgtcattcccttgatctggtaagtgacaccgtcttcagggtttgtgtactcaaagatatgattaataaaacggtgaccaagacgtgtgacgtaatgctggtcatggacctgtggatgcaggaaataggccagaggcaccaggaatacatccttaacttcagcaggattcggctgggcctggaagttgtggtctattaaacccacaaatggagttatcaatgtatctgtctaaaagcagaaaacaaaacagacaaattaagaagtgaagtgatactgcttcaaatcctaaaatcatgccacttctaggtgagctaagaaaatacaccgaacctgggagaaggg

SEQ ID NO: 386 - DNA, 754 bp, Homo sapiens
gtgtgagctgactgtcccctgggagtaattctgtgaccataattagccacacagctcctctggaggcccctctaaaggacccccaagcttgggcacatgacccaaggtcagccagcaagatgccctgtcccggaaatttacatctgtgtatgagccacatgagaacagggaagcttgcagtgagagcacagcgattttcctggaactgccccacaaggctgtctctgagccccttttgctgggtccccagagctgctgtggctcccattcttcctgaggtctgagattccatcttccttcagttctgtaggatcctgattgttacacgaactgtccacctccatccagagccgtgtggcttgtagtgccttctcgtggcaggtatattttcctgcctgttcacgtgacttgtgttggccagtggaatatagtttgatctgcagtagtttgaatctgaggatgctgaacctgtggataaggagagcctacttttcttggacaaatgccctgtgtcagaagagtgtggtaaacagaagctcagctccttcaaggatgacagccttggttacaccaccagtttctctaggaaaagagaccaaagtcagggagcagtcgttttcacatgggatgaactcagtgtaagaggcaagcagattgtggaagattagaagataatggatactattattccatccagattcctcttcaggaccaaggactcattttccagctggcaggaatgttagctactgac

SEQ ID NO: 387 - DNA, 436 bp, Homo sapiens
gtggcaaacggtggggggaacaatcaagacggacccaaagcggttgcagcagagagggaggcatccaatcccgtccaccagcccccaaaggccgtcgtcctgcctggagaacctagcagtgctaggaaactgacttttctcaaaaatgaactctccctaccaatctgcaccatgaaattatttcagcaaacaaaaaataatggttgcccatcaccgcacactgcgtgtgactcagccatcactcacaggcaaagaagggtgttctctcctctccctgtcagttactaattctctgtaaatgaccatttgacatcctggccggggaggattcagatcagagatgacttccccactgccacaaagtatggttctgggaaggacaaccagccccaaggccacgaagattctgaaaaagtttcttctcatttgaagtcca

SEQ ID NO: 388 - DNA, 829 bp, Homo sapiens
cgccaccagagcttcgtggcttaatgggggaggcgaggagccactgcggacctgctcgggacagtgaagggcgccagtctcagccctcatctgaaacctgctccgtgaccctggactagttcctgctcctctctgggccaaatcctggccctgctcctttctggctgagtaactttgggcaactgtgccctgaaaccctctgccctgctgaagaatggagaggactcccccaccagcacctccacctaggacacatgggaactgtgggacttggagcaaagttttcaagtctctgtgccttagtttcctcacctgtgctgttctaggcgctgaggatgcagccgtgcacaagacggatgaaatccctgccctcagggggccgacatttgcggagtaaataaaggaaaggccaacatgaacagctgatttggataccatcaagacacctgaaattttagcatgagccagatgccaaggaagagactccgggaggatcctgaggaccccccggttgcagccatgtcgaggctgatgctgaggaggaccccaactgtcacgagaaacacccgtcgaacacagccacccagctggagacagatcaagaagctgtcacagatgatggaagaaaacctgaggaaagcgggacaaccactcagaatgagtaatggtagctatgatagtggtaatcaccattgccgtgagtattccttaaagaagggctgacacagagaacaattatacttattaggcatattcatcaatcttggctggcaataatgcctggatgtaatcactctatgacacagttacatgtgctttctgatctcag

SEQ ID NO: 389 - DNA, 451 bp, Homo sapiens
ttttttttgtttttgagatgaagtcttgctcttgtcacccaggctggagtgcaatggtgtgatctcggctcactgcaacctcgacctcccgggttcaagtgatccgtctgcctcggcctcccaaagtgctgggattacaggcgtgagccaccgcgcccggccattccttaatgtttaacacccagtgcatattcagattttcccagttgtccgcaggatgtcttttatagctgctttcttcaaaccaggatctattcggagaccacacattgcatttgatttttatgtcttttgagccttttaaaatttagagcagttccctataaccccttcttttgtttgttttatgaaattggcttgttgaacttcacaaaacacgagttggggtcatgccaactgtaccgttagtgattagtttacatatagggaaaataatttgtgaatgttggtc

SEQ ID NO: 390 - DNA, 135 bp, Homo sapiens
cttggcccttatcgaagctgcagctgcttccgcatagctgctgtggtcaaaaaggagcccagagtgacagttttccttgacggtcgccgttctgtttgttgtaactgatctgcaacattttgggaaaatacagtt

SEQ ID NO: 391 - DNA, 914 bp, Homo sapiens
cagacacagacagagcctgcaaaagaggcaggagagtaagcagcggtttggaacagacaggaacagaacaaactgtgggcaccatgggacttggcatccagaggtggggacactgtggagacaaggagcactgtggatctgcccagccacccagctgtgtgagatgagcccttgtggaagctccaggccatgcaaaggggacaaagaatcctttccccttgggacgtttccagagcttcttggataatcccatggtttgggtgtctgaaatccctatgggaagcccagcacttccagagtgactgctgggattctcagagcttcccagaaccagctttgatttgtgcggctaagctatgggtgaccagctgcagaacacccctggttccgggccagctctctgggcatggccagcaatggtccatggggacctctccaggaacactcagtccaaacgtgctggagtctgttactgtgcatctctgggcatgagcctgtgtgtgggtgtaaacggacaaatgagcgtctccccacggcgaacctcactgtgttgtcatgttgtgtcttcacttttgtccactagcatgtgtgtgtgggaggggactcacgtctagatatgggtatataataatatgagcatacgacatgtcaaagctcatgtgaaagagggtaggttggggtatgtagctgtgtagccatgtgtgtgcatatggatacaccctcctagtggttctccaccccgttgtggcttacagctgccttagaaatttccccttttgctgcctcaggatccctggcatgttccaatgtaacctgggccctgccttgcagagaccggcagtttggtgctctgttggcctgcctttgttcctgcagggtgcagctcctgtctgctttccctcgcctcccattgg

SEQ ID NO: 392 - DNA, 733 bp, Homo sapiens
ctagcccagtggcttccaaacctggagggtcggcctattttctttattctacaagtgcctccactgtgcagcaaagtgtggaaaccacttggcttgagagagctgggtcctctggagcagttcagggtcaccacagaagtaggccgtctcttgggcctattcgccccagcttcgaggtggtggtgctttattagtgttattaaggctagagtgcagtggtgcgatctcggctcactacaactcctacctcctgagttcaagcgattctcctgcctcagcctcccgagtagccaggactacagtgtcgaggtcatgaaagccactgaaagactgagaactgttccagaaaggagactagagagacatggcagccaaatgctccacataatcctgtcctggattcttctcctacaaaggaaggggtctgaggattaggtggtagtactgaatcaaggaactatcatctcctattgtgctgtaggcaaacttgagtgacatggtggaagccaccagagagaatatctgaagcaattcattaaaatcttggcagccagaccccagctcccactttccctgaaagctccctttaatgaagctgaacgctgtcccagcaattccctccacagaagacctactgtcaccacctctggaggggcaattcctggaggaaccaagtcagccaatcgaaggtcctgaataagcaaaaactaagtaaataaattaccatctcgaa

SEQ ID NO: 393 - DNA, 3457 bp, Homo sapiens
ggtttttggggatagttaagcccaggccttaagacagtttgatattcagttttgttatttaggtctgggttagggataccgccagagagcatccaaacatttctgtggttgggaaggctagttatctgtgagcattccagatgaaatagcctataatgggttatcaccttttgatcttacctcagagaagattgaattggatctacctatctgatttagcagaattaaactggatttggatggaagggtaatcagctatttaatttgccagttgttagttagcatttcttcttgctgtatctcaaggatttactttgaatattctgtattttctctttcctgcccatgatgggttttccttttaaaatgctcagcacaggctgggtgtggtggctcactgatctgccagccttggcttcccaaagtgctaggattacaggcatgagccactgcactcagctagaagaattctgataggctctgagcatccattgttccaggtataacaattctgactttttcagatactctgatgcttttatggtatcctgcttgctgctgtcttcttttgaaattggagttcaatcactctgcttttctttcttaatacttgtctgtttcctagattttacatgcttttccatgaacactaatttcctgtatgaagagggaatatacaaatgataggatgctttcctgtaactgagatggcagggggaaggagaggacagcaactcatacagaaggaaatcagcttttgttgagcacccagaatttaccagatcagatagagaggacaggtgtagaagaaaatgagcatgtataaagtggaatagtgggacaataaagtacaaatatggaaaattaagtggaaggcttttaatgctgttagggaacttggattgggttagtaagttatgagactgacatttttgatccttgaaatgtcataatcagaggtgaattataggttatataatccaatagtttagataattaattaaattgggaaataagtcataggaccaataaagaagtgttttgagagtttctcttaaggaatgaagacctaacgagaatagcggcaccgcagtagaagtgttgctaaagtacattggacagaaataagcaattggatattgggaaagaaagggatgaataaaaggtgacatgagatgttaagcctgggtgatggagagaatgtgatctcagcaggtttgtgggtggaggtaaaaataagttttgttctagatctcttgcttttgaggtgctggtaggatattcctgtggagatgtgtagtagaatccgaagtgtgaaactggaacttggagggagagatcaaggctggaaataaaacatgtatgagtaaggagagttaaaaataaagagaaaaagagagcatttgttagctggagtaaaaggaagggtacaggaaaagcatcatagagaagagagaatttgatctgactttaaaagatgccgagtcggtatatggcattctgttcacgagctttccttgttgaggggacatcacatttactaacttgagagataatacatgggaagtgttggacaaaggatactgcatccagaatgacctttctaaactacaaaatcatttcccctctttcctgcttaaccctccctcagtggcttcttatctttcttcagataaaggactgactcctaaatgtcttcatcatcaccaatttgaacacacattgtgtctcacactcctcctcgttcctcactcttcttccccaagactggacagaatgtgaagaagatatgatttccaccagatggagtactctttatacttttttggggtcctttatggttactttttgtggccatggtcaggttcttatccataaaataattattgataacttcctaatgtaaaatgaaaaataatgataaatcacatacttccctcatttttacagaattccttgcttgccttatctcttcaagtgttgactgcaaggttcctgtacacttacttgagttggccactccggtcactataccctgatctctgacacttggccgtggtagcctggagcagcattgttactgggcattgctgtgattgggttacccagctgtgctgatgtggaaacctcagggctatttattgatacttggtttcctaaaggaaagttgagggaatgtattttatgagagggctttatttacacgattaaagaggtttataaaatgtggagatgaatataggtgaaacagagaaagaatgctggtataggaggtgttttcggctgggtttggtggctcatacccgtaatcccagcactttgggaggctgaggcgggtggatcacttgagtccagcctgggcggcgtagtgagacccatctctacaaaaactacaaaaattagctgggcattgtgttgcatgcttgtagtcctggctactcaggaggctgaggtgagaggattgcttgagcccaggaagcagaggttgcagtgagccaagatcgtgccactgcactccagactgggcaatagagtgagaccctatctcagaaaacaaacaaaaatccccaaaaaaccaggaagtgttttcttagggtctagttcccaggcgaatggtatatcctgattctaggtttataaaaatagtatattattcataacatttgtctaaagtgacacatttacatacagtatatagtattgagtaatttccaactctttaaaaataatggagaccctttcatgtagtagtaactatgtttttagtatctgttgactgagaaaatacgtaacagcaaaagctactataaaactttgaaataagttcttgtaaatgtaaaaaaaattctcatatatttggaaagtatacatgtggaaattatgacttatagagtctatggacacttgatttcttgctttatggatactctcaggaagttctggtctcaactttgagtatctcattgtcctcttactttagaatgtggggtatgggggaaaacttctatttgaaaatttgagccatagcggaaattttggaatgacagggaaacaccttctcagaatcctcttacaataaaatttatatatgttatgccagacaatgtactttatactaagactggacttttaaatagtctcatggattagaagtcagatacaataaataaatactttttaaaaattatatttttaggtatatgagcattgttgttgggactacagtgctattttaaagtgaaatttagttgatttgcatgtgagtatacacctacaggtctctgttatagccgtgacatgtcttctgttactataaattacataacaaatccttatggtttcttgggtcacttattttatttaaagacaaaaacatctttcagtacatatgtaagacttaaggcattattgaaaataagcctgtgctacatggtagaatctattaaaaaaaaaaaaa

SEQ ID NO: 394 - DNA, 784 bp, Homo sapiens
aagcaccaaccaaaagaagaaaggaggatagaaaaaataaaatggaagatgtagggtgggcagattagggctgcgtttgttgcttgctttcatgttaccatcatagcgtttttgccacttacaaaggaggaaaaaaatcaattctgtgccaacccagacaacagagacctgagtgggggttgggaagagagatttttcagcacagaatcagactccttctccaaagagctgtgtggccttcacctgcaaggcgacctcttccacaagcagaggccaggacaaaaagaggcacctgtgagcgacaaagacggtttccttggtttccctcacggcgccaagcggagtggccgcctcccaccacagggccccctaatgggcgcttttgtcctgcggggcagagggacctcattagaaggcgctggtgctaaagggaaatgcatttccagaacaggaggtttcatcattcctagcgttagcgacagaatggtgacagaagctctgtggacgtattttccagcgttcagttcacatcaaggatgggtatgcactggcggaaaaggtcagctcgcagaatgatcgcccatccacacagcgtttggaggtcagacgttcctgatgactgtgaaaatggggaggtgagaagaggtcgtcaaagggagcagccttttaaagccaggtcagctgctaacaaattttgtgactttggaaaatgtactgaacttctctgaatgtttatttttttatcccatctgttgaaacggtgctaaaaatattatctactctt

SEQ ID NO: 395 - DNA, 805 bp, Homo sapiens
ggggtgcaccagggcagcagctacagggctctcctcccaagcacccaacgagcaagatgggtctgaggatacctgtgagaagtaattcaacacatctttcacacatgggccaatttgctggtctaagttaaattggagtgacaaggacagctgcttaaagaagacgaggtttcaccgtgttagacaggatggtttcgatctcctgacctcgtgatctgcgtgcctcgacctcccaaagtgctgggattacaggcttgagccgccacgtccggcctcagaccatttttctagagatgcaagctacagatgacagagccgaggtcgtctcctccaggtcccagagctgctatgtggctgagctgcagttcagagccagggtgactcagcttgcaagcctgtgctcctcacctccgtggcatgcttctcccaggctggcactgaatcaccggaaggactccttaagacatggataggggatccaccccagaggtcctgaatcagcaagtctggggaggagactgagaattgacttttctatcaagttccccagtgatgctgatgctgctggtgtgcgtaccacgttctggaacctccgctccctgctctagggccttctgggtggagccctagagctgagctcccagctgtgggcatggcaggcactgaagagtgttgctttagggtaatgtgttaacagtctaagaaggtgcgtggtgagtaggctgaccatttctctctcttattgaacaaaatattgctaagccctggattttctcagctgtaaatcactgaaatctgaataaaa

SEQ ID NO: 396 - DNA, 643 bp, Homo sapiens
gtcctctttccctgtcccacacctccttcctcctgcatcaggcctggggaggggggcgtgccgatgtcacccccaacccccaggcctagagtcctggacacatggacgcccctgccagagctcccctccccgcgcttggggttactttgaaccccgcctcctacaagaggatggtccagcctattgtcggaacctgcaggaatcccaggctgcgacccaagaatattagcggaggcccagcctggctggggctctgcaagtccgacctgggtgccccagagagctgctccgggaaagacgtttacctgctgcccagagctgggactgcagaccctgattggcgagggcttggagagtagctgagaaccttcccttcagctactgaagaccagacagggctttctgtatcacgctgcctgacgatgatgagggtgcagtgactaagagtgcagatgaaaggcccagctctccaaccaggtggatggatttgcaaggagcttctatctgggcgtggtggctcatgcctgtaatcccagcactttgggaggctgaggcgagcgaaccacctgagggtgggagttcaagaccagcctgaccaacatggagaaaccccatctctactaaaaatacaaaattagccggg

SEQ ID NO: 397 - DNA, 1346 bp, Homo sapiens
cagtaacatctttaaactgcatagtgttaatttaaagaatcagaacatcatcttttttttttaatatattgcttttcatttcattgccaatgaagttgaataaggatatttattttctgaacatcagaagatttgcagacaaatgatttgagtaaaatctgagcaagttagaaaatgtttatttcttagttttttcagaagaagttttgttttgttttgttttcttttgtttgagacaaggtcttactgtgttgcccaggttggagtgcactgacgcaatctcagctcactgcaacctccgcctcctgggttcaagcgattctcctgtctcagcctcccctagtggctgggattacaggcacctgccaccgcacctggctaagttatctgtagatgacatttcacctgaaggaagttggtggtaacccttacccataaccaaacttaggatttttagatatgggaaaagcaagtatgatgacttacaaagctctgccttaaagggtaatacattggtttaatcaggtttactccacaacagggaattcaggtagcttagttttatatcttctttgagtctaatgacagtcttttgagttgaggagttagtagcattttttttccagccaaaattcccagttgatctttcttcttaattctccagtgttcactagatttgaaattctgccctgcttgcccatggtgctttgtcttatggtagtctcattctccaaaatcatttatcttgaacctcagtgtgacttgtctttccagatctctgcctttgtctgatctctgaaacaccaaagctcttcctttcctttcaaactttccttgtgaccagagtcacaaacgttgctgtgctctgagatggttggttggaaaccagcccaagctgcatttggcacagtatacaccagtgaagacaggttgccaggatgaagccataggctgtctcacagttacagatgaacagcttcctgcccccaggttccccttctactgatgtaactaaggtctctaacccagaactccctaggcaatccactatagcaccattaccgatggttgatggacatgccaaggtattgacctcttaagccagtagtggctggttagagcttggcaaaggagcagccccctcagtttatctcagtgtgccatacaaataatattttctctggatgttacagtgtgaaaaagggtgggaagtagtgccctgttgagccatattagagccccaggcaaaagaaaaaaatgtgcattcctgtatattttttcttctttaatggctaagtttttttccagaatattaaagtagttgaaaaaatagtgaaaaaaaaaaa

SEQ ID NO: 398 - DNA, 738 bp, Homo sapiens
gctgagaggcctgtgagaggttctggggcgccaccgcagtcattctgttcagcgggtataggactttcattcatgggactgtccctgattcccagccatcacggggaggctctaccttcaagtgttatccagaatcagaccacctcacctcatctactgtggcctccctgggatgggcctggcctccttcagtctgttctcaccacaaagccaccagaaggatccttttatttttattgattgattgattgatacggggtctgactctgtcagcaggctggagtgcaatggcacgatctcacctcactgcaacctctgcttcttggactcaagcaatcctcccaccactgcctcctgagtagctgggaccacaggtgcacaccaccacacccagttaatctttttgtatttttggtagagatggagtttcaccattttgcccaggatggtctcaaactgttaagctcaagcaatctacccacctcagcttcccacagtgctgggattacagatatgggccaccacgcccagcgccttttaaaagtgcagttggatcatagcatttatctgctcataacaatggcttttgcttccccgctcactcaaaagaaattccttcttcactgcagaactgcccctcctaccacaggatgtttagggttcctggctgcaacccccaaaggtcctaatggtgctggtcatggggggatccacaccattgtgacaacgaaatatgcc

SEQ ID NO: 399 - DNA, 335 bp, Homo sapiens
gccgacaggaaggtgaagaagtcatctgcgtgctgtgagggtggcgcaccccaactccatggggacagaaggtcctgcatttaggacccttccagacctcacacctatgtatctcttcatctggctgattacttatatcctttcaaagacgcttcttagtaaactgtgcctccctcacatggccagcggagaagggccttgccctacctctcagactgcagccctgagccactccttggaggtgaggagcaccattcacctgagcagctccccgccctggtgtctgagaaataaatctgccttcagtcatacggttctaccaatctgagcacacg

SEQ ID NO: 400 - DNA, 2961 bp, Homo sapiens
gcttactgcggaacagcaggttggtgtccacagcattcagcatctggaacacggcctgggggtggtagcagatggtgtggcctgtgtaacagacgggcagctggtggctcagggctccctgtctcctggggggctgtagcccacccctgcccctcttcagccccaagctcctcctcatccaccccctttcctctcttgtgggtggtgagtcagggagggtcaagggtgcttgggtgggggcaggcctgggggtctttaagcccggcctcgccctcccacctatgaagagtgtcacccaggtcttgatgtggcaggagtggctgtgcaggtagctgagggcctgtgacaagtggatgctgaattcctcctggctgcgggtcatctggccggaggagagcacacctggctgggacgggctgggggccctgggcataccagggtcctccagccccagtttgccttgcccagcccctggagctgctatagcagctgtgtgtgagacgggagtgaatgggggagccgcaagcctggtctcccccactccctggccctgttcctccccaccgatcccaggcctctcaccaggcaggtccagaggaagtggcgggcgctgaggcccctctcccaggccagcgtgcagaagagggtgtgcagtagccgccagcggagcagcacagcacagcggtagaaggtgaacttggcctgctgcagggacaggcgtggagggtcacccaccgcctatgtctgagccctttcccctagaggccacaggcctccatgggcactggaggcagcctgctgtgcgggtgttccctggttctgtcctgcttgtgcccctcggcaagcctccccgaccctggcaacagcacctggccccccggagcccaggctggtctgcccgcggccctggccctgccccttccacggttgccccgtatccttttccccatggcagggagacccgcgaggccaagctctgacttcgtgggctgtgcacagggcatgtgctgccacggcaggcagggcacagtccatattcacacaagctctgtgagctgctggaccccctgccccgttacagggactgggggcacagcagtgagcagaaaagaccgggtcctgccgcatcgacggcaagtctcgctcgcatgcgtgtgcgcagtgggggagcgggcaggccaactgtggtcacagaaaccagtgcagatggccagaccctctgcccgccacttgctgccccgtgggagctcccccaactctcaggcagtgctgctgccatccgtctgccccgtaccctggcctcctgtgggtcccagccctggccaaggtgaaggcctatcacctgcctttcctggggtgggcactgaccgtggcgacagctgggcattggtccttcaggtgtaggagcaggggcaccatgctctggtgcacctgggtccgcaggccgctcagctccctgtctgccatggccgccaccaggtccccgaacagtgccatggctgccgcccgaatcccgtcccgctcctgcaaggcagaggctcagaggcacggccagacctgtccaggggtcccagctttggtccaagttgggaccccacaccttgtaggggtacaactcagttctttctgcaggattccttcacccaggctctcggctcccggggaagggaagggctggggctcccccctcacacagggctctctggtgtccctgaggatgtaagaatcacatctcccttctacccacaactgcatcctggcagcccaggcctcatgaatgcatttgaggggcgcctatcccccagattccccagtgaaggaaaaacagccacgctaaccgtgctgacatgtcagaaagcaaatctgggtaggctgtcgtggggccggagaccactgcacttggagactgaacgtgagaactagttcagccctgtggagaaggggtgagcgccaggggcccacccagcccacctgctcagcgcccacctcaaccgagggccacaagcgggcagctccccagggcctgggcctccctgcttgcagcttggggttccccctttggcagaggaagggagctgggttgggaggagggtcctggagggcgtgagcaggaggtagccccgccctgccccagtgctcacgtcattaaagaaggagcgtgtgctgatggcaacgccgaggctctgactccctgtgccctgcgcgcccaggcggtgcagcgtgtctgacacggtgcccatgatgcacacgatcacctggtcgctgctctggaagaagccgtcgagcaagggccgcagctgtccctggagcaggcttccctgggggtggtggcggctggtgggcggagagcactaggacccgctggccccatgcccccgcctcgttctcccacttgaccccctcaccccatctgcactgggtgggggggtggggggtggtgattcagagctgtgggtcccggcctggcccttcccgccatggggagctgtgggtcccggcctggccctgcccgccgtggggactgtgcccctaactgggctttgtccaccaggagctgcgtggtctggacagggtggcctcttttcttttttgagacagggtctcacactgtcacccaggctggagtacagtggtgtgaccatagcttactgcagccttgacctcccaggctcaagcaatcctcccaacataacctcctgagtagctgggtctacagccagttccgtcttctccacttgattgcgtgtttgcagtgatttcctgagttatcgggatgaatggtcagaaagcagtgtgcccaccaatggatgtttcctgccattgggccccttagcagtgacttgggtgcaaaccagggtgatttttacaacttttaaacaagtttaaagcagctttgttggctttcttagctgtttgctttgaaaatattaaattcattttcagcaagtgagtcattcaaca

SEQ ID NO: 401 - DNA, 332 bp, Homo sapiens
tcaggtttagcgcgggaggggaggatggcgacttcacccggcctttaacaacacgtacgcatctttcggcgtcttctacaatggctatgttaattacgtggccaggaactaaactatcaatgaagccacctctgactacttcagttacagtgagtttaacaggagcaaaaaagcacgtggcgccctagggcaaccgaaacgagggttttagacgctgattatgggaaattgaaatctgagttgagtatgagatgacaccaataaattataattttgttagataatagctttatcagccataaagtaatcaataaaaataccagtttcctgga

SEQ ID NO: 402 - DNA, 704 bp, Homo sapiens
gtctggtgtctggtggtctcctgactgccaggcaggccagagaaaattaggggtatgttttcatttaacatcattccctgctgactcttgtctctctggaaaattgacagttaggagacaaaaacgttgccatctccagcaaagagcgcttgaacagctgggcatttctagaaaggaatgggcctggaagacctggctaaaacctttgaatcatttcctgccaacatttggccgtgacccattttggaaggtcactcagctattggtctgaagaagccttttttttttctatttggccttctttggaagccaatttatcgtctgagttcttctcctgtaatctgaactacaggttgcaggttctgaactacctgaagccatgcaagtcataacacatcattactgacttctagctctttccttcaagtctctggcattgcagatgttatttctgtcctaagaagagcaagaggagctgcaatatgaaaccagaaaacagacacacttcatttctctctgctgttggtgttttctggggagaccagtggagtcactctgggcaggactgagggggacctgggtatatgaccaagccctggacagttcatgtgaaggagcaggacccagcttccaggtcaggagggaaacatgcctgacctttgtgctgctctgccaggtgaggtgtcctttcctctcctcaccca

SEQ ID NO: 403 - DNA, 492 bp, Homo sapiens
atctgtcttagagctattggaatcctggatcattgtgggaaatgaaaagaactggtttttagcaaggagaccaagaaactctactccctaggggctagcaatgagagaaaggaagccttgagtctttgagcacagggtgacagtttgggtcctatgtgagatgatcaaatccacagcaacagaggaaaggacaaaaggaaaagatacttcgatggaatcagcagccattgatccaatgccaactccaagactggaacgtcgcaatgatagttccaaggcggaaatttgacgtaattcttttcgacacagttttacaggtctggatgcccattttaattcttctgaaagcatgcctccttctggcttcaggactccatctccagccttatgatctaaaaataatccccaaaccaaaaaattagatattatttcctcaaaattaggtgttttaatcaaaacatcttaacataaatacattattatcacccaata

SEQ ID NO: 404 - DNA, 696 bp, Homo sapiens
cccttcgtcgccgcggctctcgtccgggacacggctttccggagtagagcccttggaggtgttaagtgtgatgcttccataatacatttggatgctgtcagctaagttcacttctgaactaaggggttcctccaaatgttggctgaaattcatcccaaggctggtctgcaaagtctgcaattcataatggagctactgtactggctattggaaggaggagattctgaagataaggaggtaaaacctgtttagaaattaaaaatgagttacgatttaaagaaaattcagatgactcattgtgagtgctagttctcttgtaggatgccactggaaatgttgaaatgaaaaatattcagccgttggtctttgaaatttcctgtgatgtgtttcaatctagatgcaaagaacatggaaaaatcaaagtgctcgagtggtttaaatatgttttgggtattcctgtttatagactataatacttttccaattaaaatcctcagttgtcacgcagaagaaggttaagctgtatttgattgccagttttactgaaaatgcttagtattttacagtatcaccaaatatattttgtttagccaaggtataggaaaaataaaataaattgtataggttgacttttttctaaaatgtctttattggattgaatgaatgtttatacctgaaaaaaaaaggttcaaaaaa

SEQ ID NO: 405 - DNA, 2517 bp, Homo sapiens
ttatggtgaagaccaccttttcagatgtgacatggctcacagtaagagcacttttcagttcatgcacagcaaaattcataagtgagaggactcaagggccaggcatttgtgaaggctttccagggtaactacccccttccagcactggagtaccagaataatgagaagctcaaaagagaatgtggaaaggccttcctttctccatcaccagagtactcatggcacagggaagccatgaagaagagctgagtgagaagatgctgccacacagctctaacatcagataacaccgggcaggccatgatagggagaagcccttcaagagcagtggctatgggaagacatgaagacttttgccctcttcaaccacctaagaacccacactgaagagagatctttaaatacttggtatgaagaaagaccctcaagaagaaatcgattcttatctataaccaaaaaattcacagtagagaaaacccctgcatctaaggaatgtgggatggtcttcagtcacctctcctatgtgagaaagctatataaagtacctatgggaaaaaggcattacaaatgcagtgaaaatgggaaagccttcagctatagacacccccttttaagaaaaatcaccagagaattcacaagagagttatgggcaacaaatgtgggaaagccacagctcccagaatcttaggcggcactgtattactgctattgcagaagccatctgtattagttacctattgctgtgtaacaaattactcaaaacctagtggcttaaaacaatagtcactatttcacagtctctataggtcaggaactttggtgcagctagctgactcctctttagggtttctcacaaggctaacatcaagatgtcagctgggggtgtatcatctgaaggcttgactagggaaggctctgcttccaagcaaactcatgtaattggcagcattcagttttttgtgggctgctggactgaggacccgtctgttggtctgagacctcctccagttctctgccacatgggcctctccaaaatggcagcttgtcaatcaaagcttgcaagctgatcatgcagtggagaataccaacaagtcagtcatttgtaacctaataacagaagtgagatcccatcatctttgctaaatttagttagaagcaagtcacttggtccagcccacagtcaaggggagagcattacacaagagcatgaataccagagggcagagatcattggaagccatgtccaaagctgcctgccatactgtctcatctctgccacctggcaagatctcatgatatgtatcagtctccctcactgtgctaagggaaagcagactatactcccttttccattctctagagagaattacataggctttgagtaccttcattttctttcccactgatggctttagattttggtatgacaattcttgctaagatctgagctggtgtcttctggagctttccagaaaaggtttcttggccgggcacagtggctcatgcctataatcccagcactttgggaagctgaggcaggcagatcatgaggtcaggagatcgagaccatcctggctaacatggtgaaaacccacctctactaaaaatacaaaaaattagccaggtgtggtggcgggtgcctgtagtcccagctacttaggaggctgaggcaggagaatggtgtgaacctgggaggcagggtgtgcagtgagccgagatcgtgccactgcactccagcctgggcgacagtgtgagactccatctaaaatagaagaaaaggtttctcttcatggacattgtttgcatctacatgtgacacttaggaatgatctgtttagtctcaatcactcactcctggatctgcctgtctctctctgagataacaaaggccttaatgtttagccacctgcatcagagttggtgaggtggtttgaaacaattcatcctaatataaaaagaacagcttttgtaagggggcactgagtgtctcaaacagccgcatgggcaggaagagtgctcagtccagttttggttgaatttgtcttgttgccctaaggcctcctatgaaagactgacaggcttggactgaatcttgtgatctggacaccaagggtcacctgtgggcccagagctagctctgaagaatggggtagtttctttgagaacctccacagcaaaagtttggtcctctgttcccaatgcatgtcccactttaccagctacatcccccagtacctgcccatggctcatgactcatgaaatataaaactcagtaggcaggcataactggttcagacctgccagggctatgtgggaactatcattggtacaaaaactctaagtgtggagaagactgtggtagacaagaggggacatgtctgttctaaacgcacatcagaaacttccaatgactatggccaagtgagataagggtgtacagaacttctcaggacatgcagacctatgtgtcactcataactgaaattcaaataaatattttgtggatttcctgtggac

SEQ ID NO: 406 - DNA, 425 bp, Homo sapiens
agctgtcattcacatagagctccagctttcataaaaagcttttcttcgttgaagagctctgatgtattgccttgtctcgaatgcataattgatcattatgaaaagaatacaggttgttcctgttgtctgttcttccttcttctctagtaacggaattttgaactaggtaaatggctatctagagtcaagactacatttcctagcttctcttgttgctaggagtgcacctgcttctggccactggggtttgcaactattttaaaccatggagttgaggtccccaagacagagaaacaagatagaaggcacctgcacctttgatatttaatgacaagcgatgaagtaccatgatgaaaacagccccaaacccctaactacactttcatgtttcatgtgacagggaaataaacttctgttttgtgtaa

SEQ ID NO: 407 - DNA, 810 bp, Homo sapiens
cactgtgccacgggaccctggtctttgaaaccttggcgtgcgcgagaatttcccagtgagtttgttaaaatgcagattcctcgggtctgcgtagacagactgtgccccacgcttttctaagtcagttgtttctcgggctaccctttaagagacactgctggatggcctggtgaagaaaatacagaaacagatgggtacaagaactaagaaaacggctaagaaagtgttttggtcctgactactaccatttcgctctgtgatttggggcaattcacattgccctttcttctttgtcaaaagacaaaatcacaacaaacttagttcaaagattttttttttcttaagagacggactctggcaatgttgcccaggctggaaggcagtggctattcacaggtgcggtcatagcaatcatggctatcacaggtgcatcctggaactcctggcctcaagtgatccttctgcctcagcctccggagtagctgggacttaaggtatgacagagccaaaactccaagtcatgtcagtagggcatgcccaatagaaaatgctttgacatctaacaacacccagaaccaatgattcctccctgtggtaccaagaagacctagacatgatcggaacctaaatgctggaactctttcaggagcaaagggtctgttgaccagaaagatccaggggtaaaatccacctcaacatacccgtgtagtcaaatttgacaccctccaatcagaccctgccaagccaaaattcctaatacgtttccttgccatctgtattagtctgttttcacgctgctgacaaagacat

SEQ ID NO: 408 - DNA, 481 bp, Homo sapiens
gccgtgatatatgtctcgctccctttcgcttacagaaaggatttcttccgacagacgtgaccccagaaggctgccgagggagactttaggacaagaggcgttgtttttttagggaaggaagaggagcctgtgcagagttgaactggggtggagaggtgccttgtaaagtatggtttccagagatggtgagacctcgtagctaagcgttgtttcctctgcacgtaacttttcagcgtggccgcatttggaaaaggctgaaggtagaaaactctggaatggagaggctggcgactggagcaggatccaggggctttaaattttaacctgaatgcgatcgaatgcgcgactcccagaagagatagccaggcgtccgcccggccgctcaacccccgccaggactcggaatgccttgcttttggttcttttctacaaggatgtctgcgtggatatccctggacactcgataccccccggggacctg

SEQ ID NO: 409 - DNA, 760 bp, Homo sapiens
aggtgcgctttgcttcctaacccgttgccgggttggagattccacctccgaagttttctttctgacttttgattttacattcctagtacagtggagaagcccaggcggcctagaatccagtgtcgtccgtgagtgcttggctggtgttcaagtgcatcttccagcctgagaccgcgtggactcgctcatcgtgagggcgagaggaggataagcccattgggctgtcggctgagagtgaggtgcgggattgctgatgaaatccttggcatcgtcggagatctcatcgaatgcctcgtcgtcgaagtcccaggtggctgaggtaacgttggccaaggtttcgttatcgttgtctcccatgaagggggaaaggccactgactctggagagacaagagcaggacagcaggtgtggctaggagagggcgcgacgaccagatgagggaattgaggcacagcccaggctcaagtcacctgcccaaagattcacagccagtgagattggaagccaggtatctgcctctagagcctgtcctcttaaatgctatactatcctaacatttctgtaaagatgaagtaaattgcagtgttcagcactggcaccaggcctggtccacagtaaggaggcggtccatgcccggagatctcatgcagttctgctgggttccctccactgccttaccaagctgtgagtgcaggaatgactttgtgaccagcagcttaagccaaataaactttataaggtaaagaatttcaaaacaaaa

SEQ ID NO: 410 - DNA, 4781 bp, Homo sapiens
tcagttacaagattcactccaatttgtgatgttaaaaattctagacctcagaatcaatacaatgaaatgtgtcaagagtgtttattcctctgtcatttggtgcaaggcacttctgttgattctccttttgtccttcaccattctaagacattggttccaatctttgtttttggattcaagtttcctttggaatctggtgaaagttatggacactctagctagaaaaattcacattgcattgacatggtgtgggatacagcctgacagtctcctgaagccattccacagaacctatatattttatgtattcctgataagacgtaagtcccatttgaagagctcaaatgtttcccacttatgctgtttctatggaaaggaaaaacaatctgctatccattttacaaacacaaaattaacctctatgctaaagggtggagctttagggtgaaagaacaaaggagtcaaagttacctcctggccaagctaacagtttcccaacccccactgtcattctcttaggcaaggatcaaattttttaaagttcttaaatttttgaaatgagaaatcctaactatcaaaagcaaaatgaagcaagtgaagctaattgtgtttagagttagtgcttaaccactcagagaaaagaattatttccattgacttccggagcacagtaattttacagtacatccctctaagaacaaaaatagcaactggaaaggaattgtaaactcttttcagtaattatattttcagtttaatattgacattgttatttcaaactataagccttcagcaaagtgttattggagattttcattgcctggatttctgttagttttaaagtagagaaccatggaagatggtcttatgagttggaaaaagagaatgagtgttctaaatctatatccatctcccaaccagctttgtctgtctctaggcaattactccagaacaaacatgctgtatcacaagaattattaattttatcctaaagtaaacagactcatctccaatgataaaagaaattatctacccacatgacttgaccgatatctttttaagaaatatatccttggttttactattgtgtgatcaatctgtccaggcttgcctggtacttgtctgtttttagctggaaatccagtgtcttgagatgagcctcacttcggggcaaacagggatggttgatcactgatatggtttagctgtgtcccgacacaaatctcaaattgtatctcccagaattcccatgtgttgtgggagggacccagggggaggtaatggaatcatgggggctggtctttcctgtaatcttcttgtgatagtgactaagtctcatgagatctgatgggtttatcaggggtttctgcttttgcttcttcctcattttctcttgctgccaccaagtaagaagtgtcttttgcctcccatcatgattctgaggcctccccagacatgtgaaactgtaagtccaattaaacctctttttcttcccagtctcgggtatgtctttatcagcagcatgaaaatggactaatacagtaaattggtaccagtagagtgggccattgctgaaaatatacctgaagatgtggaagcaactttggagctgggtgacaggcagaggttggaatagtttggagggctcagaagaagacaggaaaatatgggaaattttggaacctcctagagacttgttgaatcgctttgcccaaaatgccgatagtgatatgaacaataaggtccaggctgaggtggtctcagatggagatgaggcacttgttgggaacaggagcaaaagtgactcttgttatgttttagcaaagagattggcagcattttgccccaaccttagagatttgtggaactttgaagatgagagagatgatttagggtatctggcagaaaaaatttctaagcagcaaagcattcaaaaggtgacttgggtgctgttaaaggcattacattttaaaagagaaacagagcataaaagttcagaaaattttcagcccgatgatgcagtagaaaagaaaaaaacattttttttaggaaaaattcaagccagctgcagaaatttgcataagtagcaaagagcctaatgttaatccccaagaccatgaggaaaatgtctccaggctatgtcagagatcttcatggcagcccctcccatcacaggcccagaagcccaggagaaaaaagtgattgtgtgggccgggcccagggtccccatgctatgtgcagcctagggacttggtgccctgtgtcccagccatcccaactgtagctgaaagggaccaaggtacagctccggctgtggcttcagagggtggaagccccaagccttggcagcttccatgtggtgttgagcatgcggaggcaccgaagtcaaaaactgaggtttgggaatttctgcctagatttcagaagatgtatggaaatgcctggatgcccaagcaaaagtttgctgcaggggtggggcgcttgtggaaaacctttgctagggcagtgcagatgggaaatgtggggtcggagcccccaaacagggtccttactgtggtaccgcctactggagctgtggaaagaaagccaccgttctccagacctcagaatggtagatccaccgacaacttgcaccgcaccgtgcacctggaaaagccgcagacatgcaacacaagcctgtgaaagcagccaggagggaggctttgtaccctgcaaagtcacagagggagagctgccacgaccatgggaacccacctcttacatcagcaagacctgaatgtgagaactggagtcaaaggagatcattttggagctttaaaattcgactgcactgctggatttcagacttgcatggaccctgtaacccctttgttttggccaatttctcccatttggaatggctgtatctacccaatacctgtgcccccattgtatctaggaagtaactaacttgcttttgattttacaggctcctaggcagaagggacttgccttgtctcagatgagactttggactgtagatttttgggttaatgctgaaatgagttaagactttgggggactgttgggaaggcatgattggttttgatatgtgaggacgtgagatttgggggtggcaagggacaaaatggtatgatttggttttgtcccaccccccgcccccaagatctcaacttgaattttatctcccagaattcccacatgttgtgggaggggcccaggtggaggtaactgaatcatgagggccagtttttcctgtgctattctcgtgatagtgactaagtctcatgagacctgatgggtttatcaggggtttctgcttttgcttcttcctcattttctcttgctgccaccatgtaagatgtgcctttcactgcctgccatgatcctgaggtctccccagccacgtggaactgtaagttcaattaaacctcattttcttcccagtcctgggtatgactttatcagcagcatgaaaatggactaatacagtcaccctatcatgcaaacaatttattcatcttcccctgggctgacactctttttaaagcctcccatattaactgaggatagttcttgccaacccctctggaaaagatggcaccatgccaaaatgcctcttttccaatctttatatttcacttttgatagaaggcatggcagagagttgggaatggggtaggatgggaactttcaatttacccaaccatgtgtgccttccctagtgccttatgttctttacttttcttaaaattatttgccttcccaaataagtcatacctccaagacatattctattggctacatggaaggaaaggaaagaaaatgaacaatttccaaacccagttgagtgagcacctgggacaaagaacataggctctgaaagcatggggttgatacttctgttagtgtatttgagggtggggcaaggcctggaataaagctggaagctggcctcttggggagaaaaaaaaaaaaaaacagggacagcattcaagggcaaaatggaaattaaaaccagacagcttgtccaactaagtcatcaacctgcgggacctggaggaagaggacatgaccagcaaatggaagcaagattggcactaaggagcaagagggttcaaagagaagcttgggaagcaggatgtggagaaattccatggaaagacagtatggccactactgttcttctgtttggttttaaaatttttattaggaaaattacagacatatataagagcagggggaataatataataaaatcctatgtatgcattttcaactttcaacaattattaatcatgatggctcttgtttcattcatatgcccccatttcttcattccagattgctttgagacatattctagatatattatttcatttattatttcagtatttctctctgaaagataaaagtctctttataaaagtgtattaataatattattacgtcaaaaaaatacactagctgacatggtttggttgtgtctccactcaaatctcatcttgaattgtagctctcataattcctacatgtcatgggagggacccagtgggaggtcattgaatcataggggtgagtttttcccatgctgttctcatgacaatgactaagtttcctgagatctgagggttttagcaaagtgagttcccctgcacatactatcttatctgctgccatgtaagacatgacttttctcctcattcaacttcagccatgattgtgaggcctccccagccatggggaactgtgagccaattaaacttctttcttttgtaaat

SEQ ID NO: 411 - DNA, 1207 bp, Homo sapiens
cagggcagcccctggtgagtcagggcctgagtcagcgccctccgccttcccagaggccccgccaggacctgcagccctgggcgccccagcagcccggccctgctcagcgcagctctgggttggaacttgcactttccagtaactcggacctccccccggccgccttcccaggcgccaccgggcccagcagatcgtcaccgtccaggctggagtgcagtggcgcgatctcggctcaccgcaacctccgtctccccggttcaagcgattctcctgcctcagcctcccaagtagctgggattacaggcgtgtgccaccacgcccggcgaatgttgtattttcagtagagacggggtttcagcatgttggtcaagctggtctctaactcttgatctcaagtgaaccaccagcctcagcctcccaaagtgctgggattacaggcgtgagccaccgcgcacggctatcccttccaatatttccgaggccagctgcccagagaaggagggctgggtggagaggaccgtgccagcagcagtaggcctgggccaggagacaggcacgcacctccgcggtctctggcgagtctatgtccacacagcggcaggacctccacccccagccacctgcagcagccccacatctccaccgggtcaccctgctgacatcaagagtgcctcccgcaatgtcccaacccatgagggcttcttggagctgaaccagggcaccggccacttctggaggggggctgctcgtgacttccgacctctgtctcgctagttggcatgagaagactggactccttctgcaggcctcagggcagaggcagatgtcagcccccagggatgtcactgccagaaccccagatgccccaagccatctggactccccctgtgcagtatctctgctacaataaaatgtacccagatctgagtcctctcacctgggcgactgccaatgtcccctgcggccctataccccgcccccaggagcccagaggatctttctttttaaagatattcagacctcacagataagtctgccctgaccagcccctccccagttcccaggccctatcctgacaacggccacaacttcagagcagctgaaacctgctgtgagtgaaaaatgagaagctgttgttttaattttactttctctgattactaatgaggttatttcttctctgcataaaaacttcattcgtgtttaa

SEQ ID NO: 412 - DNA, 1284 bp, Homo sapiens
gtaaaaacagctttttttattttttattttttattttttttgagacggagtctcacactgtcacctgggctggagtgcagtggtgcgatcttggctcactgcagcctccacctcctgggttcaagcaattctcctgcctcagcctcccaagcagctgggattacaggcgctcccccaccacgcccagctaatttttgttgtatttttaggacagacggcgtttcactgttggccagactggtctcaaactcctgacctcgtgatccgcccgcctcggcctcccagagtgctgggattataggtgtgagccaccgaacctggcccaaaacagcatttttggaagctacattctgtgagatgttcacctgtttgccacctcttctcgtgaaaaccatagtgagtgccagtgtgaaaggaagattgcagcgtatatgtcaagtagaaacatgtttgaattttccatttgtctgtggggaagaaggtaataacagtaataacagactgaaggaccaaaggaaaatagggaagacgttgattatggacttggatcagattctagctacatgatttgaaaatgacactgcctctcctattttgccacaagcctgtcatttggagaactggcagatcatttatgttcagatttaattttctgttttagaatcccatggagtacatgtgaacataggaaaatcacactcagcagccaagctatccttttgcgataatgaaatcactttaaaacctataacttgatcttaggttggcaaatcttaaacttaacgatccttgaaatttcctgcctgctgtgactgtgatgcagttggattcaactggtttacactgctcttgggtcggcaagaccaaaaaaggttggactgcactgtagcatgcttatgggttgaggcagtggcagaggcagaggacttggccgtcagccagccagcacaggcgtaagaaaatagcatgagaagtttcacgagcctgaaaccattgagacagtgattacaacctccatattaatcagatgagggtttgtaggtgacatagcattttacccaagtaattctgaacagactgtggcttatgataatacattttaactagcaagtgtgtggactataaaacaaatatctagagttatatatggatgtactatcatttggtgataaaagcatagaaaaagcataagttggagtatactgggtttttttgttgttgttaaattcttttccatcagaagtaagagctgttggcagcaactaataaaatgcaacctagtga

SEQ ID NO: 413 - DNA, 613 bp, Homo sapiens
gaggccgagcggtggtgtgtcgttcccacccccagcgccccctcctccggtcggcgcctcggtgtccgcgcgtgggtcctgagggagctcgtcggtgtggggttcgaggcggttgagtgagacgagacgcgcccctcccacgcggggaagggcgcccgcctggtccggcgagcgcacgtccggtgctcccctctggcggacggaatgaagttgataatagtgagaccttgttggtacaagactatgtaacataacctgcgcttctcaacaaagaattgcttttctgacttctgcactcaatagcaagacaaatctctcctctgccttctccttatcagactactcaacatgaaggcaataagaatgaagacctctatgtataataattgacttccacttaataaataaggttacttggtacactggtcgacaaaaccttgaaatgttgatgtttaagggctgttgattgctggcagcaaagaagtccaactgtgctggtacccgagatagcgtctccacattttcttccaggatcatcacctttgttctaaatagctcccacatagtgtgaacagaagtcatatgttttagattttctgccttggcacccagg

SEQ ID NO: 414 - DNA, 2018 bp, Homo sapiens
atgtgaagaacagtgtttctctcctacagaggatgcagtgtccagggcatcatctatgaatggagacaacctttaccggacaccaaacctaccagcaccatgaccttgaactttccagccttctgaactatggcgtactgctctgttgcccaggttagagtgcagtggcttgatcatagctcactgcagccttgagctcctaggctcaagcagtcctcttgcctcagcctcctgaatagctgggactacaggttctattctgaggtactaaggttaagacctcaacatatgaattctggaggacaaaattcaacccagaagtctaccttgtattgggtcctcacggcaaggctgcaaaacccggggggttggtggcccagtcccacctcccatgagctaatgaatgtggggctcagggaggactgacaggactagagttgacaaccattcatccaacaaacatttactgcacgaggaagagaggtgatcaaggcactgcccttgtccccaggaagctcgccagtgcatgggactgtgcaggtgtcttcacctctgcattaggcattcgatgtcaggccatggctgagcatccatcctctctatgctaattttttccaaaagtcaagagtttggaagaacactaatgtgtttttcttccagcctttcctatacaaatgacaacatcattaccctcagcttttaaagtgcaagtctgtacagagatcccagagtcaaggagggcgcctgagtcatttgaaataattaccttttttttttcctgcctgagtcttgcatatctgtgaatcagcaatgtggaaactgggcttcaaaaaaattaagggaggcttaaagtgagcaaagcagagaagagcattggcaagagctgagcgctgccacagcaggaacatcatgccgatcgtcatctaagggagctcatggtgctgtctgcctcctcttagcaacatccacacaggctggtacagtcagatcattgtgacttggacagggatgaaaatactcagctgacaccaatagctcccagcacagccagggtattctagaggtgtgtggtgtcaggacagcctgtgcggcctcatttatttacctgagtcatctgaacaaagcggtgactggctttgcctggctctggcaaggactcgcaacaaagccaaagcctcttcctccacggcctttgctcctgcagcacagcactggcatctttttagcatcatagacactgtcacgtggcaatcaatgacagatgaactgtcccttccctgggccacaagctcttcaaggcgggagcctcagcccagtttcttccatgtctccagcgcccagcacagggcctggcttctagctggtttctgatgaataaacgaatggctatagagatgtactcttcaaaacacaaggggcttctatagtggcaacatgttcagtagcacagtgctgtattggttctttacagcttgcaggacccaaagaaggaatgatttttgtttcccgggaaaggtgtacctcgtgggggcactgctcaagggaaggtgcccacaagttggggatcaagggaggcacaggttgatcaaagcccctggaattgaaatggaggtgttcatcctgcggaggctccgaacatctgaggcagagcctcgattctccaggaaattgactttgccggagaacaaggctggggaaggcaggctgtcctaggggaggagtcgtatttcagccccactgagaccccaaaggcgcactcccatgctttaccccagctgtccaccagggggcaggcagaggcaagagaagaggaaagcgggcggctggtcaggcccagcacatccagcctggcatcccacacgctgggctgcctgactcagacaaagccaggccgctcctcctgcctgttgtggcctctgtgattttatatggtttggcctgtgacatcagacaccacgcgaccatggtaaccaaagtatacagcctggagtgaatgttaataaacaggaaagaaatga

SEQ ID NO: 415 - DNA, 308 bp, Homo sapiens
gcctctctagggaaatgacatcttaatttatacctatagaatctgcctgttcacaggagtgccttaaacctaatttgagacaggagtggtaatatttggaactctgaaactaattttttttgagacagaatctcactttgttacccaggctggagtgcagtggtgcaatcttggctcactgcaacctctgtctcctgggttaaacggatttccctgcctcagtctcccaagaagctgaggcaggagaatcacttgaaccctccgggaggtagaggttacagtgagctgagatcacatgattacagtcc

SEQ ID NO: 416 - DNA, 1325 bp, Homo sapiens
cgggcgtcggggcttcggcgggcattagcagcagctgagaggcctgtgagaggttctggggcgccaccgcagtcattctgttcagcgggtatagggctcctctaggcccagtgggttgctggatttttaacagccacaagaaaccaacactaatgcagtgtgagcccctcagctggtctgtactgggcactgattaatgcctacttggtatgagacacttccaagccatgagccggctctacccctcttcctggaatgccttcatctaacctctattcctgccattatccttccacattcagctcagatatcccttcctctgggaagctctcccgacttgacagaaataacttctccctcgtgtgctgtgcagatcctgtgcagactccaactgggtccttatgtaattatgcttacggtcggtccacctgcctctacactgtgagggcaggaactgtgtcttgttccttgcgtgtggctttggatgcaaagcaacgtacctggccaaactggcattgaggagatatctgttggattaagtgactcgaggtggagcctccccaaaaggagaagctaggcctctcttccccatcacctgcctcaccatgtctaataagatgtccactttcagccgcaagagattgttctcttcctccaactgctggttccgcctgcgaaggcgctgaacctccctccggtccacaccgccactaacccctgtctctggaggaaggacagaaccagttaaagggggatttcctcctacaatcttgtttgacaaaatggcaggaagtgcagctcacctgctatccactggccattttcaaacttcaggctttgccctgccaggttcatagtcggggatccgtattccaagcccagctccacctcccgggttgatcgatccaactgtgggcgagatgctatgtgacaacttcagcaggcccggaacacgccttcatcccagctcctcttccgccaacaatatgaccccaacaactcatttctctaatcattacttggcacctttaatgatttttttaaagccataaaatcaaatgatgtacaggaaaagtttaattgtgagataaaaaatatactgttttatacattagatgttttccagaaaagctatatatactgaaatttataaattgaattattttatacctacttgacacttaatagtttaagcaatcctactataaactgttaatcaagtgaaaaattctttttaaatgtaatagtcccccaagttatcatttgcttaatatggagctacatatgttgtggaaaagacataaaattctaacaattaggaggaa

SEQ ID NO: 417 - DNA, 884 bp, Homo sapiens
agtaagagtgggtgcaggcagggcctgagtggtcactagaaatgagaaagcacagttggtgccatcacatacattcacctcctgctttattctgaagttcaagtatgagaatacgtgttgacatacaagccagctatggtgcagtcagcctcagtttccaaagccggaaaaggatcctctagtagccacggtgtggcagctgctctgaaccaggacctggacccggacccaaagtgccatgtctttaatgttagctcccagcgatgccagatgggatcagcacagccctgcctctgctgctaattgttcctctaaagtaatcgccatgcgttctttgggcttcatctttaaaggaatgaagcaactgagattattctggaaaaccttttggcagttagtgaaattagagtacaactaagaacattttcagacctccactgtggatgacctgggtataatctcacaaatcgatgggactgcaaggattgtaaactgaaatgaacatgattatactctgttggaagagcctaagaggaaactgatgccatgagtttcagagagtaatgcttaaccccagttacacaggatgccgtcttgtgtttcctcttgtttagttacccactacagtgattttgtgatctgctaatgggttgccacccacaaccattgctttagcacttttacttcaaatcaatgaaggattgataaaagttctcctggtgtctccgcagagtgccttccaggaacagatctttgcatagaatatcagtggtttccttttttgtttcaaatagtggtcagaaaatacccagtgttgactcaccaaggcaatcagcttcctttttccctttttttgttttttttttaacattttatatttttgc

SEQ ID NO: 418 - DNA, 349 bp, Homo sapiens
tgagtagcatggggcagagttaggtcctcatttttaatggtctcatataagatttctgaactacagaggacattactatatctgggtaggaggaaataaatctttaaatttgaaataataatatacaattttaaatatcattttccaaatttaatttcattttcacctttaatatttcctaaggattcaagaatcagatgcagggattctgtttctctccatttttattgttattgttgttgttgttttacatttaggatttcaatgtggaatctcagatttcttttgtgaactcctttactgtcagacaattaaccagaaataccaaataaatgaagatgggaaaaca

SEQ ID NO: 419 - DNA, 5652 bp, Homo sapiens
acaatgctgggccctcagccagacctgccctgcgtgccacgttctgttctaagatcgggctgccgagctgtggcctggaggaaacctggcaggtgtcaccagagctttggggagggtgaggccctgtcggggaagcccagtgggagtcatgaaggagggaacacgtgtggagcccttgtagggggaggggcagccctgcagagatctaagaaaaaattccagaaaaatgagcagcaacctccaaggccaggcatcggtgcaggggacaaggggtcgtagctggaggggcctaggtgaggctgccgggaagggacgatgtggttggtggagtgcacaggcagggacctcactggactttcctgtctgctcagcatggacaggcagcccaggagaaggcagcacgtggccgggtgcagggacgtaccacccccacttccccaggggagctggggtcagacgagtcccaggcactccatcctctgcagcaagtcaggttgtgatttactagggggtggtgaatataatggagagacttctggggaggaattcctggctcccgcgtggacttgcagagctcaacaggcagccacgtggctgagtgtccagcaaacatcacataaggctttgggtcctgcaggtggggctgccatgagcagcaagctcagtccagaagaacagttcctctccaggatccacttcctgcgcacttttatgtgcagtgtagctggagcagagctccccggaattccacaggcaactgagaacggagagggatgcaggccagccagggatccagcgtcttccccatcgtcactctccatggcctccgtctacacacagtgttcgtctgcacagcttgtcagcgcgttatcatgacttctatttggcaccggcccgtctgtccactgtcctggcttgttccaagcgctgccttctccaactggggtcctggctgcagagctgtctgctccccacgttgggcaactccagccaagattcctacacccaaatgtgaccgtgttgctcacgaagaaggctcagctttgcgtgtgcccagccgtgtgcacagctcgtcccaactcctgcgggtggcacctgcctctcccacctccagtctttcccctgtgatgagcagatgaccaccgccctccagggtcagcgtttggctgtttgtgtgcctgcccacccgcctccctgtgcctgggcctgccctgtgcctgcacacaggagtggctcatggcgtttgccctacacggatgggctgtcctgggagctactggacagtcaccttggtgggaatgccagaggcatgggcattaggtccccccggccagcctccgttgccacatgggctatttttgtccatcgcgtgggacaacctagtattgggggaaaactcagtccactctaaagaagcatcggcgttttggatggacgaatgctgcttcatgcgactccatgtcaatggactattttattcaactcgggtatttatgagtgtctcctctgtgccagccacgtgtgaaagaagaactccaagttactggacaccaggacaaaccaggtagatcactgcatccggttcctcctctttctgccgactctcccgggcaaccgttctgattcctggcatggagttgggggcgagctcatcagtacccagagcgcctggtgtgcagccaaaggcccccattttattagtcggtgtgttcagtatcacgctcaagacaagggccaacctattacttcacacacctcaaatacaaaaagtgcctgggaacgtcgatgaggtattaaaggaaaccactggtcttgtcagtcatgtacacacagaaaaaaaaaccagtcatttttatttttattttttgagacagagtttcgctcttgttgcccaggctggagtgcaatggtgcaatttcagctcactgcaatctctgccacccggattcaagcaattctcctgtctcagcctcccgagtagctggaattgcagacacccatcaccacgcccagctaattttatgtatttttagtagagatggggtttcaccatgttggtcaggctggtcttgaactcctgacctcaggtgatccacccacgtcaggctcccaaagtgctgagattacaggcatgaaccactgtgcccagccgaaaacaaccaagaattttttaacaataaaatgaccagcaagtaaacttgaaacaaaaatggacaaatatctaaaatatttttaaatgtatgtattttaattggcaaataatacttgtatatattgtttacaacttgttttaaagtatgaatacattgtggaatggctaaatcaagttaattaacatgcattaactcacatactttttgttttttggtgtggtgaggacacttaacatctactctcttagcaattttccagtcaccatgtcctactatagatccctagaacatattcctccaatgtaactgaaatgtatcccttgaccaacatcactgcccggccccagccccaggtaaacaccattctaccctctgcttctgtgagttcagcttttctagatttcacctgtgagtgagattgtgcagcatttgtctttctgtgcctgggttttttcacataatgcccttctggttcatctatattgtcatatatggtagcattgtcttcctttgtaaggctgactggtataccattgcgtatatacaccacattgtttacctaaaatattttttaatacaatcgctgaaaactgccacataacttgtataactgctgtaaggcttggttttcagccataagatgggaagagaagtaacatctaccttgcaggatgactgcaagctgtaaaatgccacaaagcgcaggggagcccagaaccgccgcagcaggacaggtcctctggaagcagacagacctgccttgttactttagccatccagagtccagtttagccagtgatgaaatgagtacaaaagaacacctttcttgtaggattgcaaaatgatgtcttcatccattctgtgctgctatagcagactcctgcacactgggtaactgacagcttacagaagcttgttggcttatggttctggaggctgggaagtccaacctcaaggggctgcatctggtgagggctttcttgttgcatcatcacatcgcagaatagcagaagggcaaggagagagagagaaaagagtgctgaacccaccctttgataagaagcccactcccatgataatagcaccagcccattcaggagggcaaagccctcgtggctgcatcgcctctcaaaggttccacctctcaagatcatcacaatgacaatcaaacttcatgaattttggaggggacaattattcaaaccagaacagagggggatggcaaatgttctgaaaacaagcctagaaattgatcttagaaatggtgcaaaagtagatttccccttctgtctttacctgtgatggtctaaccccaaaagcctcccagaacagaacttgtgagcacaagatagaaacaacaaacttgatgcagagctgagctcacaaggaggtcagggatgtgacaggaaccagagacaaacagaaggctgaaaaccaggtcttaaagtgtgagagccaaagggcagcagcccaggagagtgttcgtctggagccccggggtttaagtctccacactcacatgggaaaggagacgaggcctccctggatccacgtgaatcaggaactggaacaagggcactcaaagggctacgccatcaggagagatgtgaatgagtgtgcccacaggaacaggaagacaacaggatggttctgtgtttgcctgcctgttgtggttctgtgagacagaaacagttttgatgacaattgataatcaggactcagagccttgttagacttcaggtattgaatttttttttgagacagggtctagctgtgttgcccaggctggtcttgaactcctgggcccaagtgatcctcctaccttggcctcccaaagtgctgggattacaggcatgagctaccgtgcccagcctaggtatcgaattttcacaggtttcacagtccaggccctaccacccctgcagcaaataacttgatataaaacctgggcccaggctagtaatacccttgaagcccatgacagaagcaggcacagtgatagaagcaaaatcacgtagacattatcaatctagccccctccaattcctacccataaagcccactgaagatgaatttacaatcataaagtacaaaacatgccaagaaagaaccacatgagggaagtcagcagatgtgtgaacagcaggaacggactccgccaccaaaggccttcaaaaggtgaatcaagcaaaaaagagaacattaattaaacatgtttaacatgggtaagaattacaggaataaaagaagtaaatgaacaagaatacgattgcaagggagtggtagaagaataggcagttttgaagaactaaatggaatatctagaatgaaaaaccatgcttgctaaaattaactcaatgagtgagtttaaaaagcaatttagacccagctgagagctgaatttgtggtatatgcagaaattacttctgatgcgaggcagagcatgatgacagaatgaggagatcccaaacatctatgagagttccattctgaatgattagaagaatgaggaagcaacagtatttaaaaagataatcactaagaaagttctatacttgatgaaaaatgtgaatcctaagattcaggaacagtgtgagacttcagctggggaaaaaagatgaaactacacttctacatttaggagtaaaactacagaatacaaaagacaaaaaaattttaaagtgaaaaataaaaccactcagattacatcaaaagcagttatcatgaaagcagcctatcaattacaatgataaaagccaagcaatagtcaaatatcgatttttttcaaagtcacaagataaaataagtagtaacataggattctgtacatagcattatttgttacctattggggcataacaaaattccccaaaactttgcagcttaaaaaacattcagtatttcaccattgccatgagtcaggaatccaggcgtggcttgagtcctctgcatattggcttctcaccagactgcaatcaggacaatagcacagtatctgtggtctcatctgaaggcttgcctgaggaagtctgcatccaagcttactcttcgttggctgttgggcagaggcaccctcagctcccagccatgtaggctttcccatggtgcagcttctatcaacaaagcacgccagacaagaggacaacacacagtcttctaggaagaagaaagccacaatctttttttaaaaagcaaagcaatatttatgtaattgccacttggtttgagaagtagaacactgtgtcaaaaacccctccaaagcccccgccagtaactgccctcctccttctccccagtgcaaccactgccctcacttctgtctttttttcaacttttaaaaattgtggtaaaatgcatataacttaaaattacaaccttaatcattttaagtgtacagtttggtggtggtaaatacactcgtgatgtgcaaccatcaccaccatgcatctgtatagaactctttccatcttgtaaaactgaaactctgtctccattaaac

SEQ ID NO: 420 - DNA, 1534 bp, Homo sapiens
gggttccgcttgactctgcattctcctacttccctgcctgcttactctctgccatcatagttttttgcttcaaccttcaaatgtagccattctttttctaaagcggtacttattctctttattagttaaaattattaattttatgcacttactgttctagctccaattttgcatttccagttccctgctgggaataaattaaattggcagaagctcagtctaagtgcctgcaacagaatttgtcccatatccatacaacttgctcctccacaacaaatgggagaatcatcctcttacctccagcacctgcctcaaacaaagtttctgatccatctaccacgtaactttgacgctgaccaagaattacagcttcaaagaaatcattcgaggatcattaatatcttggtcatgaataacttttatgtgaaaggctctgcagctaatctcaagtgcagtgaactctgtttcattactgtatttccaaatttagagttatttgggttgtatataggtcagataatttacttttttgttttcaacctaatataaagcacctccaaactttctgccatttgctattacttttctccctcagtgagtgccaaattagctcaattttagttaatttgcaaggtctgacaatcaagactatcctcagcagcaagcagaaaaatttctgaatgactagatacaatttcaagggacaagaaatttctctgtccctggctcattggcaatgaggtatcacagccagggtttattcttctgtgatcatgatagtatttgaagaactcaacaaaagaatgttaattctgacaatttataatagtgaaataattaacacagtcttaatgtcaaataatagtgtattatttaaatgatgtagggaacagttgtgcaatacaaaaccatggagatattaaatatggcttattagcatgtttaaaggtagaaaataccatcatacattaagaaaagatacagtttgaaacttgcacacaggatagttccatttctttatatgaagaatatatatcaacagtagtagaagaagtcttagagagatgaaattgtgggaacatttttcttttaactttattttctatatattctataatgacaatgtattaaattataaaaataaaaaatgagttttcttatcattagaaataacagtccaaaaaaaaaaaaagtaatgtccatccctttaaggatagcctttattggtcaaatttaaagttaatataagttaggttattcaacatttatggaaagggtattttaatggactcttgggggaaaagagatacatgtttctgaagacactggaactcagggaaatatagccaccagtggctgggctgatcaaaggaaggggagaatgaaaatattatcttccccacgaataatcttacctagagagaggctggtaccaacaactaaccttaaataaatgtaaaactagaggtctgtattagtccattctcgcactgctgtaaaaacctcctgaaactgaaatttataaagaaaataa

SEQ ID NO: 421 - DNA, 150 bp, Homo sapiens
ggggggctgcacgttacagatgagggagcaacacttgatggccttctcgtcccgaggcaccagccagcccgaccccgcaactgccgcggcgggcgggcgcggaactgcggggaagccgaagagtccaacctgctcaaaaaaaaaaaaaaa

SEQ ID NO: 422 - DNA, 577 bp, Homo sapiens
aaccttttctccctggtggaggaaccacttgcatgagaataagaggttgttccccaggccatcagactccaaacagttatgcaactggagcctcctgaggatgaccccttctgcctgggacccttagatcagcctctagagaagctttgactgctgtttccccaaaacagcaccccctgccatcaggaagcaaaagccatgttggttcaccacatgtatcgcatcctgataatgtgaagtgaaaaagtagagcctggaagcctttgtaagatgactgtgccagaggaggaagataaatatctcgatgctatggaggcctgtcagctctttgaagtatctgggcaatatcaagatttctacttcagatgaaaaaacaaatagttattcattgaccctgttgccgccaagaaagaggtgaaaggtgaacccccaacccacggaaagatccagccaagtaaggaactgcaaaatattgaatgactaattctccaaacaaggagaacaagaagatttatactagccatgcaaggaatctttggaagtctaacagacctgacttgaagagaaggctttaaac

SEQ ID NO: 423 - DNA, 676 bp, Homo sapiens
gattatttggtttttatgttgacagtgtttgagaggtcttttagcaagtagttggtatcagctagactttgggtgccttggcagcattttctagcattttcctgttctgaagacagcagcacctgtatctgttctggaacatctggtggccatttgcacagctactgctggacttccatctttatctctccaggcagacgagtcgaaccttccaataggaaattttgggtaaatgacaaaaacttatgagggttgtcctttgtgagcagactttgaagcagtaggaatgtagcctattgaaaagatggccagaggttcagaaataagcgtgacggataaaaatcagcaagacatttaatacatctgcaaacttgccttctttcaaagaacattgattgaaacagattcgtttgttcataatgtgggtgtgaaaatagttctgaaaagccattctaaacaaacttatgtttttaaaaagagtagatgaaatctgtttgcggaggaaggaaaagatgacattcaggaagcaatgttctggttaattctgtgttcttcaaaagccagctcattttcttgaaaagaatgctggccacaatccacaggtatagagaatatggagagaaagcatctcacgcctgaagagtccaataaaacatttatagataagaatttaaga

SEQ ID NO: 424 - DNA, 723 bp, Homo sapiens
gtatggtgctgggtgcagatgcagtgtggctctggatagcaccttatggacagttgtgtccccaaggaaggatgagaatagctactgaagtcctaaagagcaagcctaactcaagccattggcacacaggcattagacagaaagctggaagttgaaatggtggagtccaacttgcctggaccagcttaatggttctgctcctggtaacgtttttatccatggatgacttgcttgggtatggagagtcggcttgactacactgtgtggagcaagttttaaagaagcaaaggactcagaattcatgattgaagaaatgcagggtttttaatgaccacaacaagcaagcatgcagcttactgcttgaaaggtgaggattggaaatgttgggactattataattgcagaatacatgatgatctcaatccaacttgaactctctcactgattacttgatgacaataaaatatctgatattctgcattcccatgtagcattttaattgaagtctgtaaatgtggctaaaagtcttgtcttattttttgagacagggtcttgcctcacccaagctagagtgcagtggcctttgaagcttactacagcctcaaacttctgggctcaagtgatcctcagcctcccagtggtctttgtagactgcctgatggagtctcatggcacaagaagattaaaacagtgtctccaattttaataaatttttgcaatcca

SEQ ID NO: 425 - DNA, 583 bp, Homo sapiens
ccactcttcaatccacatgaagaaaaggatcttcctcagaagaataggcttgttgttttacagtgttagtgatccattccctttgacgatccctaggtggagatggggcatgaggatcctccaggggaaaagctcactaccactgggcaacaaccctaggtcaggaggttctgtcaagatactttcctggtcccagataggaagataaagtctcaaaaacaaccaccacacgtcaagctcttcattgttcctatctgccaaatcattatacttcctacaagcagtgcagagagctgagtcttcagcaggtccaagaaatttgaacacactgaaggaagtcagccttcccacctgaagatcaacatgcctggcactctagcacttgaggatagctgaatgaatgtgtcttacccatttccatgtttctcttgctaatttctttcgtgtgtgcctttgcctcattttctctttttgttcacaagagtggtctgtgtcttgtcttagacatatctctcatttttcattttgttgctatttctctttgctctcctagatgtggctcttctttcacgctttatttcat

SEQ ID NO: 426 - DNA, 3152 bp, Homo sapiens
ctccaaccccttagccaagcactgtagtttctggtagacggtggccacagagaaccgaaggtcaagctcccacccactggtgacccctggtatggggtcggcgcaggcgagcagagtggcagcgttcccgagtaaaccctgctcctgtccctttgccctcagagatcctgcctacctctagcctgaattgataccctcctcccttcctccacgattaatgaaactaatcagaagcagcagctgccacgtagggtcagccagaaaattacatcactggagggcaggccaaaccgagccagggtgggctgggacccggcatgactcacctgttcctcttcctccccggggcggcctggcagctgacaacgtgctcctgtccagcgatgggagccacgcagccctctgtgactttggccatgctgtgtgtcttcaacctgatggcctgggaaagtccttgctcacaggggactacatccctggcacagagacccacatggctccggaggtggtgctgggcaggagctgcgacgccaaggtggatgtctggagcagctgctgtatgatgctgcacatgctcaacggctgccacccctggactcagttcttccgagggccgctctgcctcaagattgccagcgagcctccgcctgtgagggagatcccaccctcctgcgcccctctcacagcccaggccatccaagaggggctgaggaaagagcccatccaccgcgtgtctgcagcggagctgggagggaaggtgaaccgggcactacagcaagtgggaggtctgaagagcccttggaggggagaatataaagaaccaagacatccaccgccaaatcaagccaattaccaccagaccctccatgcccagccgagagagctttcgccaagggccccagggccccggccagctgaggagacaacaggcagagcccctaagctccagcctcctctcccaccagagcccccagagccaaacaagtctcctcccttgactttgagcaaggaggagtctgggatgtgggaacccttacctctgtcctccctggagccagcccctgccagaaaccccagctcaccagagcggaaagcaaccgtcccggagcaggaactgcagcagctggaaatagaattattcctcaacagcctgtcccagccattttctctggaggagcaggagcaaattctctcgtgcctcagcatcgacagcctctccctgtcggatgacagtgagaagaacccatcaaaggcctctcaaagctcgcgggacaccctgagctcaggcgtacactcctggagcagccaggccgaggctcgaagctccagctggaacatggtgctggcccgggggcggcccaccgacaccccaagctatttcaatggtgtgaaagtccaaatacagtctcttaatggtgaacacctgcacatccgggagttccaccgggtcaaagtgggagacatcgccactggcatcagcagccagatcccagctgcagccttcagcttggtcaccaaagacgggcagcctgttcgctacgacatggaggtgccagactcgggcatcgacctgcagtgcacactggcccctgatggcagcttcgcctggagctggagggtcaagcatggccagctggagaacaggccctaaccctgccctccaccgccggctccacactgccggaagcagccttcctgctcggtgcacgatgctgccctgaaacacaggctcagccgttcccagggatctgccagcccccggctcagcagtgggaccagggcctcgcagcagcaaggtgggggcaagcagaatgcctcccaggatttcacacctgagccctgccccaccctgctgagaaaacactccgccacgtgaagagacagaggaggatggcaggagttacctcgggaaacaaacaggatcttctctgccctgctccagtcgagttggcctgacccgcttggatcagtgaccatttgctggcagacaggggagagcagcttccagcctgggtcagaaggggtgggcgagcccctcggcccctcaccctccaggctgctgtgagagtgtcaagtgtgtaagggcccaaactcaggttcagtgcagaaccaggtcagcaggtatgcccgcccgtaggttaagggggccctctaaaccccttgcctggcctcacctggccagctcaccccttttgggtgtaggggaaaagaatgcctgaccctgggaaggctccctggtagaatacaccacacttttcaggttgttgcaacacaggtcctgagttgacctctggttcagccaaggaccaaagaaggtgtgtaagtgaagtggttctcagtccccagacatgtgcccctttgctgctggctaccactcttccccagagcagcaggccccgagccccttcaggcccagcactgccccagactcgctggcactcagttccctcatctgtaaaggtgaagggtgatgcaggatatgcctgacaggaacagtctgtggatggacatgatcagtgctaaggaaagcagcagagagagacgctccggcgccccagccccactatcagtgtccagcgtgctggttccccagagcacagctcagcatcacactgacactcaccctgccctgcccctggccagagggtactgccgacggcactttgcactctgatgacctcaaagcactttcatggctgccctctggcagggcagggcagggcagtgacactgtaggagcatagcaagccaggagatggggtgaagggacacagtcttgagctgtccacatgcatgtgactcctcaaacctcttccagatttctctaagaatagcacccccttccccattgccccagcttagcctcttctcccaggggagctactcaggactcacgtagcattaaatcagctgtgaatcgtcagggggtgtctgctagcctcaacctcctggggcaggggacgccgagactccgtgggagaagctcattcccacatcttgccaagacagcctttgtccagctgtccacattgagtcagactgctcccggggagagagccccggcccccagcacataaagaactgcagccttggtactgcagagtctgggttgtagagaactctttgtaagcaataaagtttggggtgatgac

SEQ ID NO: 427 - DNA, 3208 bp, Homo sapiens
aggccagccactcaggatggggccctgtgccctgctcacatgggctgtgctggtcttcaaaccggcctgagggtcagcagaacatttgcaggtggagatggaaggagaaacagcatccggtcagcacaaaccgtaaacagcaggtgctcgggtgtggagctggagccatgtgtctctgtggggaggaacaggggtttgaggggaacatggggactggggctcaaggcacctggatttaatcttagagacgaaggggtggggagggagtgcccacgtgggatctgagaggagactcgctggcagagactgggcagatgtgagccctccctgcgatggtcagccctgctcctgatggccatggaaggaacatttttctccaccccactaaggtgggctttgaccacgtggacgctggtggatgtccgcaggccctgcaatgtgttccagggaatcggcttcaggaaaaacatgcctggagctcagcagagtgaggggcacacagagcagacctgacttgagcctcagcctggacccccacctgacactcagagccctggggagagaggccgtggaaccgcccggcagcatcactgcctcagcacctgccaagatggaaatgggcacgttcaggtcagataggaggctggggcacactcctccctcgcccccgaccacccaccctccaagccttagtttagatgttccctcctcagatcagcattctctgccctgagccacggtggcgcctcactccggggcctgcgtgcctcctgcctgtctgagtccaacctcagcttcccagccagcagctcaggaacccacaaggtcgtgcagctgccgagccgaaaaacgaatgagcagctctcgcgtgcaggtcggctgggtgggtgtacggcttcatggcgaggcatctggagtgagggaggcttgcttctcctgcggggcccttgctttgtgtgtctggacaggcgccgtcctcgtggctgcctgggactggggcctctctccatcatcacagtccaggaagaggggtggccagtcctagagcttgagctgagctgcccttggtggctgtggagatgaggaactgatgttgatggtgcagtcgggaagggagatgtgacggatgaaaaggagaccccgatttagcaggaagtgtggaattctgtgatcctgtgctgctggtccctgcagaggttttggcagtccccagacactgctgtcttgagaggaagaggagtccaggcagccacagcagaacgctgacccctcactggtctgctgactcctcactggtctgctgaccacacagcacggccttggtctccaggctggccccctggagtcctcaaccagccccagagggaaaggaggtttgccagagggaccttgcagccacacgtgtggccccaggatggcaaggacaaggcccctggcgaggtggtgctcattccataaggagtggttagagtcactcagcaaatccatcccacgcctgccacgggcttccccctcccctgggcaccaccggccaccctaagctcagagacgtggtggaacccctcccgtgtggcgtggtgccgagactgagggatgtgcaagctgtgaggagcatgtggccacagccaggtctgaaagacagcactccgaaccaagcagatcgtgtgaaactgcaggccgatgtgatacggagaccagggtgcaacttgctctgttttcaagaggagagactttggagaactgttataaaaaatggttgctgtgtctgcaggctcacacgggaactctgctgtaaatatttctgtgccaaggcagcacagtgttgcatgggggcctgagggcctgtgggtttgattcatcctttctaggatgtctgcaacatttcttggatgtgaaagtttgttctgagcacgacagttggaaaatcaccgtccgtgtcctctgagctaggactcacctgctgcagggaaggagctttgcttagcagaccacgtcacactcccaggatgatgaagaggggatctcctgcagggtcctggggacaaaccctgctggcatctggccatgggggaaagagcatccggagtgaaggggacgacaatagtcaccacagtggctggagatgagcccacacggtcgtcttccccagcggagacgttccctcccgtaggagggtgggtcagaggatacagaaggcgccggcagtgaccaggagcaatgtgcagcctcctctcccccagctcctggaagcagattccgtccgggcacaggaagctttcccggtaattggctaacgcgccacatgactgctgtctgccaggctctaggaggtgagaattcctcctcaaattaacctcatacccagaaacccatcatcgccacttaccaggatgggaaagcacagtgtcctctaaagaaacttacattcaagctgatgatcatactcagacagctaattaagagctaattattcaaatgacggatcaaagaaccgtgcatgcacccagctttccccggagactcgggtcccctggcacttgcatcctgagtcggggaagaatcctcagccacataagtgaggacacatgtttgccaagaaacctcaagtctacattcatagcggtgtctactcagaggacacaggaaaacacacacacacacacacacacacacacacacacacacacacccgggagtccttgcaaatggtcccaggcttcatgagaagtccgtgctggtgacagttggaacgtgttactctggggatagcctaatcactacgaaattaattttctgagctcctgagaaacttgccttcctaaaaaccaagatggatgcaaatgaacaaggactgagcagcccgaagcgggtccatgggggtggcagcggcacccctaactctggccgggtgaggggccccgtccaggcagcctcagtccaggctctaagcaaacgccgtggcccacaggtgctgcttctgggatggcgtcgggacactcctgcgggggtagcagagagctcggcccaccgactagccgctctgcccgctgacctgagtgcttctccgacctccgcagtggacgttcacctctaaaccttccttcatgtaaatgtttggttcccatagctgaggcaaatgcccttgaaaatgcttccatcaggaaacattcagacacctaaatatatactttgtatcaagtttaatgaa

SEQ ID NO: 428 - DNA, 1262 bp, Homo sapiens
actggaatcagcaactccctggaactcgggcctctggccccgtccctcttttctccggcagggacgcaggatgccttggtgcactctagagacggggaccggagggtgcagcgcgcctgggtggggcgaagggcgccggtctcctcacgccctctgactttaggataccagacagtgtctcttcaaccccaccccaggcgcaggtttccagaaggcggggtgggtggggcccccgatttccagaaggcgagttacctagcaggtgtgtggggtgggcattgctattcggagaaaaatcaagacgttcccttcagtcctccctcggtgttaacgtctgctccagctcgcagcccgctgctgggaggaaaatggaagaaacggagatacttttagtgaagcagaataaaccactgaacaggaaaaatgaggaagctgtgagtaccagtggaaggaacgagccaggaagagggactggaaccatctcagaagccatgcccctcaggctggaacttgccctgtctcctcgcagatgagctacctcttgtgtttaagaattaaaggaagatgagctaggaatcaagaaatacgcagaactgattcctgtcactggcgccaccctgccacttgcccagagctgtggtataaatttttttaataggctgaaataaaaatatgaatagcattttggtattaagcattaaattgataaaggctatgagatacacctgctctcaaccatgttaattttttattattggtattaataaattattacttactaacatattaacaagaattgcattgagaaacaaagcatccacaggccaaatcttctgaatttcaaatgtttatattaatgcgttgtattctagaaaagtagaattgtcttaagtagctttgtaatataaagtcatctatcagcccattacacctattagaatgttttaacctttatttcccacttttttgtttctagactgagtgtacttggtctggtatttgtggcataacttacggaacacataagaatgatacagatactatttaatgatgacctaatacaagcttagatagctaaggtgaaagcttctatggccttaacattttcctcttgaagaatgtattttctgtaataaaatacagtggctacttgaaatctataaacttatgtgaggtctggataaatctgagcaactttcttctttgtgctccaggaacctacgcactatatatataaataaagcttaagtaaacatcactgc

SEQ ID NO: 429 - DNA, 387 bp, Homo sapiens
ttattaatgcttttacgagttagaagagttgggataatttgccatctggagtttctctgccttgctgatctgagctcagacctgccaatttaccagagataattgataacaccctgtaacagctgaattctttcttgcatgagatacaagagtcctcccttggggtctggatcaggacccctttcccataacagtgtgagcagtggttattgtatgggttttggcttccagtgagatgaaaaagaattggtggattttaaggagagaagcaacatgatctttctaatgaaggcaccctgaagataaagacacacccacctgcaaggataaaagaagcatggcggcggggtggggctggtatccagtctgcttcaaaacggaggaggg

SEQ ID NO: 430 - DNA, 1904 bp, Homo sapiens
tgttaaaagggttttaaataagtctctttttcaatggtgtaagtatgagatttgtgaagccctttccagatgcatgtgtgtttgcttatgtttaaaaaatcacttgagtgcaaacatttaaacacattttataaaactggcgggccaggcacggtggctcatgcctgtaatcccagcactttgggaggccgaggcgggtggatcacgaggtcaggagtttgagaccagcctgaccaacatggtgaaaccccgtctctactgggggaaaaaaaaaattagccaggcgtggtggtgggtgcctgtagtcccagctactcaggaggctgaggcaggagaatcacttgaacccaggaggcggaggttgcaatgagccgagatcatgccattgtgctccggcctgggtgacaaagcgagactctttctcaaaaaaacaaaaacaaaaacaaacagacaaacaaacaaaactggcatggcattggacagtgacacataagaagctgatgtcatctttgccacttagagaaggcaaaatatcttgttagataacccctcttaaatgctctgcttggctagtactttttgggcttggtcagtgattagagtttaagttgtaaatggtattcataatttcttgtctctgtctcatcccaaacagattagaaaatctttgatttttgttggtaaggagctagcatcttattaatacaaagccttgtgcataaattatttccagtaattatttagtgcctaatgtggcatgctttgtgctgagtgctgaggataaaagaggaataaggtaagatctttatagtttagcagaggaggatgtgagtgggcagaaaaatgttatgagttctataataggaatatgtataggggaacttggttacagctcagcttaattgagaaagggtgtgaaatgaaaagaccaaacattctttgcagaacagctaaacagttggaattatatactcagatgagttaatgattataaatagccatcatttattatctctccagaactccagaaccaaggttataaaaaatgaatagttctttatttagttcagaagcatttgtgaagtatctatagcatctgtaacatggcaggccctaaggacgctggcatgaatagtgggccgtcatctactgggagagtcagtatagcgtgtacgtgcgttagaggtgaaatgcataaaggggcatccaacatggctggtggctggccatgtgaacaagacatttgcatttgccacagcataaagaaggatatttctgagtcatggagtattttattatgtttatttggccccaatatttccaaataaaaagaggcctttgcttttgtgctacaggcgtttcttatctttaggaagaatgggccgggcgcggtggctcacacctgtaatcccagcactttgggaggtcaaggcaggcggatcacaaggtcaggagttcgagacaagcctgaccaatatggtgaaaccccatctctactaaaaatacaaaaattagctgggcttggtggcacacgcgtgtagtcccagctactcaggaggcgaggcaggagaattgcttgaacctggtaggtggaggttacagtgagccaagatcgtgccattgcactccagcctgggtgacagagtgagactccatctaaaaaaaaaaaaaaaggcacggttttgaatctgcacactcaaaaatggccacagctttcccgctactttaagcactcataatagattaagcatgggtcagatctcaccactcattagctattgggtctgaccactaattatttagtggatctctagatcagttatgtaacatctctaaatcttactttcttctactgtaaattagagataaaaaaagtagccaactcctagtggttttgtgagcat

SEQ ID NO: 431 - DNA, 2630 bp, Homo sapiens
ctcccgcggcgggccgggtctccagggaggacctgagttttcttcacccatggtcagggaagcgccatcgccctggctttgaggctggggcctccggggaggttccggtaggggctttgaagaggccgctgtttttgcaaggccgagacggcgggccctgcgcaggccgccctattccgcgccctcagggcgtcagtatccgcctgaggccggataccccctctgggcccggatgcccccgctggccccggagcatcctcggcgctgccctcccagagccccgcagaggctgaggtggcgcgggggcggccccggctccgcgagaagcggcggcagcgagggctggaggacccgggctacggggctccggggcgtctggcctggttgggactgagcccatccagggactgggactctgggattctggtgtaggtggatccggggcaggctcaggaccaagtccctctccttccaccaaggagcgcccagaggccggcgggagctccaggttcacctcctcctcctccaggaaatctcacttccaactggatgtctggatgaactactgaaagctgctgagtgtcctgcagcaggtgagctgtggccagagcccaaggatgaagggggctccctcactctgtgactgtgaagaggaagcctgaggtgtagcaggcccaggccccagaagtatggaaaaaatgaggccatttccaatccagcggaagaccttctagaagaggtgatgggtgggagagtgctggcatactacgtgaagctactatttggagttggacacgagtgcatgtgaccttgtgccacagcgggaatgtgagctggatgacaaatggagatttggacttgtgataattggcctctgtgtcattgtgtggaagactgactggtccctttatttcctgtagcttgactaccacacaaatgaatccactcaaatgttggcaagtggagcagagtcccaggacagtctgcaatctctacaggtacagaaacacccccagttcaaggatcttcacacctggatttaggcctactcctgcaactaccccaggccagttatccaggcagtgactttcagtgcagctacagtcacctctggaaacctgcggagactttaaaaatttccagaaggtcaggaatttttggagacctttctcatggctacattgcctgcaaaggtgaatcaataagcttctgaactgacttagaaaatgttgcagagactcttgtgaacagatagaccctctcctgccactcagatagacgtatcagggtcacacacacctgatttaacaacatgtcattatctcaggcaccaatttgatcttctactatgttgcagacatctgttctgcaaacaccaaacaaattgagacaatgaccttccgcaggacccaaaccacctcttactgaaggaaagaagatccagtgagatagttagtccacaaatggaatgtaaatccataaacactcttaagtaacagaataaatttagtatgaacgtttttatgtgggagctcttgacatggttgctgctcatatgtcagagacacatgcagtttaagaaaggtagcagttccaatcctggtttggcccaacagtcactgcatttttggtggggaaaagggatgtgggaggagatggtacctcttcatctttttctctgggttttctgtcagaaagggatgttgcttactccagtggcaaaaaatgccagtgtcttctgccagagtgggttactgagggccctggtgcttccaccttgtggctgatacagatagtccctttctgcttttgtttctagccaaaaaagatgtttctggcatctcaggtatgctgatttcagcagctgttttttctatatggctattttttttttctttcactctctctctctctctctctttttttttttttttgttggcttcactgtgttgccatagtttcttaaatggtcccttgaaccctcccagtgctattttggtttgtacataactatctatatattttttttctttgggggagtgtgtagagctaaaggctggtatatgctgctcctgctccccgaaagtgacattattcccctaagctaatatttcaggctttcaatttattcgtggtttcacctgtttaaacataagtagaaattactttttctctccatatttagatttgatctatctactttaattgctaatagtgtcttagtcatagaatagattagttagaaaaaagtgtttttgacattataaatgattctttcaatttgtgtctaaaagtggaaaatactagaaagcttaacatttattattgtattcagaccagtatttcctccagatgacctttattacaacaaagataatttaatgaagatctctctaatggtaaagctgatggctttgtgctattacaatatccttcgaataaagtgacagtctggtggaaagaacaactaaagcaaggattaggaagaaaatagttaataccttcattttggtctcactctgcattaagagttgtcatcgtgttaagggtttattatacattaagtaatttaatgtttatttaataataaatggatcctattaaatatgatttttaaaattataatcaca

SEQ ID NO: 432 - DNA, 479 bp, Homo sapiens
ttgactgtggggctgtggatgggacagtctcaaactccatgttcccccagacccagggcccatcctggcacccagcccacagtgggccctgaggaagcatggacctccggggtagccagaatccattccttcccatgtcaagccctgtgctgggcccacccagcctcttctgtcctggggaaatcaccccagggctggggacctggccccagggccctcatgggatgttgtcaccaggaccaaaagctgggagacccagagccagagaattaggctgagaattgggagacagagccttcttgggacaggtgacctgccttgtaccagctgccgtattccccatagggggcgctgtcccggcgcttatcctggaggaaagaatggtcacaagaaagatgagcagaacagacccttgcacctcaggccacagcccaagacatgtgctaggcctgaatgatgggccaggctccgagggactc

SEQ ID NO: 433 - DNA, 616 bp, Homo sapiens
gaaacaggggcacacgaaggttaagcaacctgctcaaggtcacccagctctcctgctctgaaccacatcctttgctaagaacttcatgggcagtatcccatccaaaccttgcaacaacccagaagggcctcttcttcagggaatggaagcagccgactggaccgggattggagtgtgtctcccacctgggggcgccagagggcacatatactgctgtactcgtttgtgccaccagagggcagcctccgcacatcgatctctactgcttccgagaactgtccaaaccggcgggactgagagagagaaacctggtccagggcagagaaagagaggagcccactgcagtgcgtgcaagcgatcttccacgcgtccatcctgaatgtgttaaaagcagcagttaaagagggagggctctggagttggactgtttgcgtttgaacccagactctgggcaaaagctgctgaacctctctgaatctaatagcctcatctgtgaattggaaggatactagcgaggattaaatgagagtgcataggaagggcctagccccggtgcccagcacagaggctccatatgtgtcaccgttgtcaatttctgactcatgtattcatctat

SEQ ID NO: 434 - DNA, 950 bp, Homo sapiens
gagagctctcattttccccccttgctcgggatggtgccacaggaggctgtgcgggccccgctccgcttcgaatggatacagttaagctaatgatctcgagaggatatcgtcctggataagggtggagcctacgcccaaaaacaagattacctgaaagagaaaagaaagggggaaaacacacagagatacagtcggggaggccacatgaagatggaggcagagacaggagtgatgagcctgcaagccaaggaatgccaagggctgccagcagccatgagaagctgagagacacagagaacgagtcctctgccagagcctccagaaggaactaaccctgtcaataccttgatttcggacttctggactccagaactgtgagagaatatatttctgttgttttaagccattcagtttgtagtaattggttacaatagccatgggaagctaacatagggtccttcaacaatcaaagcaaaaaagaggacctattagcacatggagtgcaaaggaggaaggaatgactgagctgtttgaaagtgcagcgggatgtcatgggcaaccagaactcaggtccaaattctgccagaactctccctctgtgttagtctattctcacactgctaataaagacatacctgagactggctgatttataaaggaaagaggttcaattgactcacagttctgcagggctgcgggggggactcaggaaacttacaatcatgacaaaagtggaagcaaacacatccttcttcacatggcagcaaggagaagtgccgagccaaaggaggaaaagccccttataaaaccatcagatttcatgagaactcactcactatcatgagcacagcagcatggggataactgcccccacgattcaattacctcccaccaggtccctaccaagacacgtggagattatgggaattacaattcaaaatgagatttgg

SEQ ID NO: 435 - DNA, 3463 bp, Homo sapiens
ggtggcttccaaggcgactccgtagtggatgcagcgccggacgccacagccgaaaaacagaatcttggaactggtttagtacaatccaggtcgagttccttgttttttatccgagtggccggcaggcccatgtgctgtcttgtttttaacacatcagctcttgccggaagccgctaagagataaaataggaagtcccacccttcccttagagaaggaaaacggagagccgaaggagtcaatctaaattcgatgagcgcgtcgggctccaaggcaggcgctgtcagcccgggagggctgtctgggatttctagagggtcccagaacgggttcttcccaggccgatcccgcctgcttcctgccccgtctctccacccgcctcccgccctctgtaagggaccccgagggcggcgccggaaacacggagaaggcccagaacggcgcgggacccgagaggcctacgttggcaaacgcagcccgctgcccctttgctcgcttcccccgggcctggagtggctcctgtcgcttctggcgctccgatttcgagaaatgactttcagctgtgcaaggcgagaatgctactttagatgatgagaaaaaatctctcgaatggctcccaaaatgaggtccttgtttaagaggccacaggaagccgctagccgaactctgataccaaagaggaggccaagaagcggactgtggcttggtgacctgtttggtattgccaaattttcagcttttattaaagctgaaacaccttggctgtttaaaacgttcgacaaggacttttttatgaacgttaacggcacagcatacgggttttttggaaaaaaaaaaaggcaggacttcagcccgtccgcccccttgtgcaggtccattcatgaacctcgagttagaggcctttcttctgaaactcagaatctagtagggaagacctgtgtagacgaataaaaataaatacatcacagcttgttaagtgctgtgacaaagaggcagtgaaatcctgcttgaggtcatctgccttgctaaagaggtttgactatgttgtaggcacagggttagggttagactctgtaatgggaagttatgtgatcagatttctgtttaggaagatcactggccaggcggggtggcttacgcctgtaatcccaatactttgggaggccgagtcggtggattgcttgaggctaggattttgagaccagcctggggaaaccgcgtctctactaaaaatttgaaattagccaggcatggtggtgcgagcctgtaattccagctacttggaggctgaggcgggagaatagcttgaacccagtggcggaggctgcagtgagccgagattgcgccactgcactccagcctgggcgacagagcgagattccgtctcaaaaaaatcattccaacgagtggataaagaaaatgtgatatatatgcactatggaatactaagccataagaaggaatgaaataatggcatttgcagcaacctagatggagttggagaccattattctaagtgaagtaactcaagaatggaaaaccaaatattgtatgttctcactcgtaagtgggagctaagctgcgaagatgcaaaggcataagaatgatatagtggactttgaggactcaagggttgaaggatgagactacacattgggtacagtgtgcactgcttgggtgatgagtgcaccaaaatctcagaactcaccactgaagaacttccccatgtaaccaaaaaccacctgttccacagaaactatcgaaataacatttttaaaactttactatttctgaataaaatttacatacatttctcagaaaaaaaaatatttggaattgaggtatctaatagagaactgagttaaattattgccacttaaaaacacaaagtgatatagccactttatgaattaatcagtcagcagtggctaggttatgcttagtggtttataaccaaatcttagtttataacaacaaatgtgtattgttaattcccactacaagtttataacgacattgctggatgctacactccatgtctctttgtgggacccaggctcatgggacttctgttacctgcattagagagagagaagacaacaaaatatgcactggttcttgaagctttggcccagaagtaaaatatgtcttttacctgttcacattgcattgggccagggcaattatcatggctgcaagtaacttcaaaaggatggggaagtgcgatcttggcatgtgtcagaagaaatgaaaacatttggtgaagagcattaatgactgtctttacaggaaaaaagcaatcaaatagacatgattgcttgtttcagtttcatcatttcctactgtgttacctaaactttctgagccccagtttcttattactaaaataaaataaagatgatattcacttcaaggactttgtgttaactagggtaaaaaaattgaaaactagtaagttatgcaaattagaaatgtataatattactgctttgaaagtgatggtgaaatgtagaataattggaaggataacacaaagcacttataccaggaggcttttagctgcagataatagaaatgaacctccactactttaatcaataaaaaagtgtatcagctcacaaatttgtcatccagacataaaggaggcttcagaatttattgactcaggagttgaatgttggtatcaaggacctagatttttctcatcactctgcacttcaattctcaatgccctattgaacatcaggctgtagtaagatggctagagtgattccagggataacatctagagataaaaaagagaactccttttcttatgatttttttcttaagagaaaaggaatttcccaaaagcccccagcaagcatgccttcacatcccatggccagaagtggctcacatgtgtaccctgagctaagcactgcagacaggaatggaatcgcctgtaggcctcagagaccacctggatcttgggaaggtgtcagctctacctgtggcacttggctgagtgggaaagggatggaaacatgaataaagtaagaattaggaaggaaaaggagaaatggatccagggtatgaagccaatagtttagttatctcaacaaatatgattgatttcatctttatgaatgtgatgacctaatttaatacattcaatcaatgaagtaaaaaaaagtgcaaggacaatatgacatctgtcattctctgttgagatttgagaggtaataataccaagaacgtgtggtgacctgggtcctcactgctactgtcttcctgtacctggacacttctagcaagagacttcaacttcagaacaaagaggatcccaacttgtagctgcattatacacaccccagcagcacacataagttgatttctaattattcctctttaagaaattgtttgtggaatatttatctatttataaatggaaaaatagaaaattaaaataacaaaaataagtaa

SEQ ID NO: 436 - DNA, 91667 bp, Homo sapiens
agaacggtcgccgcgtcgcctcagcacggacctccagggagctcctcagcaagatcctgccagggcgcccctcagcgcgattctgccggggtgcctctcagcgtggtcctccccggggctcctcagcacgattctcccggtgcgcccctcagcgcggtcctcctcggtgcgtcagtcatcgtggttctccccggcgcgcccctcggcgcggttctcctcggggctcctcagcgcggcgctcttctgggggctcctcggcgcagttctccccggggactcctcggcgccgttctcctcggggcacccggggcttttcggcgcggttctccccgggggttcttcggcgcggttgtccccgggggttcttcggcgcggttctctccgggggcctctcgccgcggttctgttctccccgggggctcctcagcatggttctcctccgcgcggtcctccctgggcctcctcagcgcggcactctcctgggggctcctcagcgcggcactctccccgggggctcctcagcgcggcactctcccggcggctcctcagtgcggttctcccagactctcctcagcgcggccctccccatctctctgggagggtttgaacacggtcagcacggacctgggcggacggcgcgggacgggtgatcactggcgttgctgaggtgagctgtgtgccccgcggccgtcccagatcacaggcgtcagcagtgcagcctggcctgggcagtgcgctcccatctgcaccttatggacagcgtggccagggtcgaggtccgagttcctggccgcgtcccaaggatcggattccgggtctatagttctcatggtggttcagagtgggctgaattgggattggagtctggaatccgcatcgtggttctgagtccgcgctattgggatggaagttgggaatccatgttgtggttttgagtcaaagcccgaattgggaccggagtcggaaatccacttagtggttctgagtcagggcccgaattaggatcggaggtgggaatccccgttgtggttctgagttaggtatcctagttgggatcagaattcgggtctagggtccacatcctggctgggagtttgcctgagttgggatctgagtagttggggtcccagtcagtccgggtctggagtccgcatggtggttttaggtagggcctcattagggacagaggatcgggagtctgagttggggacctgaatcccggtctggagtctgcatcatggctctgagttgagatccaagggaggtccgagttggcgactggagtcagggtctggagtctgtctttgggtagaggttctgaatggggggctctgagttaagagattgggattggggttagaggtctcagtggggtatgggagtcaggaattgaagtcgaagttctgcctctaggtggggattctgagtcaggaattagggggcgaagtaaaggttgcagtctgagttgggggtggtgatcacctgccaggtgagaggtagtggtagaagtctcttggtcatattggagatgagagttgatcagatgcaggtctcagtctgggtagtaggcttgaagggccaccactatgttcagatcccagtaccccactgtggtccctgagcaggtcaaatagccttttatataaaattgagagtaagagtgccttcccacagcactgttctggttatgaaagagaataattcatccaggtagaatagttctgtcttagattatcacaaagtataaaaactttcctgataatatccacatttgatgtgcatttaccagttctttctttactgtggtgccccttttgctagaccaaaagctcccaacgaggaactctgttttgttttctgctgcctgctctgtacccagccaagagcctgatacacagccttactcagtcagtacttgaaggaaagcaggcaggcaggattaaccagatttctatggtgtctcaaatgatccatttctgcacctgttttccagatactcagtaggagaaaaatttaaggattgagttgcttgattatgggtgtattttaatgtgtttcctaacatgctgaggagaaaagtgggtctgtttcaggatttatgctccagctagagggattttttaaaattgcgaatcagagcatgtccaaattcagatagaaagcacaagaaaactataaagaatttcccttatgaatgtagatgcagaagttccttgtacaatgctagctaactgaatccaataatatgtattaaacaacaattcttaaacaagtgggattgctcttaggaatgcaaagatgatccaatatcagaaactttatccatgtaattcacattaagaggctacaggagaaaaaccatatggttccctcaatagaggcagaaaaaaatgatgtgataaagtttaacgcctatgtgtgattttggggtagtggagtacaccacttagcaagccaggactagagaggaacttcttcaacttgatacaagttataaaccaaaacttaacttttcagtaaacttgatagagaaattaaaagtgtatcattctctttaagataaggagtaggccaaggatgtcatcctggccataccctaatacaagaaaaagaaatggggatgtgaggatcaggtaggaagtgataaaacttagtgtagctcatagggttgatggtctccataaagattctcaaacattttggtgttacgacttgttgtattcttaaaagttattgaaacccccaaagggcttttcttgatagagattctatctgttgatagttaccatcttagaagttaaaactaagaaatgtttaaagcagaactatacaagcacatattccactggggtcatggtgtgctgcctctggaaaactctttatctttgtgagaatgaaagaaaaggcaaataatgtcgagtattattatgaaaatgtttttgacctttcctgaaagggtctggggggctctctggaatccccagactacactttgaaaattactgggctacatggaaaaaaaaaattaaggaacttaacaactaaagagagatttcagatttcagagaggttttggatataagatcagtgtactcaaaacaaaaaacaaaaacaaaccacatttctttatgccaatagcaactgactaaaaaaaagcataatagagattaggacagcaatcagaatagcagcaaaatttataccagtctaggaattaacaaagacgacgacttttatggaaaaaattttaaaactctattggaggatatagagggagatctttccatatgcagagacattttattttcttgaacagggcaacttggcattagaatgacgtcaggattttccaaatctgttaagttcaacaggactccactcaaacttccagttggagggcttgagtaatttaacaaacatattctaaaatgtatgtggaagaaaaatatttgtaaatgccaactgaacttttgaaaaggagagcagaggacttctgctggcagataccagggcacacgccaacttcagcaatcagagcggtgtggtgacagaggcccagaagagagctcagaggtaactccaagtctagaggaaggggacatgtgataaaggtggcaccacatatcagtggggactgttcagaagatgatgttggaaagccagccctaaaatggaggaataggaatatggattcctaactgagcccctaggaaaagtagactccaaatggactaaatatttgaaagcaaaaggtagttgccatttgtttaataggagaaaaaatgaataatctccagggccagggtggccgtggggttcttaaacaggatccagaaagcacaaacctcaagactaaaatgtatgaacttgaatgcattaatgattatggattaaggatttctgttaaataaatccatcatggcaagggtcaagactgttttcataataatactaaggaaacaatttgcgtttttcacttttacactcatgaatgtaactttgccatgactcattacaagatatttgaaacaattaaagctgaggagggaacaacagctaaaatataccagaaagcaccacaaatcattaagaaaaaggtaggaagattgccagtttgcaggagggttaacaaacagatgaaaatttgcccaagctaatcagttatcagagaaatgtaaatgaaagcaacagctattcttcataggagaagcattagaaagtaggataaggccaagtgttggcagaaggcaaggaacaagcctccctgtgtgctgcaggtggggacggagacaggcacagacgttctgaagagctggccaacacttcttcctcaaataaaatattttatacctgtggcccagcagtttccctcctaagtaaacatgctggagcagttctcacccagaacaacgagaggctgtgtgtgtgcatgctcagggcagcatggcccataggggtgggcagttggagctggtcactgtggttaggagcaggggactagatgtacacttcacaagatagagacgcgtggaaacacagtgctgagtgacacaaatgccaaacagaaagagggcctcagtacatgactgtgtatttaaattaaaattacacaccacccagacacgcagtactagggagtgctcgtgagtgcacacacacacacacaatgatataaataaattaccctggagaagctgtttgtgtagggaggagagcaaggatagaggctagagatgaagtggaaaagcatggagaggaagagagcggtgactttatgcagacccttacagggtgacagtgtttcataggctgagggctgtgatcaactctgtgcagagtcccaaaagccaagaaccaacgaatgaatgtgcctccatgactctcctgccagataccctctagtggcttctatttctaggaaataaaattcaaattccatcaggtttttacaagatctgccctgcttacctctctgaccactgtcctccctcactgagctttggctctgccagccttcttcttctttgttaaatctgccaagtatccctcctgccccaaggccttcaccacctctgcctggcttgtcttttctggtgatcttcccttgacaattccttcttcttatttaaatctcacaggaaattttgctctgacctgccatatctgtcatccccttcagtcactcactagctgacgactacctttcgagtctctgcaaagcacaggctacgcttttctagttccttagacatctacttatttgttggctgcctatctcttccaccggaagagaggccccaagagagcatatctgtcttccgtatagggtccgcacatggtgggtgtgtcacagatttctgttgaatggtttcattcatttattgaacgaaggaagaggccaggccaggaaagtgtgcctccattttcacaactcagtgagaaagcaaatagcatgtcaaaatctgaccccttgcaaccagggtttcttagccagccacactggtaatgcttgggacaggatgtatctttgttgtgaggggctgtcatttatattgtaagatgtttagcaccctgcctggtctctacctagttgatattagtaattctcccatagtcatgatagccaaaaatatctccagacattgccatatgtcccctggggggcaccgcagatgacaaccacttccttagaacagctcttgggactgggatggtgtctctgctgtggctctttaaaggcagcaggccctggcttgcatcctgccacatctaacacctatagcctcaccacctcggtgagaaagaccctggcccaggcctggccaatcagagtaccctcttccctggtcagcagtataatttgtttggcaagcacttccagtcccacaacctatgggctgccacccagaggtttagttggaactacgtgtcagctgccgtccctcagccatctatggcatgggcacctgtggcttgaccaagttggaggtggcctagagaggccgggctgggcctgctcaccttctccagttagtgcagactgatgaatgagtggttctcagcggataccggatccaggtttgcagtacactccaggaggaggacgagtagggtttccctcagagcaggcctggatgggagggcaaggggtggcctctaatactgcctttccttccggtgcctttatcagcctgtgccatgctcctctgaactggccggccccagcatgtccaggttactggcaggagcctgtataacccagggttccagtcacaccagccaggaaggcccatgaggctggagcgcacccagtctctggctgctctgtctgcggaactaaaagcctttctcccagagcctttcctacggctgggcgaagctcttgtttgcaatttaaatgtggcctcatttatggaagaatccctgctcctccgaaaagccttgggctcaacctccctagcagcccgggcctcagccaggagaagaaatggatctaaaaggcctttctcctgctaattgtagcaattagcattagagaatggggactcgatggggggccagcgcctggcaaaacaagcttattcccagcttaggcccaggcccagctccacacactgctgcttggccagactcggcccccacccagggtctggttggcttcagggcagggagagagggcccaggcctgtgggtgctaagagcagttgtggagggtgtgcatctgagttgttaagcctggtagctgtacaggtagccctgggctatgacttgtggtcctctcagaaaagggtctgactggaacgcagagccagaccagatattcatgagtggatcacagagtgtagactgagggctatctggtgattgacagaaagtagtcttggggcaaatgactcttaaagagtaaggagccattcccctctatggctaactggatgcctttctctccccctgctccagaaaggacttcctgttccttcactgagcgtgcttgcttatgaggcttctggaaaccaggagagttcagtgggcctcattattgagcgtatgggcaggacaacctgcttgggacataggccatgctacagttgattttagccagcttgctgcatctacacagcacagtgccttcccaggcagtgaattatgtctaacaggcaggggaatgatcattgcctcatgttagggatgcagtcattcaagaaatatttgtcaaacactcagcaggtactagaccctggcccagagggagggatttgataggagcagggacctgcctaccctcccagggttagtggacaaaggggagaaagactaactaatgttgaaggaccgtttgcaccctgaggggagtgctgaggcctgggagcacagcaggtgtatagcaggaacccactggaactagcctggggtctgaaaaactcccttggggaaagtggcaggggcaggccaagggccctctggtggtagggagcctgtgagcacctgggatggaaagaagccaagcatctgaactaccagaaaggcagctgcaggattaagcaagacccacaggtctctaaactttgaaaggatgtctgtccactgagtagataattgattggaatggggcaggggatgtgagaatgccagttaggagatgcctgcagtacagagaaatggtggcctatcaggacagtggcaatagggatggagggaagcagggaacctctagaactatggatgggtgaagtaagcctggcttggtgatgggcttgaggtgatgggcaggtggtgaggaagcgggtgtatcggaaatgaccccagaacttctgacttgtgccactgaaaggatgggtgacactgaaaggacaggggccttcagtagagtgggctataaaatgatggaggctgtggagaggaggtgggggcaggtgactggaatgtgggtctggctgggttggagagacatttggggggtcagggcctcacaggtggtctggaagcccttggtgctgagggaacagcttagggaaatggtttgcatagagaaaggcactggcatttagtggccatgccagaagggaaaacctgccaaggagactgaggatagagccagaaagatggcaagaaagccaggagaactggagggatggaaaagaggacctaggggtcatggtcctggcagaggtcacattggatccagtgcttgtgattctctgattgctggcagtggatggccactggcctgcaaatggccctagtggaatgtcccctgcctgtgtggctccctgtgggctgcctctcccctggacagatggggagagaccccttccccacctggttctctgtttcacccttggaactgtggcggtaaagaggacctccccacagtacgtgcagggaacaagctaggttgactccctcagggaggcctcgtccttgctgaggtatttcataacctcaggatagagaaatccccccaactttaatgcaaagccaagcaagctgaaaaatggccttgaataggctgagatgaaaaaacaaagaggctgtcaacatcagagactcagtgggggcagggagcttcagtggactccccacagacagcagttcctgggcttctatgcccagacccagaggcctgagcccaagatgtcaggatgggtggtcactgtaagtgcagtggattgtagctcaggggtgagacatcgcctttttcttgtcagctctccttcctgattagtggctcaaacagccttccgagactcaaggggttaactgcagatcctctaactcctccacttgctaatttttaaacacagctgagctctgagcacccctcccaaggctgtgagaggccagaggccagcacagactctgcaccaggtctgcacagcctccacccctactgttgtcaggaatctgcaggcatctagaacaaaggtgcctccattatttccctcacccagcatatcctgatacctgagccaagagttcacccagagcttttgcccacttcattgatggtctggtgggcttttgttgacacatacccgtgactcccaaatgaacctttcaggttggcttaaagccgctgggacctacacatgacaaaacccagacggaaacagtggcttacactcctgtgtccctaaaggtacctgttcctaacagtgggagtgccagagcctggaagctggaagccaaggagacagggacctccctcctgctgaccccctgccaggccacatccacctaagggatttgggatcatactccatcttcaaccactgggatcaaatggaaagccctcaggaattctgagagacagcccctatacctatgtgcactgacacacatacactgacaaatacgcattctgacacatatatgaacatgcacatatgtgtgccccactccctgccaggaggtgggttctgtcccatctttgacatgttacttcttgtccttccctaggcccagtggcactttctttgtgataggtgctgagacccccccgactgggcccagtggctgttcccaggacccagtctctgctcttatcttaacccagctctagctcccaggaccccagcctttcgcagggagagagatagctcttttggtctggcacatgttccatgccaagtagtggaaacagcagctgcagggcagcctcagacttgacatcatttaatccttgtgacaatcctacagggaggaagacactacacatatgtgcagatgcagcaaggagcagctcagccacatggaatgacttgcttgaggtcaccaggcacttgacacagcagagtttagcccagtctctggagagaccagccttccacatcctgtcatgctggggagggctgcccgctttttgtccctgctcccccagttctaaccccggaagagcgattgtccctgctgtgccttcagcccagacagaagcaggctaggagaggggaggagaggcagggctggccctcggaaggctcaccttcctcaacagttctctgcttgggcaaaggtcttccaagcagccaggctctgaggctagtcactgtcatcgttgggtgaggcagcctgggagtaccagaagttggagcaggtgggaaccttccccagggatggggctggataggcaggggtgggtgctaagtggcaggccacaaccaggcacctgggagggccaagcaccacactgagaacgcagtgcttcccctcccctcctaggctgctcaggaacccatcagtctcctgtaaacaaatgagactaagtctctggcactctaggcccaggtgcaaaggacagctgcccctgcagctactcactctgccctggccctctcaggaggcttgtgacctctgcacctgctggcttgttttgttcctaaaatacccggatccttgagaatctagaagacaccactgctaacagatttccacatcattcattctgttcttcctgtgcaagcttcatgctgggacagggaccataaaacaaggtgacccaaaaccttcagcagaatgcaggtaggcagagcagaggtctctgggagtgtcattccaaggcagtgtcttcctcctcccctatgctccccatttcccaagagtgggcttcttccaccccactcaagcacctcttcccaaggctgacctaaaggcctcaagctctgcggataggggcagtcctgaggtggcattgagtcttagggttggagtgggagatatctgtgcaaaggctgataggaacgtcctccaagggctgacttcaaagcttggcctaaaccactgcatcaaagtcagcaagctgagctgtttgcacagaaaaggaggaggagcaggcccttgagccacctgtagctctccttagggtctcaggctttcacaccagggcaggccttgggccagactacccaacttccaggccggatgtgccaccggggaggaggaggtaactgcccctcaaaaccctgcagcccagggctccaggattccaacccagggacctgcaggctcccctgctctccagatcagacccctactctcagagccctaggcccagtgggtgacagcctgtgagacaggcctgtgtggggtggccctagccccacctcagcttccaacctgaccttgctgcatgacctctggcccagccctctccacctggagtgccatctctctttgtgggatgggccaggtgggctgtgtgtgggggagggcaagtatataggtgtggtataggtggaaactgccacagtaaccagcagcagctcagagccgggccacccaatttgtatgccagccccagctgggcctaggcacgtggtgtgtggaaatgaacgaagcaggcagccctatgtttaggaggcaggtccagagctcacccaggcacagcacaagatgagtgcctggcctcagtgagcgagcactggctgctatgaggctgtggtgtggaaccttgacactagggccactggcctggctgtgtgacctctacctcatcacccagagcagggcaaccagaggcagagcctcagtgtggtgttctcctgtgaaatagtgatggcacaggcaggggctggggcccagtgcctacacagaggatcagcaaaggatggcagttattgaaacctctacggggaagttccccagacacgagaggaagacccccatggaagctgtgtgtgtgacgtgcttagattttccagagtcttcattttccttgtctaaacagaggtcatggcgcctccctctcagatcaaacagccctgtatgagtggctacaacctttggtgggctcagtgcagcccctcctgcccccttgcttgggagctgtctgcagaggcctagggagctgcgtggggtctctccacctcagcctgtatccccacccccaccaggtcccctgcctgactccagcatacccaggccctagaagcaccaactccatggctgcagctgagtggagtgtgtgcctgcccaagcctagaggggtgctgacccctccctcgcacgaggagacatcaaagggaagcaggaagcagcggcctggctgacccacagcgggtgggagaagtgcagcctcacaactgctggggattttccatcccaccaggatttccgcgggacaccccaagtccagcctttgaggctcctcaggaaccagagtttggcctggagccagttggggcagaggaggggggccaggctgggtggcttaggggtgtggttaggcctgctaaggggctcctcttctcagtctccccatgatttgctggttactggcttgaaatctgggcccagacccattccaacactgaaccctgagctccctgagacctggctggcaaggacaggtcccaatttttacaggggcctgagaggaatggagaagggatctctgccccttcctttctcagtcacacctccttgacagggggtcatcagagtgggctgtggtaggtgcaccagggaagggaccatacagaggaggctggtctcaagtcctagggtgcctgggatggccctattgaaatgctgcagcagctcttgtgcaggcagggatctgtatggacagctgggtggacacaggtgcctactgacctcccagatccttcagcagagctcagccctgagtgacagcccaaggcagacctggctacctcagcctctggctcacagccctcagccagagccctgagaggcctgggatctcaaagctgcaaggtgggaggccagaggagagaagcccggagctggtagtgatgctggctgagtgaaaattgcacatttcccaacagtgtgatgctccctatccagcctgggcttttggcagacttctgtgctttgtggaggaagctggctcagattcctcccctccctgtgcagtttgtgtgtcaaggtgtacttgtcacacccaactcaggatatcttgcatcactttgtgggtccttgtcccccagagctgggactgctgagttttagccctaagctcttgctcccatcttagcaagtcagggcccagtgttgtccttgcctctgcatcaggatggtaagctgggcatgctccgcatcacggagacctgcatggacctggattgggttgcctctatcttcaggctggtcactgggcagacacaaaccagggcctctggccagaggggacagtggctctgagttacttgtgctgctctttaggggtgagcaggggctgcttgtgcatcatagtgtatcacaggggatgcacatttacaattgaaagctactggtcctgggtagaagtggggccgagtaggacttcccagccttgaacatgggtttgtcatccaactgggacccacacttgatccagcggccatgctctgtgcagcctgggcctgagggcagccacgctcatgtgaaaagtgctagtagccaagctgccattctagtcaccacagctgtccttgcaggagcacattgcccagggctgggagctgtcatttccgtgacgggagtgagactcaacactgggtgagggtgggggtatctgttgggaattatttcaaaacaattgtggaaacttggcagtggaggggctctgggcataggtatccacaatatcctagtcaggggttggggtaccctggctctgctgataagcccaagtgagcatactcctcccccagcttggaacaggtgggacgggccaggtgacactagtgtggtctgtggtctggcctcccaagccagtggcagtactggggtggcagacatttgctgtgtgctatcccaaggcctaaaggtcacacagctaggttggagcagggttttgggcaggatgagtaggcattgctgtgctctcagaaaggcgaagcaaaccccagaagcaagggggcgagacagggcaaaggcctacactttgccatcaactcaggcctactcaatgctggccctgtccttcccctgcccctgccccatcagatggtgcgagctggcggggcttagagtgagcccccctgactcttcttggtgtggagtctgaggcccagagtgtacaggcctcatccgtgtgacccagcaggaggatgggagagtgggcccagaacttggtcaggctcatccgtggagaacaagttcttccctagtctagttgtggtctgagtcctgggtgaagcaggaggcagcctgggaaacagcctcgttctagtaggaatcgcattctcaggaacgctgactgtgcagggccctttctcactgccacctgggaggatgcctgcctgctggccatttcggcggactgtcagagcaccctccctggggtcccagaccgaaggcctgaagtccacatgggacccctgaacttctggtacctgtgtgggcttgtcccctcaaccctgagtggaatggcaacagccagctgcaaccctcctagcttcctgtcatgtgctgtatggaagggccaagagctgtagtcatctgcagatcctcccactgcacctgtaggactagcgtctcctgtctggatgtgagcaacttgctggtggcctgtgagatgggagttgcactgggcttctggataagggcttctcgttcaggtgacaattctatgtgaaggagacccatggaaacacatctatcccctgcccatgtaccaggcagagatggtacctgcccatgtaccctccatgacatggctgggtccctgaaacatcagacagatcgatactctgtgtgcatgtttgtgggcaagacacagtggcacgtgtgccctggagtttggtaatgggaggactgaagtagtgcctccgtgtgtgagctgtgccagccatccccacgaagggggcattccatgcagatggggatcctctccaggcagcttcttccacacctgattagctctgaccatcagaccccccgtgccaaaagggccccttccctggaatctgtaattctcacaggctgtcccatacattttaaatccaggaaatgtgctcacccatgagacagggatggcaagaagatatgaatgaaaagcaaccagtccgtaaaattggaagccatttcactccttaccaggtacaaagataacatgctgcatggatcagggacacaaacttacctaccttatgatgtagtgaaagaatctaaaacttttgtctcagcagactccctggaggaagccaataacaggaggccttgactaggagacctcaagccttggaatgtgcccagaccagtggggagggaaggctgggaggcagtcctcccttaccccttttctcccaggcagacctaccctgggttctctccaggcccctccgcctgagcaagtgctcagttggccactagctccctgcacatccaacaagcctttctttcctgttccttcttcaaggaaggcttagcctcaaatccagggccacagacaaaggacagtcactctcctctgccagaaagtcatttatgggacatggagaaagcatcaaatatattgcttttccaacacctaacagtggaataggaggaatagaaggagaactcagccagaaagttctggagcatagtctttttgccaaaagaacacgttttcaaatgaaagaggtggtgctggggcactgaggaatcagggggatggaccccactggagcttgtctcatgctggcagcaagtcccaggcctcaaacacatacctgggccacctcaggagagagactgcagggaagaaatgagttgcaatgctccagcctaaccaactccccttttgttaatccaatcccagaaggtactgggtagggtcagttaacagacagctgcctgtctcctggcagagtctgaccaagccccagtgggcgcttctcttcctaagtcctctggtgtaccccattcttcaagggaaacggtccccttaagaatctatgtgaaagggttctgaaattgctgtaccagttaatgaattatttactctaaacaatgtcttgataaagggggaggatgaagttagctgatgttgactaaggagagacggagttgccaaggaaattcttctaaatgaaaaaaaaaaaaaagtaaaagcagtcagctggttttgtctgactatgaaacgtgtcacagagcatgcacctttggccatcttttgcatttatgatttggaagagagatgtagcagtgagtgtggggccagggaggggaatccaacaaagccattctgcaagctagtggctgggattttggggtatagagtaagagcagccagccttagaggcccatgtcatctgggctgcctcagagctaaagctaggtaaccagagggagtaaggaaaggcctgagtcccaggctaggcttttcacagttgtattgagatgggaaagtaagggatgttccttgcagcagatgcagggcccagttgtctagagcagtatttgaaatgagttggcatttcagggcagtgtttgtgatgccagtcagtaggtaggggcttctacctcttttttagaaatgtttactctgaactaagctctatgctttaacaagttatgttttaataggaaaactgtcattgatggaatcatatgtaattcctacatttttccagttacccattcctggggaaagcttagccattggacaaaccacccagagccccaggaacctgcatttgcagacagcagtggcaggcacagtggcctagtgttgagcgggggaaacctggcctctatgtgtctggttttgcaaactaaaacgccattgcccatactcaggctgacaggttctggaggtgccatggactcctgctctgtatctcacctctagttccatcacaatgcatgagctgtcagtgggagccttttaatgcagatgctaatacccattcctaatgctagcccatccccacaccctcctgagttggtgcgatatatcctgggaacaagaaaatctgaaggctcctggtcctcaggctagcaagagccttgcctgtaagaagtgggagaaggtcacctctctcaggaggcagaactaaggctgcacagcacaagggagatgtctgaatgcacagtctgggtggcagaaggactcctgtcctttcttccacacagacctgagcacctctccaggtgccaccattttctgtctgggaacatctgctatccccaagcctcagtttcctggtctacaaaactgagatggtctcttctatacaaggccccaggaggatcactgcaagtcactgcatttcatggtgcccagatttccctgcatttctagaatgtcaacagagatgagtgggctcaaggggaagagattctttatgactagagatattctggtcaactttggaccccagcttctatggacaatagcatgtggacatgagccctggggaagcagggatgactgagcctgaagaagagctctcaagccttacactctccagaccagccttgggttgcctgaaccccagcatagccttatggaacccctgccagggtcctagcacctggtttgacctgggcacaagtactcactcactcactcactcactcactcactcgtcaaacattcactgagggtccgtgacaggctccatatggattaagcactgaagataaaacactgaatagaaacagccagcctataccctcatgctccttgaatgtgatagaaggagccagccagtaaaccctttaccacaaataaacacacagttacacattaagaatgggaggggaggtatgtgattttttacagcccagtcttaagctttagaaattggctcctctgaggaagggacatttcagctaagaaccacaggataagacagtcctggcctggggaaggggagagaaggtcaggagagagcttgatatgtttaatactgaaagaatatttgatgagctgggacatctcctgcagatccacggctccctagctttgtgaccctgggccctagactcaatccctcaacccttaggagattatctataaaacaggagtgataatattcttgtgttaaaagctgctgtgaggattagtgaaatgatgtctatatttgcctggcaaacaggaagtgtaagtagtagtatcatttgaagattattcttcagcctaaacgtgtgttcattatggccggtgtgttttctccccacctagatggtagtgctgggcctcctttggagtaccttgatgtttggggagcatggatgatatgaccataacctgagaaggcagggactgtacccattctggtcctcccaggtcccagggcccccacagtgccctggtgtgtgatcagtgcccacaatactgaatagaggaacagacacatgggaagcaacggcagcctggtctttaagggtgagggagcaccttctcctgagagagggagagataggttgggggaggttgggtgggggtggggagagcgagtgagcaagcaagctagaaacttcctgaaaagggaagttactctagaaaagggtaagttccttccaggcatcatgggctggcttaacctggaccagtttgactttactaagtcccatttctcatctagggagcctgaggccattaaggttatctggtcccaaaatcccctagagctgtcacagggatccccattctttgcctttagtcaccccagccccaagagccatcctccacatggagtgagcagggagctacaaggaaaagacggtcacagttggagagagacagagaaccaggtgggctggtaggacaggaaggtatagggagaaagtgaagctctctcctggggaggcaggaatactctcctgcttccttctacccactcttcatagaacacaaacactgcaaaaatgactttttccaaaccctcttagcattcagaagtagaattgctatgtaagaattttttcataggtgcttttttggggggcatctatttaaaaaataaccacatcattagtgaaatcttccaaagtctctttttggagcccacatttcactaatgtccacatctgaggaggctttcataataaaagaacacatacctatttcacctatgatggtcagtgcaatcttgaaaacactagtaaatagtgtccatcagctttaaaaatacaaacccaaattgggtcataccaaaatgcaaggatacacacaataacctgggtgaatcttcagggaattgtgctgagtgaaaagagccgatcccaaaaaggtgatttgctatgtggttccatttatataattttcttggaatgataaagaaatgaagaataggttagtagttgtcaggggctaaggacagggtagggtgggagggaattgggggtagctataaaagggggacatgagggattcttgaagagttagaaatgtcctgtagtgagactatcaatgcaatatcctggtcagaatattgtactacagttttgcaagatgttactatcgggggagactaggtaaaggagtatgtaagatttctctgtgttgtttcttagaactgcatgagaaatgtacaattatctcaaaataaaaatttattttaaaaaatgcccaaattaaaaaaaaatcagtagtcctcctaaaaatacccagaaatgaattttagaatgtccaaaatccatacaaagatctaaaaaaatatggaaggatgttgcaatggatttgaacatgtgggtaaactgcttctatttgtggctggaaagactttttttttgaggtggggaaggcaattcttcatcagttaatctaaattgaatgaagtttcaataacaaatgccaatgggatatgaatatacacacagatagacaactttttttttttttttttttttaattaggcaagctgaggccaggtgcattggctcacgcccgtaatcccagcactttaggaggctgaggcgggcagatcacttgaggtcaggagtttgagaccagcctggccaacatggtgaaaccctgtctctaataaaaaaaaaaattagccagtcatggtggcagatgtctgtagtcccagctactagggaggctaaggcaggagaattgcttgaacccaggaggtagaggttgcagtaagccgagactgtgccactgcattcccgcctaggtgacaaagtgagactctgcctcaaaaaaaataaaaataaaaaaaaaattaggcgtgctagttctaagtttatatgaaaaaaatgcatgtcctataaaattcagaagtagcagcagtctggccccttgtgctcctctagccctcaactggcctaacaggccctagtgtgcagcagggactattttcccatcatcactgtccacagcatctggacaagaatacagagaacggctgatttaaaaaaaatctaatctgggatcctatgcatcctaaataatcttatgaggatgcacttgtattttttctgatgctgatactattcattccaactcgcctccccatcagctttgtcaggcactgtgaattgcatggtacacatgattacaatggatggaatggccatcatgaggtatagcaatacatttaagtaacactgtgtcactactataggacaggcacttttctgcatactttatattattaatttgtgtaatcctcctaacaaccctctgaggaaggtactcttatgattcccattttacaaataaagaaactgagactaagtgactcactcaaggtgtagcaggtagaaagtagtggaattaggatatgagttcagactccagaccctgttattagcccctgtctttggctatggattagtaaaggagagcacagccaagggtgggacaggcagctgtagtcctctggaccagcttcacatggatggggctgcattgttacaggtggcctaactcagacatggaaactgagtcgctgctgcccaactcatgccatgaaaccattttggcctgcacagcttataacagcactctagctctagctatgacactttatggtgttagtgggtttttttggtggttggtatggaggaggggctgggctacaagttttagattatgtttcttattgcgggtttttaaaaattcttgaattaggcctatttgctcttttgttctctattgagttagcaaattcagtttttccaagatgccctgaaagtatgatcatacatgtatacgaaatggtccttgggtccagctggcaactcctgtgcacccccgacctggattctgccttccttgaagtgagccttggaagaaacaagtgctcatgctccctgacattattagctgccacgatgaagcctcagtcccaaacaccccagcttcctgtctaactcaagagctaatcctgtgtttaaatcttaagagtgtttagatcttaggccatgccatgaattcccctggttgactgcatttgtgaaaatgagcttcccattattggctcttaagtaatggagatgagggggagtcctgctacacagataagtgcatcataaagttacataattaaaataactgagctctggcctatcaacaggcccatcagcagtccagaatagagtctagaaatggacacaaattaaatgagagtttgaaatatgataaaggtagcagttgaaattagtagagagatgatgatgtactcaaataaatagtgttggacaactggacaaatatatgggaaaccaaattggatttaattactctgtcaaaatcccgataaagcaaggatttaaatgtaaaaaatgaaataaaaaatgatagaagaaaacatggaagaatttattaaaacaatttcaggatgagaggttatttcagaatttaagataaggacctcaaaccataaaagactgacacagctgactatgtgaaattaaaaaaattctgccaccagaaaaatattatagaaaaagccaaaacacctaaggaaaatgaggataaaatattttcaatgaatatgacaaagcaagtttctacaaatcagtaagacaaggtattttacaaagtccaaagggtatgaagaaatagttcacaagaaagaaaaacaaatgattttaagcatttggaaagataaaaacctcatttccaacaaaagaaatgtaaattaaagctccagtgtaccatttctcatctatgaaatgaatgaagataaaaacctgagtatacacttggtaagggtgggggaagaaagtgcatttgtgcagtcaaagtgatgtaaatggtacagcccttatttggcagtatctatcacaacataaatgaacattttaatcctgctggaaatggggggaaagggaggatctcttaaagtaaatccactgaaaacggagaccaaaattttacaatagagatatttgattgggaagttaatttgaaaaataacagtagttaaaatattattttatctcatatgcaataacagttgttagagttacaattatgtacacgttttagaaaaaaacaaatccagaggggattttggtttgtcttttgtaaagcattatatggtaacatctgagggcatcttttatacttggcagaggatgttggcagcacttccacagagaggatcattttttgtagaagtatggcatggtttcactgcttgaccaagaggccacctgcatcaattatcatctcccctgctgtcctctgaaatgcttatctaggcatcgatcttggtttcctcttcaactgattaactaactggtctactctgcccagtctctatttgagaaatcatttgacatcattttctttaacttgatgaaatctcctattttgacaagatttacagttcctctttataagttcctctttactttgtgtgtgctttatattgtctttggttgacaagagacagccaaagaggtcagtcagcagagatacaagtagggataagatggatagggagaaacaacagtgttcaatagggagggatgtttcagggaaactaatttcataagtggtcatttcagtagtgaatatatttgaatggttaatggctgctgttttttagctgccctacatatccatcaacagaggatctgttccataaatcatggcacaatgaaactctgcagctgttaatgaaaaggagatttgctagatgtcttaatacagatccatctccagaacataccagtgtcttccttttaagtggtgcacactggggctgaacacttactaagaaatgaaagggctccccagtcaaagctgacaggtgtcattacaacatgacccctgtggtagatcccagcacaatacactggccatcactccattctcttcaaatgtcctagggttgcttcatacagcagaccatcgtacccaaagccactatgcatatgacttggttatctcctgccaggctgtagtccagttagtgctcccttggaaatactcaagaccttaatgaactatctatctgtgaatctgtgaagctacccatttcttagaggcctctttggagagctggctgttgaatacccagtatgatggtccttagccttcttagacctttcctgtaccactacctctatgccttttgccaagtccaagtgttcaccagaaatggaactgatgccagaaagactacagctaacaatctgagcagaacagtgagcatgtcctatctgggaaaagcccagcccattgggctaaatctctagctgaacacagagactatgctccttccaattatactggaagcccaaccatgagaaaacagcacttcaactacactgttcagagccatcacctgttcacacgtgtgtctgtatacatgtaaacacacattttgcaataaaaatgcttctcagatgtactgcaccataataaatcagcattgtatgtacagctcaaaaagaagtatggcatacctatggaagaagtcaaaggcaaagtgtagaaaaatacatacagtatgctaccatttgtataaaaaggagccgtatctactaagtacatgcacacacagacacacgtatatttgtttatataaaatacgtctggaaagatgcaataggaaagtgttgagtggtaacctttagggaaggaaacttgggaattagggttgggtggggagagtgttatttttcaccccttttgtactctgaattggttttaccatgtgtgtaaagactgttgtatgatttttgtagcacaacccttgaatacataaagcacgattggctccccagaaggcaggtgttggccaggcagtggatgcacggtagggcagtgtgcagccctgcatgcacgtggctggtatgccctgcgggcagcagctccccgcacacagtgctgtgagtctctggttcatgtcactctgtggagcaggggctgctccagcacaaagaggtttttgacagggaaaggcagagccagagtcagggcaggccctgggcgggctcctagagagcccaaccaccctctaataaggggtgctctccaccctatctgaggagcaattgggatctcctaggaagtgaaactgttacgtatgtcttattacagaatttccagtggagtgattctggaagaaatgtgtatggcatgttgtgactgctatgtctcatgaaatatttacgtttttatgtaacttttttccattttcagatcatcttttattttaacgcaaaatgacaatatatttttcaattaatttgcccaatatctgtgtttaaatgttttctaatgcacacacgtgttttaaactcattaaaaaaatatgacttagatcccatcccactttcatgttttatattgccaaaactctgcttttgggagaggtgagttatcttcacttctgaaacagtactgcttgggagctggtttggccctggctattctggggaaatgacacaatattgacctagaggggccctaatctttccccgctagagcactacctctaatagggtgaaggatgggagaaagaggctagtgaacccaccttcaggtctgtccactcaggacatgcccacactagcctctccaggggctctgcccttggcatccccgtcccccacctgggctctggcagagaagtcaggcgggaagaagccggctgagtgcccgccactgtaagaggaaacgaagagaaacagctccagtcagccccagaagcgaggcctggaaaaactctgcagctggagctaacacaaaggacttttcagaccctgcagccaaggtgcccagtgagcttttttttttttttttttttttttttttaaaaaacagctattagggtgacaagcctttccaaaggccagcagttggcgagagtttccaggaagctggtctggcactgggctgggattggagcaactttaacgagttaagttcagaaggaaggagtcatcaggaaaggtttaaggttcaacaaacttttcaaattattttgcaaaaagttctggctttccaattcaaaggcatgtttcgctgtgactgttttaagccagagcctatttaaaaggcaacacaactagcatgcttcagattcactcactcgaggtatttgtctaaatcctccgaatgggctttgcaagtgccatctagtgcctagtaacactggggccatcttacacatctcgacaggcagccctcctccccacgtgcctccccccagcctctgtggtcgtgtgcgcgcgggcgcgcacacacacacgcacgcatgcaccttccctaagcaggaagctgctctttgccaagagcgaatggaattcagatttccagagggtgtccttggcctccagctctacggctgcatgatgaagaaaggtcctagtgtgtgtgccgggggctgggagagaggggcctccagctctgctcacatctatctgggccccaagaaaaacccacaactggctgtgctctccccagccacacccagccttggtcacattccttcccttcctgagcccacactgggtggccccggcaaaccagcttccacacctccctccccaccggcagggagacctagcccaagcccccatggggcagccagcaagtacaaatgaggggctgcaccccaggcccaaagagccagaaagcacggagggccctccccccaccccacccccaatgctgggcatccccttgtggctgctgtcactcatggggaaagagacacactcccttgtctagcacccggtgagctgagctcccatcccttcctgtgcctgctttcaggaagtccctcttcatatccaaccttgactctcctggctgtggtgcttgtgggcctgggattgaagggccatcactgccctttgcaccagagcttcccaacataccagcaagaagggactgtaccccttcccctgtccagtctgggccttccaagccctgagattcagcaacctcaggaattaaacatttataggaaaacacctatgcagacaagggacatgagtcagggtggtcatcagcagtagcaaggtgggtaggctggtcacgtttagcttctctttagcccaagtaatagggtcttccacctgcatggccagggaggggataggctgagagcaatctttctacaggctgtcagcatcaacaagtggttgtgatgagcaggagtctgtatggcttttcaggtgttccggctcaaggaggcccaacaccaagttggaacctccaggcctggtgcctaggcagaaggtgggctaaacaaaggccaaggggagctctgctctgtcacttccctttgtttgctaatgagactgtttccaaaagctggcctggtagcctgtgggattgtttctctcaagatttcttctaggggagaaggtggctgaggctttgcagtctgcatcacccagtccccagaatctacaggggactcagcttgcctagtcacagttcggcttttggccttggctccagggcccattctgatcctcgtgcttgggtcagggatggtcagcacccctgccctgatgctgcctgctggggtctcctgctgagtaccgtgaaggcctactgtggcctgagaagccaacttcactgtcccttttggccagccctagaccctatatttgttcaagtaacacattgattcactggcttctcctttaggcaaggcctgcaggggactcagctggggttcatgattccttgccacctgtggtgggcctgcatggccagcccaaggcctcaagtgccacatactgctcccctgacagtcaggtggctagggtatgacactcaagaaaatgcccaggcagaacccagagttggggtcacttggtccagcccttctgaaggggactggttggatctgttgcggggaggagacaggccatgctggaccagcaaaaaagcatagaacttggagtctggaacctgacatctggccttggctctgccatcagctggctgtgtccactgggcaaggtcctatcatatctggtctcagtgcttccatttacccagagtccttccatcacctgacacctacagggatgctttcccaatcaaaattcaggccatgtggtttgataaggccaccttccaatgtggaagacaggctggtaatggagaggcctgggagcacagagctcctaggcactgccatggaatgtggggaccttagggaaggatatctcaattgaagctcttcagagcccctggggtggactgttctgtactctcatcccctaacccataccagcctgagctcaatcatatcagcctgtgaaggctgccccaccacactgcttctgcacccaccacaccaggcccccttgagctcccacctggagcccacacacccagctggtggggttcgtggggcagttcaaaaagaaaagcagaaaaaagcatttgagtattttggactggaaggaattcaatttaacttaacaaatcaggacatgaacctaaagaaaacactgaaaaacaagcccaactttgaaaggcccaaagagggaggattaggtgggagaagaaaggtcccctgtgggcagaagacagctgctcagtccagaccagggaccaggggaggatactgggcttgagtgcagaccgggccagggtagggagacaagcccaacatacactcgaggacttgaagtcaggggtgctagctgactttttagcccactctttctaccccagatacagagactagctgcctgaggaagcatagcggggcccacaggctggctgcctggtgctgcccacctcctctccagggcttggctccctggggcagaaggctcagacctataaccacagtggggttgcagggatttatttgggggaagaaccctgactgggtcagaatgattatgtgcatgcatgtatgtgtatgtagctccttgttctctgaaaagccttgcctaccaccctacttcccaagtaccctctattgccttgcaaagtcacccctgctctctgcctcagtttccccagcagggcaccacaggacactgctgtggcaaggtttatacttagggtgcagtgcagtctgatcttgtataaatgctcagtgccaaagacttaggagataagtcaggcagagtcaaaattaacctttgaaaaatcccttgaattggccctaaaaataatccctttctcagatctttgtgtatatcccctgctgggttgctcttctgcctgctaaagtgggagaatctctgggtgcacatccagagtaccctgggagaggcatgccaggtgttcctgtacctttttcaggatattcccagtgtcatcttcagagggagcctctgaggctgcagccacacatgggaaaagattacttatggagaagatcagaggctaaggggctggggatggtggggacatcggattttgaggtcagacctggactcctgtctacctctgtctctctaccttttatttttctttccttttctcctaacaaggccctatttctaagatggcacctcaggcctcccatgggaccaaccaggcctgacagactaactgctcagactaactgccagacttcctcctgctagccagtcactaccaaggatgtgtgcctcagatacagcccctgcccaggacacctacgttgtccctaacagggcccacatatctaaagcatgaatgcctagccaggggctctggggcaccataagaaggcatgaagctgggcctgccaatttgcatcctgggagggcaggtcagccttgtccaggcaatccaggaggcttcccagtggcccactggccagtgaggacctttgacctccttggctggtggcaccaggtttatgatgcacatagaggctgaacttgaagaattcttattgcagagggcagccacaagagccactggccagtgcccagataatatctgcagactgttccctcctgctccatgggccacagaatccctttgtcttgttactgctacactgccttcctaccaatcttcagggttcatcctggcctctgccatgcatatccaggctcccccagagattgtgtgtctgggaatgagccctggcttctgctcctatctcccagtgatactggcaagtccctatccttcttgaggcttcaatttccccttctgtgagctgggaggacaggcccactagatgctctctgagggacctaccaaggatgtgggctgtgtgtctcagccaacagcagtatctcctaaccccaacacaagaaatacacatagtaggtgtctggttaatgctcttggaatttcagcctatactaaccatctgaaagccactgagtctgaactctgctaccatatttgagattatctctccattgggcacctatgggttgcctagagacaagctaccatggtcctcttccctcgcccgtcatgtgcagggtcaaaggcaggtgagctacacagctcgccctgctcttcactctgctttaatgtgggtgcttgccttggcagatgggcccgacagtgataagaacaaatgacagatgcatactggggcacctgtgactgccatgagacacagtccactgattctgcctccaaccccctccccagagcagaatagtgagtgctaggtttccgcctgtacctccacgggaccccaacagctcctgaaccccattccgagatttgaggttgtgacttggggacctctagacttcccttccctccacctgactccagactgtcctggagcttgggactctcaggcctctaggcacatcttattaaggacagcagctgacagccatatgttgtgaccccatttgtatcccatggtaactcatgacctggcagtctcaaaagctctcaggccaaataaggaatgtccccacaggatctcccatcacaaagagacattctatgctggctaatattttcaggcatttccccgagtcaggtatgtggctggatgcctaacaccatctcctcaaggccttacactaatactgtgagatatactcccaatgtatacaagaggaaactgaggctgatagagattaggtgactgccccagtgtcctgtgggcaggatgaaatgacccaagctggccagggctccctgacagaccttgtccctggattcagcgaacatacatcaaaccattagctgacaaggaatgaatctgacaagctgttcatgaccaccacactgaaaactacagggcaaggtaaaagatatgaaagtcaacctaaataaacaagggacacatgatgccatgtttcaggagccccaaaactataaggatacccattctcccatgcccatctagaggctgctgcgcctagaggaggctttccatggcaactggcatatgtatggtgaggagaaaccctgcaaagacagcaaagccagtgatggggaaggagaagcagccagagccagcaggaccagctgtcaaaacctgttagcaaactacagtgagaaggaagcaaggtcctggccacaaagaacaacttgaatctgaccagtggcacccaatagggtccagaaacagagccacacgtagccagtgagctgattgtaaagacactgatacggcagggtagttgggagaggacgggccttcccatgccgggtgctgagctagactggatatccaagtaggggaagagtggaccttgacctcggcctcacattggacacaaaaatcaatcccagatggagtgcagatctacatgggaaaggtgagctaataaagctttagaataaaccagaatatctttatgaccttggagtagtcaaagtttcttaaataggacacaaacagccctatccagagaggaaatgtttgattaactggaccacatgaaaattaagaccttctgttcatcaaaagacaccatcaagagaggaagaaggcagcctgcagagggggaggcgatatttgcaatgtgtgtgtctgtgagagagtgtgagtgtgtgtatctctctctctgacaaatgactccagaatatctaaagatatataggaccataaataaacataaaacaggcagaagatgtaggcaatttatacagaatgatgtatctgactaaatgataacatggaaagggactcaacttcattagtcaacaggttactgcaaattaaaatcaccatttgatgctgctagacattcaccatcatggctgaaaaggaaacgacggaaaatgccaagtgttaggatgtggagcagccagaatgctgcctgtgggaatgaaaattggaatgactcctttggtagactgctgggtagtattcactaagagtaaacatatgcccacccaggaccctgcagctccacacataggcatatattccccagaaacgcaacctgatgctcaccaaaagcatgtacagaatattcttaaacagcaacctacaccagaaactgcctgctggccacaggtggtagaatggatgaatgatgtaggccatgcacacaatggagcaccagtcagcaaggagcatgagggagcactctcccttcagccccatagagaggctgccagacatcaaattgagtgagggacattggacacaaaggtgtatgagttgcatcattcccaccgcataaagttcaaatgtgggcaaagctggtccttgctgctagcagttaggcctgtggttaatctcaaggtcagtgacaggaaatgggagcctgagaggctttctgggggttctgttgcttcctccgggtgctgcacacatgggtcccagggactgaagatgcctcaagctgcgcacttgagacctgtgtactaatctgtgtgcatgcacattaccctttaactaaaagtttaacaccaccaccctataccagggtagcccaggtgagcctaattaggtggatagccctggccttcagggccgctaggcccagccccatcccactccctcacttaaggggacacggcttccagacttcctgactaggtcacctccgtgcttcagcctccagaggctctgcagttcaatctcccctttcaggtatcagcagagcacacaagagatctatatgggatgtgccccccgcccaaccccgccccgaccccctgccccaactgccagaagtgtctccatgacaatatcagtgcagttgtgaagtcctttgccctccagccacctctgtggcgtgaatgttctctctgtcacatcctccaacaccatctgcttggctgaggacctgagcagcatcatggctgggagttcacaagtggagagggctgagcctggccagagtgcactggggcagggtgatttggatggcctttcccttgcagaggaaatgagaagcctcactgctttcttctgggccatccacctagacagtgcggccctctccccatagcagcagccctaggccagccgcttcttcctcacgtgctcagacggaggaagtgaagtttggaaaggttagggggccacggggggccgccacagctgggctgatggcaggctggaagccagattgagggcatctgattcccaatcccatctctttcccactgagccattacgcctcggttttaatttaattagaagaacatttaatccccccgtgcatttcagagacgggtttgagcctggctggggctatgtggggctctgacggggatcctatgactcatgcagccctgtacagccctcccgggcgggcccccagagggcttccttggcatctcgtgcagacagaggtggtctggagctttgcagaagacaggacactggtctagaaagacaaaatggtctcatctgttcttgacaagcccctcactcatccttctggacactggttcccagaatgtcctttctgtcctttcccaccaaagtttacagggagagaaatatggtgaggagcttagacactcacagagctgcagtgcctggtaccctggggtctgtgggagtaggtcacagtggacctggatgtctccaaaatgtcccaggccaagctggtcccatcaaaagagctagccccttggtccatgaagccaaatttggggccacccttgtgacgtttgcccttatttccagacagcacagactggccctgtccttgctgacaaatgcagaattcaggagacattagtagtgatgtggatgaaagccaggccacagcggccttgctggaaaagagcaactcgaatgtcttggcgtgagattctgcagggtccaggagaaagttgaagacatggaaattctaattaacgcacacggggctgtttttgctcaaggatttgcgaagctgtcatgtcacaagaggccaggcaagcacatgcttgccagggaggtgctcacagtcacctggtgggggtctctgcagctttccctctgccttctttccaccccctctgcccagcctcgggggtcctggtcctcccccatgcccatctcaatgggccgggtgctccctgagtgtccctctggagagtgggactgagggcggtatctgttaacctcgagctggggcttgcccatctaagatgccaaaacagaagagacaggggcccttcagagaaaccacatgactgggctgggcagagccataggctgcagggcttatgggcctgtcctcttgggccgtctatctcaggtatccatgtgcaaccaatggggcagacgtgtgaattccaggccagtcctggctggcttggcagttggggatgcagtgtgagggaggatttcacaaaaatgatttcagcctcccagggttgcttggagaagctcacccaggccacacctgcacacagcccccaagttcagagccgcagatcctcaggcccctagccctgtgcctcagcactggcacaatgtgtctgcagtccttgcttcatcttaggcagggttgagtgagcagcaatcctagggcttctccatgcctggggctttgggggttctggggaggaagagaccaagagggctatacatgcccttctccctcctggcaccattcgaaaggcttagggaactggtactgagggctttgagagccaaaggaggacacagccgtacagcctaagtgtgtcctggggggtttactgagcagacgttggaaagatgaatggaaatctggtggctgcagatgggtgacaagggcattctagatggcaggttaccacacgcaaggcacagggatgcacacaggcatggcaccgtccccacccactgtcgtgccagtgacccttggtgagcagaggatagtgagtgggtcagaatcccaggaactcatcctggctcttggggtacagggctcctcttgtcatgggggtgctccccaactgcccatgcaggcctacagtctctacttcccacctttctctcagaagccctgtcatatggttctgggtgggagacacaggctcagggagtttgaggctggcagggactctcttgtgccccattcaacctaggaagacagcttctgcctgaaaggtgtgttcgaggctgagtcctggccgcccagagctggttgagggtcctgaggctgagcagtagggcccacctataggctggggtgcagcgacgccactctttatctcctgggtaccccgtgcctcagcttgtcatgactccctagcttgcatcaggcctgctcaccccccaccccacctctggctaacaggccccggaaagaggagcttcgcccagccccagggaccttcccgtaatcaaggctatagtgacctcacctctctggggccctgcgggcggggagagctcgagatggaaacaaaatgtgtctttatttatgtttttaatttgaattctggaactggcccagcatggtaatacatttaacatcagtagaatgctgaagaaaaatggaaatgttttttggtaactgcctcccacccactctgccccctgtgagaccccagcacacatccctgtccctcacacacaccagggcgtgtgcctctcttcccagttcagggtccatggggccaggctgcccacaggagcttcgctgcatccctgagcagctggagccgaatttaattatgggcatcactgggcgggctgtgcaggaggtggaggaatgcagccccaatgcgggcagaagacctgcacggcccccacacccctgccgccaggcggtttgggccctgaggaaacagggtgcccactgctgccagccttctcccccagatggagtggggcctctacccagcctgtatcccagaggagcctgggttcctaggccctgacactgtacgtgcccactctccccttcaggcctctctggagggaccgtaccctgacttctgaggatgcaggaacccagctcccctgaagcctcagccctgagtcttccctgaccagaacacaatgcctcaaggtggcccctttgcagcaacctccttgtttttccctctcccagtcccctcttcagatccctcaccccaagccccatgcctgggctccttcctgccttcccaggctggctcatatctagcagccacttttggaacagcctgctctgagagaggccttggtaagttacagggcagggacctggttgggtaatgactggagtctctgacctgcctgggcccacttatcactggaggccatgggagtgccaacctgaaaaggctgcaggatcttgcagaatggtaatgtgccagacccaaagtgggcagagagcttggggatggatgttcaggtctctcaggccctgtcatcctggagtggaacaagaaacagcccagtgtcctagatgacacagccacactggcttggggtcacccttgggcaggtgggtaacctctggctccagggagcttggcatgtgctgataccagcactggcagccctcacccccatagtggtgatttactgggcagctgcaagtttggctgtgatccacataagtgcctggtctctcaccaccttcacctgcaggggccttgcaagacccaagagttggtaaggcctggctgcccagctagatggactgtgggtgatggccctctcctcccagtaggactttttgcatgtctggatgctggtccgtgaccaagagaaccaaggtgagcgagagctccaacaggagaagcaagcagccagaaggatgagaagggacagtcccctctctgaggggacagccaagaggcaatacaggcactgccacctgtattgcacacaacatgagccactaaactaacactgatcactttggaggtccatcatatccaggacttggtacaggccttggccacagtgtaagccatcattctgccttctggtgctgacctgtacctgggcagcccatctggctaccagcctgctcacacctctgctcctgcctttttacccagccaggaggggcccagaagctcagagccctattctcagggtgtccatgactagtcacccctgctttccagtgatctgctggctcccttggagcctcttcacaccctacccaccatgaggtactgccaacctctctgtgaactgggggggcctggaaagacagtgggcaggtcctgtctgatcataattaccccttaagatagccactccttccctggaggtggcctcattctggctacccaaccctgccagttctctggttacacctgcagcccccagcaccatgggtcccgatttcctcagtgatttgcaaggccaggccttgcacctggctggctgcaaaggcaggaggcccagggcctcactacgacaaagacacacatggctcaggacaacctcctgacccccagagagtccaaagaacaaaacaccctttagaaaaatgttggtagagagaaggagagtttccacaagtgaccctcagaagggccgcgagtgtcactcacagatcttgacacaaagacatttatcaaggggaatccccaacgggttagcagccagaatgggactgtggccagaatggacttgggtgccccactgaccccgctgcacggctgtcaccgctgggcaccccagcggggagtcacatgtcgcaggggaatcacaccgtggccgggcaccggggattggcctggccatgccgtgacggcgggggaggacgggcatgcatcccaggccagctgtgcctcaggggaaggccaactggaaggcgtggaaaatcagccatttcctccacctgaaggagcccctgaggacagcagcagcaactggcagactgcacccggcatctgccccatggctttggccagggttccatggggaaatgctaaaaaacaaagtcgtctcttttttggggggcaggggagggggctgggggagagaaaaacaatctcagactctcaaagcatgaaaacaagtggaaaatgatcagtctggttttccataagtcaaaacaagaggatcatgttcccaggctcagtgggaagtgcccttgctctcctctcttgcctggtgcctccgtgttggggccaggcagacggcaagtggtgggcactaggcgagtagatagcactctggccagagagcaaggcttccccagcaccaagtctgactccttgagctccagtcccctccagcccagcccttcacgcacatgtaggcactcactgtgagatgtgggtgatgggtgtcagcagagtctccccttccaggtccaggtcctcggcgaagctgttggttctcatgaaatggggcatgctcacttccagcagtgttgggctcttccttactgaggagaaagtgtggggacagcacgttaggcctcccacccaacctgccagtgctgtggagccaggcctgtgagctcccagggccaggtgaggagtggagcttgtgcctggaagctccagccctgacaatcagttttatagttgggtgttggggtgggtgggtgtttaagatggccccaaagtgcctgacacctcagtgtctgaggagaataaaggccagtgaatcatcttcggagtggtaactgtgcctggggctgtgctcaggtgtccaagactctccccacctcaggttctgggcctcttcccatgttcacaactgacacttgggtcaagaataaaacagaggtgacaggcacaggcctggtaagggacaacagctcccaccaccatacattgtcacactcatacattgacagagtagtgggtcaggaaagatggggtgataggacctctgacccatgaggaatggcaagcctgggaggtgggggcagccacagaactccttcctcaaaacacgatgctacatcaaccagttgtacccccaatgaggcacaggagtccctccaacagctggcttcacattatgattcctgggcccacctctgcaactttgacacaggagctcaggatactgatccttatcactccccactctctgttgacactatcagtatttgctcttggcttatatttgtcttcatttaaatattttattgcaaaaggattaagtactcatctgtgagaagtggaataattcaaagattcacaatggctttcctcccccaaggtcatcagtgttaactgccaactagatccctagcccaccctctctgctcatccgagcagcagatgccaggtgggagttgcttttatgcacatgggatgtcactgtgactctgttcctgtcactctgtaacataagctcatttcatttttctctaggtatataggcatggatttaattattttagtcattacataatagtccacagtttagattggccacagctaaccattctgtatatcatggacattcaggctcttatagttttaagctgcttaattattcagactatgatgccatattcatctttattcttaaaagctgacatactggagcagggtgagagggtgtgtccttagtaattttaataaatgttgctagattgctttcccaagaagttgtagcaattcaggctcccccagctttcccacatccatgcctgaatgaagtgttgaatgaagcccgaatgaaggttgtcagcaccttttgcagggactatcaagcatggatgaaaactgaggcattgctgttatttccatctgtgttgaataccttttatgggcttggcatctgtttgggtttcctcttgcagaattgcctgttcatgtcctttgctcacttttgcttatcactttgtaggaattttctatacattacagacattaactccttgttatatgaggcatagatagcttccccagtctgttttttcacctgaattatgttgcttttatcctagaaaatgttttatgtttttaaagtgatacatcttttgctttataaaaaaggaaggttttcccacatcagcgtaatacaattctctcttaaatttattcctaatttcactatttgaatgtgttgtatgtatacatatgtatgtgtgtaaaagttttaatgcatttagtatctatgcctgataggacagatgatcaacaattagaaaatgaaaatttaaagggtactacatacaaacttactgaaaaaaaatctaaaataaaacataaaaccataaaatatcttgaagaaaacataagagaaaatctccaggaccttggatttggcagtgaattctgaaatacgaaaccaaaagtttaactcgtaagagaaaaagaatcaacaaattggactttatcaaaattaaaagcttttgctgtgcaacagacactgctaatggaatgaaaagacaaagcacagacttggaaagaatatttgcatatcacctatcaggtcaaggacttgcactcagaatatataaagaatgcttacaacttgacaataaagtgaacaatccaattttaaaaatggattataaataagcacatgaaaagatacataattaacataaatatggaaatgcaaattagaatcacaatgaaattccataaattaaaaaaaaaattcaaaacctgacaataccaaccactcttgaggatgtggaacatgtagaactctcatatgttactggtgggaatgcaaaatggcacagtgactttaggaaatagtttagcaatttcttattaagttaaacatacacataccacatgacctatcggttcctttcccacccaagtgaattgaatttttatgttcgcaaaaacctgtacataaatgtgtatagtaactctgctcataattaccaaatactggaaacaatgaagatgtccttcaacaggtgaatgcataaacaaaatgtatatattcatgcaatggaataccacccagcaataaaaagaaattaactaatgatttatgcaacaacatggatgaatctcaaatgcattttgctaagcagtgaaagaagccagatgcaaaagaatacatattataggatcccatttataggacattctagaaaaacaaaactacagggacataaaacagatcaatagctgccagtggttaggggagaagtacttgacttcaaaagactcaccccagggtatttttaggggtatggaacttctgtgaatgatactggattgtggacacatgactccagacatctgtcaaaacccacagaactgaatctcaaagagtggattttactgtatgcaaatttaaaaaattaacccggatgttggaggaccctacgatgaaaagcagactatgatgagcgtgttacaaacaaatgacatagcagtgaaaggaaaggaggaggaggagctggcatatgttgctttcaaaaacactgttttgactggacactctatggttaaagcaaaagtctgtcctaaacactctaatctagtaggtaaatttgcttcacatagggtactacgtgtacaatagggttacacaaataagtaaatgaactgtaggtaatgggagccaggtttctagctgtcagagaaaaagctataaataagttgtgggggagggggcaaggatgaactctggtcagaaatgtcagtatgaactcatggttagctttatatagatacagatatgtaaagatgtatgtgtactcaggttacatacatacatatatttcctagctctgtccactgagaggagactgaagcaatgataccctagtagccacgagcataccccgtgcctagatccaggttttctattcattctccagggagccagggctctctggatgaatggatgattctagggctagggtagggaaaataaaagatgagcctgaagtattgtcaagtgctagaaaagaaatgcttaaaaataaatgaaaaggatggcggggggcacatcaaaaggacacatgaacccaccagtggccacagcttgaacaatttgagcaacaaaataaataatattggactataactcaaaaaataaatactcccaaatccacactgataaaattaaataaacaattggaggagagggacaaatcttccttataaaggaattccaaataaaaaatgtagaaggaatgaggaaaatagaagtacatcacggtaatatttgctgcaggaaaacgatccatgaatgaatgctgaaattagttagtgaaactcagaaacttcacagtttcttccttgaaatgtattttaattgctgtggtagttttaacatatttgcagattttttttgatactctcctgcaggaggtagagttgaacccctcccttccccaccttgagtgtgggctatacttagtgactcgcttctaaagactaagctatggaaagggaaaaacagctattcacttacagtggaggagcctggccgacaccactttaaacgagtggctcaaggttaatattaccagtgataaaccatgttgatgtcatgttccacaatgaggaaagcatctcacctcactggcctccttcccctaaacctataaccctggtctagtcctgagaaaacaccagacaaatccaaactgagggacaatgacacctgactggtattcttcaaaagtgtcaagttaatgaagaacaagactgagaagcccgtcaccgatcagagatgacaataaatgtaatgatcgatcctagatgggatcttggaacagaaaaaggacattagtagttaaactggggaaatccaaataaatttataactctagcttaatagtgtaccaatgttaattttttagttttggtcaatgtaccatggttatataagatgctaacattaggggaagctggtgaaagggatgtgggtactcggtactatttttgtttctcttctgtaaataaaaaatgtgaggtaacaagagaaaacagaacctgtatacaatagcacaaaagaatattaattatctaactaagtatatgcaagaactctggagaaaattgtaaaactttagtaagagacaatgaagaagatataaatggagaaatatgccttcattccaatgactagaagactcaatactgaaaagattatctcaaaatctgaataaatctctccaaatcttaataaaaatctcaaggcttctgtgtgagaactttggcaagctgattctaactgcgacttggaagtgcaaaaagccaagaattggcaatattcttgaagaagaacaaggtgggagaacttgctgtaccaaacatcagtacttcttccaaggcagtggtcattagggcaatgtggtattgacacagggagagacaaataggccaatgggacaggattgagcattgggaaacagcccacacaaatatggaagcttgctgtgtatcagaggtggcctgcacatcctgggaagagcatggacttttcaatcaaatgttcaggagcagttggatacccacactggaaaaacattaagttggacccttaattacctcacatcatataccaaaaattcattcttgtcattctaggggattgaagacctaactatgaaaagcataactataaaggtcacatgactgaatatagaagaatatcttaatgacatcagcattaggatggttttttttaaaagaagcaataaccatgagagagaagactgagtaatttgacattagagttaagacccaatcatcaaaatacaccttaaagagtgaaaagacagtgcccacaaaatgcaaaggactcctacaaatcaataggaaaaatataaatgacttaatagaaaatgggcaatagacaaagtagcacatcacaaaagaggaatccaaaaggctgatgagcatgtggaaaggtgttgcgcctgactagcaatcagggaaatgtaaataaactcaggagctcatggcccgtgggggcgagtggcagacttccagcaggaaaccacacagacattacttagtcacagccaggagaagggctcagagtgaaagggctctgtgcccatgacatccttagagagaccagggaaggacctgtaaggcttgaagaatgtgcagatttggagacccacaggtctgggacctggcagaagcatgttactgcccccattttagagatttggggctgagattcaagtaccctaggttatataatgcagttgtcaagtgacagagctaaaacttcatccaggattcaattttttttaaaggaaggaagaaagaaaaaacatattttgatgtttgcatcacttgtatgtagaaggaacgatggagcacaggctagaacgtagagttgctttccaaacacccatgatgacaagtgcccatctccaaagcctgagggccaagggtgagccacctgacccctgaggaaggttctgtcctggtgttttaggaaattaaaatgtgcacatcagttggctgcccagagtgggtgggacctgcacctgccagagaggaatgtgtgctttttggtttaatcctgggaacggcatatggggcccctataacaaggggcagagaaggcctccacagatttgtttttccaattcaagaggagaggttattgtctgctggcttgtgtgttggagactgtggggcgtgctttctccaccacagggaggcagtgaccagagctgccacctcttccctgttttcacctgtggtcgtagccaggtcaggcatctaggagagcatggaggggagctgggggtgggtgggtggggattcagctctttccagacacactggtgctgcctctttcaggccagggcttgagggcaagtgctgtgccctaacaggtcttgcttgtcacccccacctctgaagtgggtatttcacagcctgaactcacagctgcagagaaggttgagcccatggtgtacttgaaagggcagttcatctggatatccaggctctgcaggaggtaccggagcaatgccaggtgccctttgctgaactgcctagagtggctggccctggggacaaagagcacagcatcctggtgacaatgaagtcacactttcctaagacagtcctggtttttgatgctttaattctttggctgcctttgctttgtcaaggccaggatctgggcctaaattttcagggcagaacaaaacaattttgttttctaggaaagtgggaggtctgggatggcaaaggcagcctcgggcgtggcgactaccccagctggggacgctggctgccaagtctcaccctctcaagagaacaggaatcaaactcagcacagcatcctcctttctagtcagtggtcctgctcgatagggggatttgaattttatttttttaaaaatacaggcacagaaaaaagactagaaggaaacagatccaaatgttaactttgtctttgggtgattttcatttccttccttattgtgtctgtgttttctattttgcatgatacttttccaagtcaagaaacaataatttgtggaagtctcctgtatctgtgccttgctctctggcccacgaccttgcacatcttatcctagagttgccagaatatgtccctccacctggcctggagctgcccatgaggctacatagagctctcctatcatgaaagtctttgaggctttctgttcccaagaaattctggtctcacttcctctgccttctcatcgagccccagacccctccctgcccagattaggtcagcattcaagccccaagtccagcctatgacaaagctcaaagctccagcccatctctgctgccctctgccctcaagagactctcgccagtgtctgggcccttcctagtaacttcacccaaccactcaccccctgcccttcccctcctgattgattaaaatccggcctaatctcccaggtgtaacccaagccctcttccacaagctttccagggctccggagattgccccctcccctgtacggctgcagggcttatgtgtgcctggcgctcagcacgggaaccttgccttctgcctcacccatgtctccccagggtttggcacaggcgagttccctgagccagcctacttcacaaggatgaacagaagctctccctatcctttgcaagtagaagccccctccctggccccctcaagaaatctccccctctcagtggattcaccaaagccctgcggatcctgcactgtgaaggagaagccctccccaggggcatccggacagctgcagccaggccctgcgtgacattgctgagccgcagccccacagcctgtgccagctgcccatgcccggctcatagaccctgagccagagtggccccgccaccacctgtgtctccactcagaggcgagaagtaagggacatggatggaaagtgtaaaagccattcccacaacagctgccaggaacaaggcgaggaatggagtgaaaatgtatattcacagctggcacccagttccgcttaggaaaataccttgcttgagtggacacctgttgtttttgcctgccagcagccaggcctggcttctgggaacagcttctcaaatcttccttagggggctcttcctttcccactcctagtgtgcagtgtttaggtaccctctggccatccccaaaggggtccctgtggaccttgcctcagccatcggaggtacagctgcaggtccaaggatggcttgtaccccagctgaggccaataagaacctggccttagattctggcaggaatcctggaagagatgacctcgttctgctgggcttcctgagctgttgaatgcaagctggtggccattttgccccttttagaaagtagctgcctaaggatacagccatcccatggggccaatggatagagagcaagggaaagggagaacaaaagagggaacgggaagggagaaggggagtgcaagaggggagagtgagagcaagtgagcaagatcatctcagctctggggtccagctgtgtctgaaacagctgggtccagctgtgtgagccaaaaaatgtcccttttgtgcttaagcttgtttgagttggggttccatcatttgttaccaagagagtcttcaggaatgtgcatgacaaagttgggggtgaggtgtgagcctacggacatgggcctgggggcagtcaaggttacaaaatagctaaactggtctgcactgcccccactagttttcagggcagagggcagggagaaggcttgtgggaaagaagctggcctgaggccaaggccctggccctagccctgcaacagcacagggaactcttggaaagggatttcctaaggtgggacattggctttctactgctgtgatgcaagtcctcatctccccaaaccttcagtgagcctctctccacaccctgctgtatgaggatgtttgatgcaaattatggaacatgttggatctcacattggatcaaaggtgtgcagaatagatttgcctcaagcatgacagtgatgtgacacagtcaaagatgacttccggaatcctgagaagtcccagggaggatgctgggctttccaaaacctaagtttaggatactgaggaccacaccccacaccccaaacacttctccttagaataagtatagcaagcctcagcatacacaaatctcagagtgaacggaaatgtctctgcaggcccaagggtggggtctgagtagcgggggcgctgaggaagacaggcagtgacagagccaggacagggtcaaccctgagcgtgagtgagcccaggaaacggaaagagagcaacacagccacccacacaactaaaatcgacccacccgggtctccatgctgcaggaagtcactgtctaggtctcccaagacacattttcaggggaaggttccaggcagcaagagcagccctaggaaactttaatatacaatggaatctgggttaagcactatcttctccaagagttgagctcacaggacattccccagaaacctctggagaggtggggaggaaagtttctggaggtctttggatggagaaaacaaaaaagtggccttgattttcaagacaaaattacacaggaagaaaaaaatgtttttaatctaattaagagcgatcttttcaccttcatcacaacatcgcggaaatgtgccagttcttaacttcacacaataatcaaagcaattagtgagggagaagccttggaaaccggtgcagatgttctcagaatgtttaatggggaaatgagttgcaggcctcattctcagcatccggctccaggccctggctaccaaatccagacatctgctggggccccacccccaggccccgagggcgcgggcttgagaaacacaggtcccttcccaggccacctcccagccaggccagaactggggccgagaggctccccatagcttctcaaattggagcctggacacagtcagagccaccccagaactggggggaggctcaacatcaaaattatgttaacaactgatgtcaaaagtaatcaactcagcttggctcccccactgctgctggctgcaggagggctgtgagtaggaggagagcaagcggccccagagggaccctcggctatgaccccctcagcctgaacactacttcaagaaaagatgtggtggcatctgtctggtatggtcctgtgggctccattccaatgctaatggactcttaaggggcccaggaatcaaaatggtcaacacttgaggaatttccagtaatcagagaaaacgtatagaaatgaggatgatgcttacttaggaaatggcctattacaggaaacagagggccacgtggctaatgtcagtgagctgtgggagagacagagaccccaggtggggcaggcagatcagcaaatcttggaggacctgctatgtggcaggcactggagacatggaggtaaagaacacaatatccatgttctcagggacacactcatatgcccttagcattcacgttcttcacactgacagcttcttaatgcaagcccaccagatactttcataagcactacctctgacttcaggcacttgctgagctgcacacagggcaggccaaaaggaatggaaagtgagccaccaccggggcagcactcactagtgaaagataaataccccagctctctcagccgcttgtagaactctgaggagtgttctgtgcagcttcccagctgcccaccatgaagctctttctcaataagtgaccagcacagcttaattcctgaattaagctgtgtgtgctgtgagactgacacaagacagggtgacaggaagctgtcggaacatttgagtagggaagcagcaagatccactgtacatttaaagaactcccttgagctgttatgtgaagaatggagtacaggaagcaagagtggaaatcaagagaccagtaatgaggtatggacaacaatgtaggcagagaaatggtggtggttttaaccagggagatagctggagagactaggtgtgggcaaatccagagagttgataagacatactgatagattagaaaggggtactaagaaaaaaggataatttaaaaaagactttcagccaggcttggagaaaaatagcatgctgctcctcatcccctctgactataaatcatctcactcatcctcccctaaaagcataaaatcagtaagtgcaaataaaaccacatgacccatgctgttagcagtattaggagaaagaataccttcaaattgcctgtgggtagcaaagtgagccaaattccaatagcattctagtcccctgcccagcactgcaaaactgcatacagaatcagagaagaggcttaaaatgctttgtcaaaaagtttgaaggtagttagcaacatcagcaaaaatagaggagtaagtacctctaaggagccttcttgccttcacagacatcctaagcaccaagcagcctaagccactgatgaacttgcagataccactgatgtggattatagtctaattaattgtagagacaccacacttctgcactgaaccagaaccaaagccaaagcaccctacccaaatgatactacagacgcgtgtacaggaaaagtccttactaaggctactccataaaattggaagtctctgttattccagatatgcagatatcaacttggggacacaaaaaacttggggggaaaaaaacaagaaaacatgacttgccaaaagaacacaataattctccaataatagactccaaagtaaaggaaatcttaaggaaacccaatgagatacaagagaacacaaatagacaatacaaacatatcaggaaaacaattcattatctaaatgggaaatccagcagagttagatatgaaaaagaaccaaacaaaaatcctggaggtgataaattaaatgaatgaaataaaaaatacaattgaaagcttcaaaagccggctaagtcaagcagaagaaataatttctaaatttgaagacaggtgttttgcaataaaccagacagatttaaaaaataacaataaaaaagaatgaagaatgcctgcgtgacatatgagacactattaagctaacaatatttcacattttgggagttccagaagaagtgttgggataaggaccagaaaatctatttaagaagataatacctgaaaactgccaaagtttgggagagaaagagactaacagataaaggaagctcacaaatccctaaatagattcaaccctaaaagggcctctctgaggcacattttcatcaaactgtcaaaaatcaaagagagaatttaaaaaacaagagagaagcatgaagtcacatataagggaatcaacagcagattaacagatttttcagcagaaaccttctaggccaggaaagaattgaatgccatattaaaagtgctgcaaggtggggaaaagctcacaaaattgctagccacaaatactatacccagcaaagctatccttcagaaatgaagcagaatgagggaagaaattttgcctccctcagacaagcaaaaactgagggaattcattactactaaatcagccccacaagaaatgcttaagggagtactacatctggaagtaggaggatgatatctaccatcatgaaactacaaaagcataaaacactagtagagcagatacacaaatgagaaaggaaaaggaataaaagattatcactacagaaaaccaaaaaattgcaaagaaaaacaatgagaggaaacaaaagtatacaaatcagtcagaaaacaataaaatgacaggagtaagtcctcacctattgataacaatcttgaatgtaggtaatttaaatttcccaaatgaaagatagatactggctaaatgaattaaaaaaataaaacccaattacatgctgcctataagaaactgacttcacctgtaaagacacccatagactgtaagggaatggatagaaaaagatattccacacaaacagacaccaaaagcatgcaggagtagacagacaaaaaatactgagtcaaaaaaaaaaaaaaaaaaaaaaagaaaaagaaaaaagagacaaaggaggtcattatataattataaatggatcaattcagcaagaagatataacaattatatatgcaaccaacaacactggagtacccaggtatattaaacaaatattattagtgctaaagagatagaccccaatacaataatagttagggatggcaacatttcatactcagcattggacaattcatttggatggaaaaatatcaacaaggaaatattagatttgaactgctgcttcgttagcacacagcacattctccaggatataccatatgttaggacacaaaacgggtctcaataaatttttaaaagtcaaaatcttatcaagtatcttctcagaccacaatggaataaaactggaaatcaataacaagaggaacttctgaaattgaacagatacacggaaatcaaactacatgttcctgaatgaccactgtgtctatgaagaaattgattttaaaaatttaaaaattctttgaaacaaatgaaaatagaaacacagcatacaaaaatgtatagggtacaacaaaagaagtgctatgagggacatttatttcaataaacacccacatcaataaggtagaaagtttttaaacaaataacctaataaacgcatctcaaggaactagaaaagcaagaacaaatcaaacctaaaattagaaggaaataaatagtaaagatcagagcagatctaaatgaaatagagataaaaggtaaaaaagacaaaagatcaatgaaatgaggcctcccccccaccccccgagacacggtctcactctgtcacccaggctagagcgcagtggtgtgatcttggctcactgtaacctctgcttcctgggctcaagcaatcctcctgcctcagcttctgagtagatgtgcagcaccacacctcgctaatttttttttttttttttggtagagatgggggtttgccatgttgctcaggctggtctcaaactcctggactcaagcgatcggcctgccttggccttccaaagtactgggtttacaggtgtgagccaacaaacccagccaaaaaactgattttttgaaaagagaaaatcaataaaccattagctagactaaccaagaagacccaataaataaaatcagaaatgaaaaaggagacttacaatggacaccacagaaatacaaaagattattagagaccattatgaacaactatatgtcaacaattagaaaacctagaggaaagagataaattcctggacatatataacctcccaagattgaaccaggaagaaaaaaaatctgaacagagcaataacaaggaatgagattgtatcagtaataaagtctcccagtaaagaaaacctcaggattgcacgggttttctactgaattctaccaaacctttaaagaactaacatgaattcttctcagacaattccaaaagactgaagagaaaggaattctccctaactcattctgtgaggcaagcagtatcttgataccaaaaccagataaggacacaataacagcaaaaaagaaaactacaggccaatctccctgatgaacatagatgcagaatcctcagaaacaaaacacacacacagacacacaaactagcaatctgaatccaatcgcacatcaaaaagataatacaccataatcaagtgggatttatcccagggattcaaggatggttcaacatatacaaatcaataaatgtgatacatcacattaacagaaggaaggacaaaaaaatacatgatcatctcaatagatgcagaaaaagcatctgataaaattcaaaatctcttcatgataaaaaaaaaagctcatcacataatgtctagaaggaacataactcaatgaaggtcatatatgacaaacccacagccacctggggaaaagctaaacaccttctctcttagaactagaacaagacaaggatgcccactttcactattcttattcagcagagtaagaaaagtcctcaccagaacaattaggcaagtaaaagaaaaagggtatccaaattggaaaagagaatgtcatattgtcctttgcagatggcataatcttatacatagaaaaacctaaagattccaccaaaatcttttagaactggtaaaggaattcaataaagttgcaggataaaaaaatcaacaaacaaaaattagtaggtgtggacatgatggctcatgcttgtaatttcagcactttgaaaggatgaggcgggtggattgcttgagcccaggagtttgagactgtcctgggcaacatggcaaaacctcatcagtacaaaaatgagctgggcgtggtggcctgcacctgaagttcagctactcaggaggctgagatgggaggatcacttgaacctcggaggtgaaggttgcagtgagcagaaattgcaccattgcaccccagcctgggcaacagagtgagaccctgtctgcactcccctgcctcccccaaaaaatcagtagcatttctgtgaaacagcaaattagccaaaagagaaatgaagaaagcaatcccatttgcaatagctacaaaaaaaagcaaagcttaaccaaggaggtgaaagatttccacaatgaaaactataaaatactgataacagtaattgaagaggctacaaaattttttgagacatcccatgctcatggattgaaagaaaaatgttaaaatgatcatatttacctatagcaatatacagatgctatgaaatccctatccagatatcagcaggggcttcaagatggctgactagaggcatctggcactcacctcctccacaaaatatagcaagtaggtaaccacagtttatatagatcgcctctgagagaatgctggaattcaactgagaagtaataagaaaaacccaatgcaagggataagaggggagtcaggcagtctgcttctatgggactggctgggatcatgaagagactcctcgatgtgcagaaaggtaagtaagtgagcccctagtggtccacattcccacagcagactcctgaaatcctagtcagagaaccccctgacccatagatgccttgagactaacaagaggctacctacagactgtgaaatggcaatgaacagctcccagagagggagatcaccctgaatcctcaggcaattcacacatcccctgaatcctcaggcaacttcaggaaagtcccattttgatagcccaacccccaccagactgcatctgctgtgggccccacatccctctatctcatccctggagccccatggacatcccttacacaaagctggttgccactcctgactgctccctccaggccaaagcatgagccattggcaatactctgctacctccgaagcaaggctgccatgaggaaaggtgaccctgcccatagtcaccacctggggccgaagcatgcattgcccaactgcctgtttatagctgctgccactgaaagcaatcccactcaacttccccaggagtagggctgcaatagagttgctgctgccccaacatgagcattcagcagggtatacagggatcttcctgtgcctgcctaccacagtcagtacattcttgcattactggagggcctcaggacaggcccacctggcctggtcccaccctcttttctcccagtgccagcgcataccatctctgggcctagggatcaccctgccctatccagtattgttggcacctgagcactcctgggggcttgaggactgccctacccaactgaccattaccaccacaactggcattcacttgaatttgccacctgtgggccttgggacaagctcatccagcttatcccagccatcccaataccagcatggacaccttgggaggcagaagattgttctgccactgctactgccattgcccaagccatatctgctgctcagagctcaaggacctacccaccctgtggcccagctctgtcatcattggcacctgagcaagttgcctggaggcccaaaattggtttccctggacttgctaacactggtaccagcatacactaccattgggcccaaggataagcattcggggccagccactgctgccactggggcctgaggactggcccagctggtgtccctatccccagccagactttaccacagcctccaccaacaactgcatcctaaactacagaggaactcccagacactactggtgctgtttacagctgaaaaaaattccatggagatcacactactgcaggcacccagaatcaaaaccaaagtgccctgcccaaagaacaccatagatatatcttcaggaacaagactctcttaggaaagacagatcaaaaaattggaagaaactactgttacaccagatgtgcagataccagtgtaagcacacaagaaacatgaaaaggcaaaacatgacaactcctaaggaatgcaataattctccaacagattccagtgaaaaagaaattgatgaaaccttgaaaaattcaatataatattaaagaagatctgatagactatacaaagaaatcagaaaaaacaattcggggtatgaatgagaaatttgcccaagagatagatataaaaagaaccaaacagatattctggaattgaataatagattgaatgaaataaaaaacatatttgaaagcttcaataacagaccacaacaagcagaagaaagaatttcacaccttgaagataagtcttttgaaatgactcagacaaaaatatagaaaaaatagaaaagaatgaacaaaggctatgtgactataggatgccataaggtgacaccttcagtgtcccagaaggtgaagagcaaaccaaaagattataaaacctatttaatgaaataatacctgaacacttcccaatctcccaagagatttagatccaaatataggaatctcagaaccctaaatagatacaattcagaaaggtcttttccacagcacattatagcaaattgcccatcccaagacaaagagagaatcataaaaccagcgataaaagaggttgtagacacttacaagggaacaacctgcagactaacagatttttcagcagaaactttacaggccaggaggatgggattatatacgcagagtgctgaaagaaaaaacaaaaccaaaaacctgccagccaggaatactgtacttagcaaagttatattcgtcagaaatgaaggagaaataaagtatttcccttaaaagtaaaagctcagggaattaattgccactacactggcactacaaaaaatgcttaagggagtcttacaggaagaagtgaaaggacaacttcatgaaagcacacaaaataatcagaaatcaattaatgacaggaataagccctcacatatcaacaataaccttgcatataaatagattaaactttctacttaaaagacagactggctgaatggacttaaaaacatgacccatctaaatgctatctacaagaaacgcatctcacctgtaaagacacatagttgaaagaaaggaatgggaaaagatattacatgcaaaaggaaacaaaaaccaaacaggagtagctatactttcatcagataaaacaaaggttaagctaaaaacactaaaaagagacgaagtcattatatagtgacagagggatcaattgaccaagaggatataacaattctaaacatatatgcacccaacaccaaagcacccagatatataaggcaaacatcaaatctgaagggaaaggtagacttcaacacaataatcttgggaacttcaattctccatttccagtattagacagatcatctagacaaaaaattaacaaagaaacattggatttaaactgcactttataccaaatggacctaacagacatttacagaccagttcataaaacagctgcagaatatacactcttctcatcagtacatggaacactctccaggatacattatatgttaggacactaagtatgattttaaatatatatatattttaaattggattcatatcacatatcttctcagaccacaatagcataaaactataaataaataagaggagcattcaaaactgtataaataaatggaaattaacatgttcctgaatgaccaatgggtcaaagaagaaattaaggcagaaataaaaaatttactgaaacaagtgaaaatagaagcacaacattctgaaacttaagggatactgcaaaagcaatgctaagaggaaagtttattgtaataaatgcctccattaaaaaaggtagaaaagatcttaaataatctaatgatacacctgaaggaaccagaaaagcaagaacaaaccatactaaacataaaattagtagaaggaaagaaataacgaagatcagagcagaactaaacaagaaactaaataaatataaaggatcaatgaaatgcaaaatcggtttttgaaaagaaacaaaataaccagtggctaaactatccaagaagaaaagagagaagacctacatgaataaaatcaaaaatgaaaaaggggatattacaactcataccatgaaatacaaaaatcaaaactcttcagtctgatcaataaattgattacagttacaggatttaaaaatcaggcttatttctatataccaataaagaaccagctgagaaagaaatcaagaaggcattatcttttacaaccactacaaaaaatctaggaatgagtttaaccaaagaggtgagaaacctctaacaaggaaaactacaaaagtctgatgaaagaaattgaaaagaacacacaaaaaacatcccattctcatggattgggagaattaacaaaattaaaatgaccatactacccaaagcaatctacagattcaatgcagtctctctcaaaataccaatgccatttttcatggaaatagaaaaaatcctaaaattcagatggaaccaaaaaagagctggaatagccacagcaattctgagcaaaaataacaaagttggatgcatcacactgcctgatttaaaaatataaggctatagcattaaaagcagcatggtattggaataaaaactgatagaccaatggaacagagtagaacctggaagtaaatccatgtatttacagccaactgatttttgacaaagatgccaagaacatacactgggaaaagagcaccctcttcacttaatggagctgggaaaataagatatccatgtgaaaaatgaaaccgtttctatctcttgctatactaaaatcaactcaagatgggttaaagacttaaacatgaggcatgaaactataacatcactattaatgaaggagacattggggaaacactttaggacattggtctagggaaagattttatggataagacctcaaaaacacagacaaaaacaaaaatagacaaatgggactatattaaatgataaagcttgtacacaacaagggaaacaatcaccagagtgaagagacagcctgttgaatgggagaaaatatttgcaaactactcatctgacaaggtactaataccagaatatactaggaactccaataactcaatagtaaacaacaaattaattccaataaaaagtgagcaaaagacatggatagatatttctcaaaagaaaacatacaagtagccaacaggtatatttaaaaaaaaaagcccaacatcagtaattataagggaaatgcaagccaaaaccatagtgagaatggctattttaaaaagacaaaaattaaccaatgctggagaggatgtggagggaactcttatacactgttggtgggaatgtaaattaatactatagaaaacagtttgatttctgaaaaacctaaaaagagaaatatgacataatccagcaatctcactactggatatttatctaaaggaaaagatatcagtatactaaaaatgtacctgcatccccgtgtttattgcagcactattcacaacagcaaagatatggactcaggaacctaagtgtacatcagtggataaatggaaaaagaaaatgaggtaaatatatacaatggaatactaattgaccaaagaagaatgaaatcatgtcctttgcagcaacatgaatggagctggaggtcattattttaagccaggcacagaaagataattatcttatgttattatcatatgtgggagctataaaagttgatctcatggaggtagagagtagaaggatagataccaaaggctgtgaaaggtatgtctggagggtgaagagaggttggttagtgggtaaaaatacacagctagttagaataaataatttataatgtttgataagagttggttgactatatttaacaatataatgtatatttcaaaataaaaaagaggacttgaaatgttcctaactatagagatgataaattgagggtgatggataccctgacttgatcattacacattcgatgcatgtaacaatagcacatgtaccccataagtattatgtatcggtcaaaaaaaaaaaaaaaaggaaatcccagtgctttggggggccaaggcagaaggatcgcttgagcccaggaattcaagaccagcctgggcaacaatgcacgaccctgtctctacaaaaaattaagaagttatccaggcatggtggtgcatgcctgtagtcccagctacttgaggggtcaaggatggagaatgacttgagcctgggagttaaagattgcagtaagtggggtggttccaagatggccgaataggaggagctccagtctatagctcccagcgtgagtgacgcagaagatgggtgatttctgcatttccaactgaggtagtgggttcatctcactggggctcgtcaagacagtgggtacaggacagtgggtgcagcccactgagtgtgagacgaagtagggcgaggcatcgcctcacctgggaagcacaaggggtcagggaattccctttcctagccaacggaaggggtgacagacggcacctggaaaactggatcactcccaccctaatactgtgcttttccaatggtcttagcaaacggcacaccaggagattatatcccgcgcctggctcggagggtcccacgcccatggagcctcgctcattgctagcacagcagtctgagatcgaactgcaaggcggcagcgaggctgggggagcctgccattgctgaggcttgagtaggtaaacaaagtggccaggaagctcgaactgggtggagtccaccacagctcaaggaggcctgcctgcctctgtagactccacctctggggacagagcatagccgaacaaaaggcagcagaaacctctgcagacttaaatgtccctgtctcacagctttgaaaagagtagtggttctcccagcacggagtttgagatctaagaatggatagactgcctcctcaagtgggtccctgacccccgagtagcctaactgggaggcactccccagtaggggcagactgacacctcacacggctgggtactcctctgagacgaagcttccagaggaacaatcaggcagcaacatttggtgttcagcagtattcgctgttctgcagcctctgctgctgatacccaggcaaacagggtctggagtggacctccagcaaactccaacagacctgcagctgagggtcctgactgttagaaggaaaactaacaaacagaaaggacatccacaccaaaactccatctatacgtcaccatcatcaaagaccaaaggtagataaaaccacaaagatggggaaaaaacagcagaaaagcagaaaattctaaaactcagagcacctctccccatccaaaggaacgcagccactcgccagcaatggaacaaagctggacggagaatgactttgacaagttgagagaggaaggcttcagacaatcaaacttctccgagctaaaggaggaagttcgaacccaaagcaaagaagctaaaaaccttgaaaaaagattagacgaatggctaactagaataaccagtgtagagaagtccttaaatgacatgatggagcagaaaaccatggcacaagaactacgtgacaaatgcacaagcttcagtagccgatttgatcaactggaagaaaggatatcggtgattgaagatcaaatgaatgaaatgaagtgagaagagaagttcagagaaaaaagagtaaaaacaaacgaacaaagcctccaagaaatatgggactatgtgaaaagaccaaatctacatctgactggtgtacatgaaaatgacagggagaatggaaccaagttggaaaacactcttcaggatattatccaggagaacttccccaacctagcaaggcaggatattatccaggagaacttccccaacctagcaaggcaggccaacattcaaattcaggaaatacagagaatgccacaaagatactcctcaagaagagcaactccaagacacataattgtcagattcaccaaagttgaaatgaaggaaaaaatgttaagggcagccagagagaaaggttgggttacccacaaagggaaacccatcagactaacggcggatctctcagcagaaactctacaagccagaagagagtgggggccaatattcaacattcttaaagaaaagaattttcaacccagaatttcatatccagccaaactaagcttcataagtgaaggagaaataaaatcctttatagacaagcaaatgctgagagatgttataaccaccaggcctgccctacaagagctcctgaaggaagcactaaacatggaaaggaacaattggtaccagccactgcaaaaacatgacaaattgtaaagaccatagatgctaggaagaaactgcatcaactaacgagcaaaataaccagctaacatcataatggatcaaattcacacataacaatattaaccttaaatgtaaataggctaaaggctccaattaaaagacacagactggcaaattggataaagagtcaagacccatcagtgtgctgtattcaggagacccatctcacgtgcagagacacacataggctcaaaataaagggatggaggaagatctaccaagcaaatggaaaataaaaaaaggcaggggttgcaatcctagtctctgataaaacagactttaaaccaataaagatcaaaagagacaaggtcattacataatggtaaagggatcaattcaacaagaagagctaactatcttaaatatatatgcacccaatacaggagcacccagattcataaagcaagtccttagagatctacaaagagacagactcccacacaataataatgggagactttaacaccccactgttaacattagacaaatcaacaagaccggaagttaacaaggatatccaggaattgaactcagctctgcaccaagtggacctaatagacatctacagaacattccaacccaaatcaacagaatatacattcttctcagcatcacatcgcacttattccaaaattgaccacataattggaagtaaagcactcctcagcaaatgtaaaagaacagaaactataacaaactgtctctcagaccacagtgcaatcaaactagaactcaggattaagaaactcactcaaaaccgctcaacgacatggaaactgaaccacctgctcctgaatgactactgggtacataacgaaatgaaggcagagaaataaagatgttctttgaaaccaatgagaacaaagacacaacataccagaatctctgggacacatttaaagcagtgtgtagagggaaatttatagcactaaatgcccacaagagaaagcaggaaaaatctaaaattgatgccctaacatcacaattaaaagaactagagaagcaagagcaaacacattcaaaagctagcagaaggcaagaaataactaagatcagagaagaattgaaggagatagagacacaaaaaacccttcaaaaaatcaatgaatccaggaggtggtttttttgaaaagatcaacaaaattgataggcctctagcaagactaataaagaagagagaagaatcaaatagatgcaataaaaaatgataaaggggatatcaccaccgatcccacagaaatacaaactaccatcagagaatactataaacacctctatgcaaataaactagaaaatctagaagaaatggataaattcctggagacatacacccttccaagactaaaccaggaagaagttgaatccctgaaaagaccaataacaggctctgaaatttaggcaataattaatagtctaccaaccaaaaaaagtccaggaccagacggattcacagccgaattctaccagaggtacaaggaggagctggtactatgccttctgaaactattccaaacaatagaaaaagagggaatcctccctaactcattttatgaggccagcatcatcctgataccaaagcctggcagagacacaacaaaaaaagagaattttagaccaatatccctgatgaacattgatgcaaaaatcctcaataaaatactggcaaaccgaatccagcagcacatcaaaaagcttatccaccatgatcaagtgggcttcatccctgggatgcaaggctggttcaacatatgcaaatcaataaacattatccagcatataaacagaaccaaagacaaaaaccacatgattatctcaatagatgcagaaaaggcctttgacaaaattcaacagcccttcatgctaaaaactctcaataaattaggtattgatgggatgtatctcaaaataataagagctatttatgacaaacccacagccaatatcatactgaatgagcaaaaactggaagcattccctttgaaaactggcacaagacagggatgccctctctcaccactcctattcaacatagtgttggaagttctggccaaggcaatcaggcgggagaaagaaagaaaggatattcaattaggaaaagaggaagtcaaattgtccctgtttgcagatgacatgattgtatatttagaaaaccccatcatctcagcccaaaatctccttaagctgataagcaacttcaacaaagtctcaggatacaaaatcaatgtgcaaaacatcacaagcattcttatacaccaataacagacaaacagagagccaaatcatgagtgaactcccattcacaattgcttcaaagagaataaaatacctaggaatccaacttacaagggatgtgaaggacctcttcaaggagaagtacaaaccactgctgaacaaaataaaagaggatacaaacaaatggaagaacattccatgctcatggatagggagaatcagtatcatgaaaatggccatactgcccaaggtaatttataaattcaatgccatccccatcaagctaccaatgactttcttcacagaattggaaaaaaactactttaaagttcatatggaaccaaaaaagagcccgcattgccaagacaatcctaagccaaaagaacaaagctggaggcatcacgctacctgacttcaaactatactacaaggctacagtcaccaaaacagcatggtactggtaccaaaacagagatatagaccaatggaacagaacagagccctcagaaataataccacacatctacaatcatctgatctttgacaaagctgacagaaacaagaaatggggaaaggattccctatttaataaatggtgctgggaaaactggctagccatatgtagaaagctgaaactggatcccttccttacaccttatacaaaaattaattcaagatggattaaagacttacatgttagacctaaaaccgtaaaaaccctagaagaaaacctaggcaataccattcaggacataggcatgggcaaggacttcatgtctaaaacaccaaaagcaatggcaacaaaagccaaaattgacaaatgggatctaattaaactaaagagcttctgcacagcaaaagaaactaccgtcagagtgaataggcaacctacagaatgggagaaattttttgcaatctactcatctgataaaaggctaatatccagaatctacaaagaactcaaacaaatttacaagaaaaaacaaacaaccctatcaaaaagtgggcaaaggttatgaacagacacttctcaaaagaagacatttatgcagccaaaagacacatgaaaaaatgctcatcatcactggccatcagagaaaggcaaatcaaaaaaccacaatgagataccatctcacaccagttagaatggcaatcattaaaaattcaggaaacaacaggtgctggagaagatgtggagaaataggaacgcttttacactgttggtgggactgtaaactagttcaaccattgtagaagacagtgtggtgattcctcaaggatctagaactagaaataccatttgatccagccatccccttactgggtatatacccaaaggactataagtcatgctgctataaagacacatgcacacgtatgtttattgcagcactattcacgatagcaaagacttggaaccaacccaaatgtccatcaatgatagactggattaagaaaatgtggcacatacacaccatggaatactatgcagccataaaaaaaggatgagttcacgtcctttgtagggacatggatgaagctggaaaccatcattctcagcaaactatagcaagaatgaaaaaccaaacaccgcatgttctcactcgtaggtgggaactgaacaatgagaacacttggacgtaggaaggggaacatcacccaccagggcctgttgtggggtggggggggaggggggaggggggagggaaagcattaggagatatacctaaggtaaatgacaaggtaatcagtgcagcacaccaacatggcacatgtatacatatgtaacaaacctgcacgttgtgcacatgtaccctagaacttaaagtataataaaaaaaagggagagagagagaaaagagaaatctaaaaaaaaaaaaataccaaagacaatcttcaccgaaatagcaaaaacacaatccttaaacttgcatggaaccacaaaagaccacaaataggacaaacaatactgagcaggcagaatgaagctggaggcactacactgcctgacatcaaaatacagtcgactcttcaacaacatagatttgaactgtataggttcatttatacgtggattttccccataatctaacaaggatagaatgcaatattcacaaaagtgaaaactatgtatacagatgactgacattttgtatatgcgcattacacagggctgactctgggacttgaatatacatggcttttggtatatacagggggtctcggaagcaatcccccttgtatacaaaacaatggtaaccaaattagcatgcaatgggcataaaacagacatatagaccaatggaacagaatagagaacccagaagtaaataaatttatttacagacaactggtttttgacaaaggtgccaagaacacactctggggaaaggacaccatgttgaacacatcatgttgggaaaacaggatatcatatgcagaagaatgaaactatactatctctcagcatataaaaaaatcaactcaaaattgattagagacttaaacatgagacctgaagcaaacagtactagaagaaaacagaagggaaacccttcaggatatgggtctagcgaagattttatgggtaagactttataagcacaggcaacaaaaacaaaaatagacaaatgggactgtatcaaactaaaaacctacacataaaaggaaataataaactattaagagatatcctgtagaatgggagaaaatattcatctgacaagggattaatatccggaatatacaaggaattcaaacaattcaacagcaaaaaacaccagattatctgatttagaaatgtgcaaaatagaacaactggccaacaggtatgtgaaaaaatgctcaacatctctcatcacagaaatgcaagtcaaagccacagtgagacattatttcacctcagttagaatggctgttttcaaaaagacaaaacataacaaatgctggcaaggatgcagagaaaagggaaataatacactatttgtgggactataaattagtgagtcattatggaaaatactgtggtgttttgtcaaaaaaactaaaagtagactatcatacagtttgacaatccactaccgggtattgactcaaaggaaaggaaatcagtatataaaaaagatatttgcattctcatgtttattgcagtactgttcacaacagttaagatatggaatcaacttaaatctccatcagcagatgcagagaaagaatgtggtatgtatacacaatggaatattattcagtcataataaagcattaagtcctgtcattcacagcaacatggatgaacttggataatatgttaaatgaaattaggcacagaaagatggaggattttgactgctcacaaaacagagaaatgatatttgagttgatgaatatgctaattaccctgatttgattatgacacattatatacatgtatcacaatatcactgtgtatatcccataaatatctacaattattacatgttgactaaaaataaaaggacaaagaaaaagactcctagaagaaaaacccacaaggagcatcataatggtgaaaagactaagagcttttcctctaagatcaggaataaagcaagatgcgcattttagccattatattaaacatagtagtggctttctagccaaagaatatggaaaagaaataaaggcatcatttagaaaggaagaattaaaattatgtttgttcatagatatgatcatatttgtagaaatccctgaaaactcaccacaaaaactgaataaattaattcagcaaagtagcaggatagtaagtcagtacacaaaattcagttgcatttctttttttttttttttttttttgaggcagagtcttggtctgtcgcccaggctagagtgtagtggcgcgatctcggctcactgcaagctctgcctcccgagttcacgccattctcctgcttcagcctcccaagtagctgggactacaggcacacgctgctatgcctggctaatgtttttgtatttttagtagagatggggtttcaccatgttagccaggatggtctcgatctcctgaccttgtgatctgccctcctcagcctcccaaagtgctgggattacaggcgtgagccactgcgcccagctttcagttgcatttctatacattaatcacaaacaatctgaaagggatattattaacacaactctatttacacgacagcatcaggacactcagccttggccaccaaggacctttgtaatgtttgccactgctgacctcagctgatggagctgcaagaagagtattccattatatcctcatctgggctacagctgctgcaccctacctacttaacactccatcaagtgagcagatttcaattcattgtaacaagaaacagaaaaaccaaggaaacatagcacccacctgagaaatacaataattttcagggactgactcccaagaaattgggatacattaattgccttacagaaaattaaaaacgactgatttaaggaagttcagtgtgctaccagagaacagagagacaacctaatgaaatcattaatacacaaaaggagacattcaataaagaaatagaaatcctaaaaaaaaaacaaacattttggaggtgaagaatatagtgcatgaaatgaaaagtgaaatagaaagcatcagcagcagacttgatcaaatagaaggaggaattcatcaactggaggataaattatttgaaaataaccagtagaggagaaaaataaagaatgaaaaggtaacaagggaagtttacaggatttatgggacaccatcaggagagttaatgttcacacaggatttatagaaggaaagtagagaggtaaagggtagaaagttaattcagagaaataatggctgaaaacttcccatatctggggctcttcccagattgatggacatctaggtacatgaagctcaaagaattacaattagtttccatctaaaagaggtttcacctagatatattgccatcaaaatgtaaaaaatggaagacaagataattttgaaagcggcaagataaataaagttcttacatctgcaggaacctccataaggctatcagtggatttctgagcaaaaactttccaggccaggaaacaataggattatatattcaaagttctgaaagataaaaaactgccatctaagaatactttacacagcaaagctgtccttcagatatgaaacagatacaagacttcctcaggtaaacaaaagttgaaggagtttatcagcaactactcttgccttacaagatatgccagagggagttattcaggcttaaatggaaggatgataattagtaacatgaaaacatatgaaagtacaaaattcactgataaataaatatacgggcaacttaagaatactctaatagtgtaatggtagtatataaatcacataactctagtataaaggttaaaagaaaaataattaaaaattactattgttttcataatttctcaatggatatgcaatattaaaaggtgtaccttggggcatcaaaaataaaatgtagcgggggaagtataagatcaaaatattccccccaaacaaagagggaacaatcccaacttattttacaaggctagcattgccctcatactaaggccagacaaggacaatataagaaaagaaaataactggctgatatttttttatgactatacatttaaaaattttcaacaaaatatgatcaaactgaatttaacagcacattaaaaaaatcatatatcacaaacatgggatttatccttagtacataaggacagttaagtgtacatatacaagaaatgggatactttaataaaatcaaagataaaaatcatacaatcattttgataagtgcaaataatgcagttcacataattcaacatccttccatgataaaaactatgaacaaattaggtatagaaggaatgtactgcaacacaataaaggccatatatgaatagcccacagctaacatcatactcaatgctgaaaagctgaatgcctctcctctaagatgaggaacaagaaaaagatattctcaccacttctattcaacacagtactggaagtcctagccagaggaattgggcaagaaaaataaataaatacactcaaatcagaaagaaggaagtaaaattgtctctgtttgcagatgacatcatatatgtagaaaatgctacagactccacaaaaaaaacctgttagaagtaataatctaactcagtaaagtggcaggatacaaaatcagcattcagaagtcatttgcgtatctatacactaataataaacaacctgaaaaacaaattaagaaaacaatttcatttaaaatagcatcaaaaagaatagagagctcccaaataaatcctttcatatatgaacgcatgatttctgacaagcatgccatgtccattcaatggcaaatggattctcttttcaacaaatggtgccaggaaaactggatatcctcacgtgagagaatgaagtcgagacctttacctaactccatatacaaaaattaactcaaagtggaccacagacctaaatgtaagacctaaaactataaaactcttagaagaaaacatggggcaaaaactgcatgacattggatttggtattgacttcatttggatataatatgaaaggcacagataaaataaaaaatagagaaattggactgcataacatttaggcatacatttaaccaaggagataaaagacctagacactgaaaactatgaaacattgaacaaattctaagatgatacaaataaatggaaagatatctggtgttcatagatcaatagaataaatattgccgaaatagctatactactcaaagtgatctacagattcaaggcaatgcctatcaaatttccagtgactttttttcacagatatagacaaaaaaaatcctaaaatttgaaagaaactacaaaagaccttaaagatctaaagcatacttgagcaataagaacaaagtgaaagatattacacatgcttattttgaattatatttcaaagttatggtactggtatagaaataaaccaatggaacagaatagaaagcatagaaataaacccacacatttatggtcaactaatctttgacaaagacaccaagagtacacaatggggaaagggtactctcttgaataaatggcactgtgaaaccaggatatccacatgcaaaaaaattaaattggaaccttaccctacactgtagagaaaagtgaataagatttaaacatatgacctgaaaccataaaacctataaaacagggaaaagctccttgccattggtttttgtgacaattttttagatgtgacatcaaaagcacaaggaataaaacgcaaaaataaattagaactacatcaaacaaaaaagtgtctgcacaacaaaggaaacaacaaaatgaaaaggcagcacatgtagcgggagaaaatatttccaaccatatatctgataagctattaatatccaatatatataaggaactcatataactagcaaaaaaacttaataacccaattaataacctgttaagatggacaagggactgaatagacatttattcaaagaagacatacagatggtcaacaggtatataaaaaggtgcttaacatcacttatcatcagggaaatgcaaatgaaaaccacactgagatatcacctcataactgttagaatcgctattatcaaaaagtcaaaagatagcaagtgttggtgaggatgtggagaaaaggtgtcccttatacatttttgttaggaatgtaaattgatacagtcattatggaaaacacgatagattttctttaaaaaattaaaattggaactgctatatgatccagcagtctcagttccgggtatatctaaggaaaacaaagtcagtatcttgaagaggtatctgcactcccatgttcattgtagtgttacagtagtcaagaaatgagcaacatagtattcataggcatggtggcttgtacctgtaatcccagtacttgggggtggccaaggtgaaggatagcttgaacacaggagtttgagaccagcctaggaaacatagtgataccctatctctacataaaattttaaaaattagctgggcatgggggtgcatgactgtggtcccagctactcaggaggctgaggcaggaggatcacttgagcccatgaggttgaggctacagtgaactgtgattgtgccactgtactcctgcctggatgacagatggagaccctgtctcaaaaagaaaggaagaaaatagtgtgtgtgtgtgtatcaccaaattcccaaataaacacatcacatacatatacatacagacacacacacacacatatatacacacacacaatgaaatattcatcctttaaaaagcaggaaatcatgcaatttatgacaacatagatgaacctggaggatattatgctaagtgaaatagccagacacagaaagacaaatactgcactatcccagttacatatggaattctaaaaagcttgaactcagagaaacggagagtagaagggtggttactaggggtcagggagtaggggaaataggaaatgttgaagggtacaaacatagagttatcagatgaataagttcttgacataacgtccagattggtgactatagttaatatattctatacttggaatttgctaagagagtatagcttaggtattctgaccacacacacgcacacacatggcaactatgtaaggtatatgttaattggcttgattgtagtaatcatttcacagtaggtcaaatatgttcttaaatatatgcacttttaatttgtcaattatacctcaataaaagctgaaaaaagcatcaagaataacaaacttaggaaccaactttaccaaggaggtgaaagtcttgtacaatgaaaattacaaaacaatgctgaaagaaattaaagtagacataaagggaaaacacctcctatgttcatggattggaaggccaatattgttaaggtgtcagtaccacacaaaacaatctacaaatccaaggtaatcccaataaaaatcctaatgatgttatttgcagaaagaagaaaccccatcctaaaattcacatggaatctcaagggaccttgaatagctaaaacattcttgaaaatgatgaacaacattggaggactcacactttctgatttgaaaacttactacaggccaggtacaatggcctacacctgtaatctcagcacttttgaaggctgaggtgggaggacttctgagtccaggagtttgagaccagcctggggaacacagggagacctcatctctacaaaaaataaaataattggccaggtgtaatggtacacacttctattcccagctactcaagaagccgaggtgggaggattgcttgagcctgggagattgaggtggcagtaagcagtgataatgccactgtactccagcgtgggcaacagagtaagaatgtctgaaaaacaaacaaaaaccccaacttattacgaagctacagtaatcaaaactatgtggtattgacataaagatgtagagaccaatggaattgaatagagagcccaaaaataaacccttgtatacatgatcaaatgattcctgagaagagtgccaagaccattcaatagggaaagtgctgtattttcaacaaatggtgccaggataactgaagttgagacccttacctaataccatacacaaaaattaactcaagagaatgaagttgagatccttacctaaccatgtataaaagagaatgaagttgagacccttacctaacactgtgtacaaaaacttactcaaaatgggtcaaagtcctaaaactatgaagtcttataaggaaacataggggaaaaactttacatcattggcagtgcttcttgtatgcgacaccaaaggcacaggcaataaaagtaaaaatagataaattgtacttgcacaggcaataaaagtaaaactagataaattttaaaaatttacattgtgtgcattaaaataatatcaactaagcaataagacaacctacagaatgggagaaaaatttgcaaatcacatacctgataagggattaatgtccagattatacagagaacttctaaaagtcatcaccaaaaaacaatgcacctgaaaaatgggcaaaagggccaggcacggtggctcacgcctgtaatcccagtactttgggaggctgaggcgggaggatcatgaagtcaggagattgagaccatcctggctaacagggtgaaaccccgtctctactaaaaatacaaaaaattagccaggcgtggtggtgggcgcctgtagtcccagctactcgggaggcaggagaatgatgtgaacccaggaggcagaggttgcagtaagccgagatggcaccactgcactcagcttgggcaacagagtgagactccatctcaaaaaaaaaaaaaaaagggcaaaggacttggacagacgtatctccaaagaagatatacaaatggataatagtacgtgaaaagttgtttaacatctctagtcattaggaaatacaagtcaaaaccacaaccttacatacactcagatgactactattaaaaaaataaacacagcctaggcaacatagtgagacccatctctagtatcagctacgtgggaggttaaggtgggaggatagcctaagcccagaggtctaggttgaggctgcagtgtgccatgatcatgccactgcattccagcctaagtgacagagccagatcttgtctcaaaaaaatcccacataaacagaaaataaccactgctggaagggacatggagaaattggaatccttgtgcactgttagtgggaatgcaaaatggtacagcctctgtgttaaacagtttggtgttccttcaaaaattaaaaacagaattatctgatccatcaactccacctctgtgtatacacccagaaggattaaaagcagtctcaaagatatatttgtatacccacgattgtagtggcattatttacaacagttaaaacatcaatgcaacccaaatgtccatggaagaatggataagcaaaatgtggtatatacatacaatgtaatattattcagctttaaaaaaaatagaaattttgacacatgccacaacatggatgaacctcgaggccattatgttaaatgaaatacagcagtcacaagaagagaagtactgtatgtttccacttatatgaggtatgtagaatagtcaaatcagagacatagaaagtacaaggtggtttccaagagatggcggtggtgggggggttggggaattattgtttaatggatatagagtttcataattacaaatgacaagtgttatggagatggatgatagtgatgattgcacagcattgtgaacgtatctaatacattcactgaattgtacactaaaattggttaggatggtaatttttatgttaagtgtattttgccacaataaaagatttggaaatcaacaacaaatagaaatcccagaagataacataggaagaaatctagatgatctttagtttggtgatggctttttagatatgacaccaaaggcatgattcatgaaagaaataattgataagctagactttgttaaaaataaaagtttctgctctgtaaaacatactgtcaagaggatgaaaggacaggccacagaagggagacaatacttgtaaaagatatacctgataaaggactcatccaaaatatataaagaaccttaaaaacataacaattagaaaacaaacaatctgattacaaaatggactgaagaccttaacagacatctcaccaatgaagatatacagatggcaactaagtatatgaaaagatgccccacatcttacgtcattagggaaatggaaattaaaacaagaaatgtgatatatctacacgcttattagaatggccaaaattcaaaacactgacaataccaaatacttgccaatatgtggggcaacaggaacactcatccattgctggtgggaatgcaaaatggtacagccactttgacatataccattaatgggaatgtaaagtggtgcagccctggtggagaagagtttggtggttcttcaaagaattaaaaatggaattatcataggatccatcaattccacttctgaatgtgtatacatatcccccgaagaatccagagtatatcgaaatcagtggtttcttataaaattaaacatattcttaccatgcagttcagcaatcacatccttggtatttactcaaaggaggtgaagacttatattcacataaaaatctgcacagagatgtttacagaagctttatttgtgattgttgaaattggaagcaaccgagatgtccttccataggtgagtagacagataaactgtagtacatccaggcaatgaaatattattcatcactaaatagaaatgagctatcaagccatgaaaagatatggaggtaattaaaaaacatattactatgtgaaataaggcaatctgaagaaactacatactgtatgattccaatcatattgcattttagaaaaggcaatgctatggaggcagtaaaaagttcagtggttgccaagggttgttggggaagaagggttgaataggcagtgcacagagtacttttagggcagtgaaaatgtacaaatatatgtaaatatacgtatctgtatgatactataatggtagatacatgcatattagtccgttctcacagtgctataaagaactacctgagactgggtaatttgtgagaaaagaggtttaattgactcacagttttgtaggctgtacagtaagcatggctggcaggcctcagaaacttaaaatcatggcggaaggcaaaggagaagcaggcacatctttaccatggcagaacaggagagggaaagaaagtgagatgggaagtgccacacacgtttaaacaaccagatctcatgagaactcactatcatgagaacagcaagggggaagtttgccccccaccaggcccctcccctgacacatggggattacagttcaagatgagatttgggtgggaacacagagccaaaccatatcaacatgttacacatttgtagaaacccacagaatgtacaccccaacagtgagccctaatgttaactagggactttgataataatgtgtaaatgcagattcataagttgtaacaaacgtgccactctggtgggagagttggtaatgggaaaagctctgtatgtatgggtgcagtgggtatacgggaaatctctgtacttacctctcaattttgctggaaccctaaaactgctctaaaaatataaagtctttaaaatacacatacacacatacagacaatcgaatagagaatcataatggtacactatcagaaaatcatcaaacacaaaaaaaggcagtaagggaggaaatgttgtatttaaaaaatgtaaggcaaaagaaaaggcacaaaatgtcagaacttcttttttataagtaagtactttaaatgtaagtcgattaaattctccaaaaagcagaggttggcagaatggatttaaaagaaaaccatcaacctatgctgtatataacaaactcacttttggtctaaagacacaagtagattgaaagtgaaagaatgaaaaatgatatttcatacaaatagtaacctaaagaaagctggaggtaattatactaataaaagaaataaacttgaatttaaaaattgttataggagacaaaggaggacattacatactgagaaaatggaaaattactcaagacttcgcaattggaaacgtatacacaccaaaatatagagccccagaatataagaaaatatactgacagaattggagtgagaaagacagttctacaataatacttagggacttcaataacgtactttcagtaatgggtagagtcaaagaagaaatgaaaacagaaacttaaaaatatcttcagacaaatgacagtgggaacacaacataccaaaagcaaaacatgcagcaaaagcagttctaagagggaagtttacagcaataaatgccttgcctacattaaaaaagaagagatatttcaaatagcccaaaattgtacctcaaggaattagaaaaagaagaacaaactaaagccaaagttaacagaaggaaataataaagatcagaacagagacaagttagaaagaaaaaccataggggaaaaaagtcagtaaaactaagacttcaatttttgaaacaaagaattgatttttgaaaaataaaatcaacaaactcttggactaagaaagaggacaaaatcagaaatgaaaatggagaatatattacaacaggtacttcagaaataaaaaggatcataagggacttttatgaacaattatatcccaacaaattggataacctagaggaaatggacaaattcctagaaaaaaaccaacctgctaagattaaatcaggaatagaaagcctgaacagaccaatagcaaagagatcacagtggtaaactaaagagcttctgcatagcaaaagaaattatcaacagagtaaacagacaacatatagaatgggagaaaaaatatttgcaaactattcatctggcaaaggtcctatgtccagaatccataaggaacttaaaccaatcaacaagcaaaaaacgaataatccaattgaattggcaaaggacaggaacatacatttcttaaaagaaaatacagaagtagccaaacaaaaaaacattctcatgatcactaataatcagaaatgcaaataatgaggccaggcacggtggctcatgcctgtagtcctagcactttgggaggctgaggtgcgtggatcatctggggtcaggtattcgagaccatcctggccaacatggtgaaaccccgtctctactaaaaacacaaaaattagccaggtatggtggcggtcacctgtaatcccagctactcaggagtctgagacaggagaattgcttgaacccaggaggtggaggttgcagtgagccgagattgcgccactgcactccagcctgggagacagagcaagactctttctcaaaaaacaaacaaacaaacaaaaaagcaaaaaacagacaaaaaaaaacaaaacaaaacaacaacaacaaaaaaacaccaaaccataatgggatgccatctcacaccagtcagaatggcaattattaaaaagtcaaaaaaataaaagttgctgggaaggctgcagagaaaagggaacgcttatacactgttggcaggaatacaaattagttcagccactgtgctaagcagtttggagttttctcaaataactgaaaacagaactaccatctgacccagcaatcccattactggatatatattcaaaggaaaataaattgttctatcaaaaagacacatgcatttgtatgttcatcacagcactattcacaacagcaaagacatggaatccacttagatgcccatcagtggtggattggataaagaaaatgtggtacatgtacaccatggaatactatgcagccataaaaatgaatgaattcggccaggtgcggtagctctcacctgtaatcccagcactttgggaggccaaggcgggtggatcacctgaggtcaggagttcgagaccagcctgaccaacatggaaaaaccctgtctctactaaaactacaaaattagctggacgtggtggcgcatgcctctaatcccagctactcaggaggctgaggcaggagaatcacttgaacccggtaggcggaggctgcagtgagccgagatcatgccattgccctccagcctgggcaacaagagcgaaactccgtctaaaaaaaaaataaaaaaaaaaaatatatatatatacatgaatgaacttacgtcctttgcagcaacatggatgcagctagaggccactatcttaagcaaattaatgcaggaacagaaaaccaaatactgcatgttaccacttgcaagtgggacctaaacactgagtaaacatggacataaagatgatcagtagacactggggactacttgggggaggaatggagaggtgggctgaaaacctacctattgggtactatgctcactacctgggtgataggcttatccacactccaaacctcatcatcatgcagtatactccatataccatgcaacatatagacctgtacatataccctctaaatcaaaaataaaagttaaaaaaaccccaaaacctcaaacaaagaaaagcccaggaccagatagcttcatgactgaatactacccaatattcaaagaataccaatacttcttaaactcttccaaaaaaatgcagctatagggaatacttccaaaaaaaaaaaaatgcagctaaagggaatacttcctaacacattttatgaggccagcatcaccttgatacccaggtgagccaaaggcatcacaagaaaaggaaactacaggccaacataacccaagaataccgatgcaaaaatccttaataaaatattggcagactaaatttaacaatacatcaaaaagattatatatcatgtctatgtggaattaatttctggcatgcaaatcttatttaatatacatgtagcaatcaatgtgatactaacagactgaaagatgaaaaccacatgatcatctcaattgacacacaaaaagtatttgatgaagttgaacatcctttgttgataaattctaacagttcaggtatagaaggaacactcctcaatataacgaatgccatttatgaaaagcccacagctaacgttataatcaatgagggaaaacagaagcccttctactatgaaccagtacaaggcaaggatgcccactctagctactactactcaacatagtactggaagtactagtacaaccaaacagacaagaaaaagaaatgaaagacattcaaatcaggaagtaagaagtaatattatctttatatgaagatgacatgatcctacatatagaaaaccccgaagactctgacaaagcaacctgttagaactaataaatgagttcagtaaagttgtaggatataaaatcaatataaaacagtagttgcatttctatacacaaataatgacctggccaaaaaagaaatcaagaaaacaatcccatttatgatagcatcaaaaaaattgcttaggaataaatttagccaaaaagatgaaagacctgtacactgaaaactatgaatcattgatgaaagaaattaaacaagatacaaataaatggaaagatatcccatgctcatgaatctgaataatattgttaaaatgtcaataatatccaaatcaatatacagattgaataaaatccctatcaaaatcccatggaaaatttttttaaattctaaagttcatttggaatagcaagaaccttaagtagccaacgaaattctgaaaattctgttctgaaaaacaaagggagacttcatactttctggtttattttacaaaactattgatcaaacagtatggtcctggcataaaaaacaaacatgtagaccagtggaacagaatagagagcccagaaagaaattcaaagatatatgatcaaccaattttccacaagaacacgaagaaaacaatgcagaaagatagtctctctcataaatgacgttaggaaacccagttctgtggcttgtccaacccatggcccacagaccacatgtaagcccaggatggctttaatgaggcccaacacaaatttgtaaactttgttaaaacattgaatttttttgcatttttttagcccatcagctgttgttattgttagtgtattttatgtgtggcctaagacaattgttcttacagtgtggccccgggaagccaaaagatttgatatcgctgccttacaccatacatagaaataaactcaaaatggataaaagacctaaacataagaccaaaacccacaaccagaagaaaacataggggaaaagctcgacatggctctggcagtgattttttggagatcacaccaaaagctcaggctacaaaaacaaataattggtataccatcaaactaaaaaacttctgcacaggaacggaaacagtcaacaaaaggaaaaggcaacctatggactagaagaaaatatttgccaaccatatatcttataagaggataatatccaaaatttataaggaatgcatacaactcaataacaagaaaatagataacccaattaaaaaatgggcagtggaactgagtagacatttttgcaaagaagttataaaaatggcaaacacatatatgaaaagacatttaacatcactaatcgtcagggaaatgcaaatcaaaattactatgcgatatcacctcacactcatgagaatagctattaagtgttggctagggttagggaactcttgtacagtgttggtgggactgtagattggtgcagtcataatgaaaaacagaatggtggctcctaaagaaattgaaaatatactatcatctgacccactaatccctcttctaggtatattcccaaagaaaatgaaatctccacctcataaagatatctgcgctcctatattcattgtggcattatatgcatgagtcacgatatgaaaacttacgtgtccattgatggatgactaaactgtggtgtgtatgtctacaatggaatattattccgcattaaaaaaggagatcctgccacttgccacatggatgaaactggaagacattgtgctaagttaaataagccatatacaaatgaaaagttttaaataatctcacctatatgtagaatcttaaaaagaaaaaagtcaaatatacagagatagaataaactagtggttaccatgggcaaggtgtgggggaagaaaatggaaagatgtaggtcaaaggataccaagtagcagatatataggatgaacaagtctagagatctcatgtagaacatgagaatagttagtatattgcatttggaatttttgccaattgagtagatcatagcttttctcactcatacacacaaaagaataactgtgagatgatggacatattaatttgcatcactatgttaacgatttaactgtatgttttatacactaaatatgcatatttttaaaattaaaaaaaaaaaacacaacaagataatgtacagccagacagaagcccaataagaaaagagaggacttgaacaataccataaaccaactagacctacaaacatatatggacactccacccaactacacattcttctcaagtgcacatggaacattccctaggagggatgatatgttaggccacaaaagagtctcaataaattttaaaatatagaaatcatacaaaatatcttctctaactacaatatagtgaggccagaaatctgtaacagaagaaaaacctaaaaattaacaaattcagggaaataaaactacacactctttaaaaattattgtgtcaaagaagacatcagaagggaaattataaaatactttcaaaaagtgaaaatgacgacacaacatactcagacttatgggatgtagtgaaagaagtgctcagaggaaaaattatagctgtgaatgcccacactgaaaaagaagaaggatccataacctaatattataccttacgtaaccagagaaagaagaacgaagtaaacctaaagttaaaagagagaatgaaataatatgtatgagtggagataaaactgaattcgagcttaaataaacaacagagataatttaacaaaaccaaaagttgcttgtttttgaaaagatcaaagttgaaaacctttaactagaatgactaataaaaaattagagaagttgcacatatctaaaatcataaacaaaagtaggaacacaacaaaaaaaaacaaaaataagaaaaaaaaacaaaagtgggaacgatataactgatcttacagaaataaaaagtgtgataaaagaatactatgaataactgtataccaacaaattatataacctagataagatggacgaattcacaaaatactaatacagaccaaaacagaaattgaaattatgagcagacccataacaagtagaaagtttgaatcagtaaccaaaaaccttccaatgaagaaaatgctacacagatggcgtcactgttgaattataccaaacacttgaagaattcacaccaatccctctcaaactcttccaaaaaacagaggagaaaaaactttgcaatacattctatgaggccagtattacatggattccaaagccagacaaatataccacaagaaaagacaaactagatactaaaatcttttatttaacaaagtactagtaagccaaattcagcagcatattaaaaaggattatatatcatgaccacatggaatttatctcaagaatacaagggtggttcagtacaagagtatcaatcaatgtaatacaccacattaatacaatgaaggataaaaaatccatgcaatcatttcaattcactcagaacaagcatttgacaaaattctacaacctttcaggataaaaacatggaactttcaaaatgtgttaaagaggatttgtgaaaaatccacaactaatatacttaatgagaaaaaaaactgaaaaatttctcccataacaaagagtaagatatggctgtatgctttacccagtgctattgaacaatgtactgaaagttttaaccatgacaattaggcagataaataaacaaacaggtaaatgaatagcatccaaattggaaaggaagcagtaaaactctttattcaataatgacatcttctatctagaaaatcaaagaatccacaaactagtagagctaataaacaagtccagcaaaattgcagggtacatgttcaacatttattttaagaaaatcatttgtgcctctatataccaggaatgaacagcccaagaaggaagtcaatttttaaaattccacttacaatagcatcaaaaagagtaaaatagctaggaataaattaaaacaagaaggtgaaagacttctgcactaaagactacaaaacactgttgacaaaaattaaagaagacttaaataaatagaactatacatcctgtgttcacagattggaagattaaatattgttaagttggcgatattacccagtgatctacagattcaatgcaacccttatcaaaatcccaagggcctttttatttgcagaaatgtaaaaactgattttaaaatgtaaatggaattttcccagggccccaaacaatctaaaatcatattgaaaaagaacaaagttggaagactcaggcctgccattttcaaaacttttacaaagctgcagtaatcaaaacaatgtggtactgacacaatgtggtctctaggacacaaggatggacatatagaccaatggaatataatagagaatgtagaaataaacactcacatatatgatcaattcattttcaacaaatgtatcaagaattcagtgggaagagtagtcttttaacaaatggtgctggggcaactggatcctcatatatcaaagaatgaagttggacccataactcatagcatataaaaattatctcaaaatgtatcagagaccaaaaaataagagttaaaggcataaatttcttagtagaaaacaggagtaaatctttatgacttgagattggaaataaattcttagaaaagacacaaaaaacacaatattgtaaatgtactaagtgacactgaattgtacattttgaaatggtttctgttacttaaaaaatttaaagggtgcacagaagactaaaaagcagcacagacagaattatcaccagaaaaagaagactctatattaaatgtcaacatggagaacacatgtcagaaataggtagtccagagcagcagctatagtggaggctcttgcaaatgactaagatttgaggtggcaccctcagagaatcacctcttgggggtagattcgatttatggagtagatgtatctcagagacatggtaggaaagccaaagaatggtgagcatagctgccatctagaaaccacctacacatgcaagcataagagattggttgaaaggttatagcacagtcacactaaggaatactatgcaactttagcaatgcaatgagaaagatctctgtgaatggatgttgagtgatttctaggagatgttgttaggtgagaaaagcaaagttcaaaagggcatatacagaatagtacttttttgggaaatgagaaaataatcatgtcttataaagagcaaacacacacaaactataaactagaaaacactgaaactggttacctataatgggtagggggaattaggatggaagagatatgggtgagaggaagatttctctcagtagctccttttgtttagtattgacttttggaagtatgttaatgttatatgtattcaaaaaataaaattaacaagatagggaccacttctgaggtggtggaatgagcaccttgatataaccactccctgaaaagcaatgataaaactggacaaagaaatataaaattgaaaagtgctaattaaagaaaaaatattaagccttcctaagaatagcagggttatgatttaacgtggggctgccatctccccacccaagctcaggggcacggtaggcttgaggaccagcaacaaagaaggctcatctgattttgaattccatagaaaaccctatgcactatgttaagcaacaaggatttcagtggcaaataattggaggcaacccacatcacagcaacctaatgtttcaatactggttgggcaagcgacagattaagaaaaattttaaaaggaattctggagatatggaagttgtacatgcttgcaggagagatcagagaggtttcctgctatctacttatccttggctgactgtgagaccttttgcaagcagacagtaaaatacaggacagagttataaagtgcctgaactttgaatgtcccaacccacacatagatcccctcagcagagggtggaagattcactggctcaagatgtttaaacaaatgtctgactaatcatggcttgaccactaggttatgctgatccaggggtgacaccaatgaagccaggcttacaaaacaaacataagaattaaaacaaacaaaactgagcaaagacaccagtggctgcacactgcaggagaacacagactctgcagaatccatgcagagaaggcatacacaagcgagcaaacaaataaatgagtaacagaaatcatccctggttagggagaagaactagaatccagagtttctacgatatattatctaaagtaagtttttaacaaaaaaaatgagatatgcaaagaaacagaaaattgtgacccttgaacaagaataatgagcaataaataggaattatctctgaagggccccaaatgttagggcgcgatttcaaagtaagtattataactatgttcaaagaaccaaaagaaaccacattaaagaatgcaagtgtgatgacaaagactcatcaaatagataatatcaatatagagatagaaattagaaaccaaatagaaattctgtagttgtgaaatataataacttaggtgaaaaactcactagtgcggctaagcaaatttgacctggcagaagaaagaatcaatgaacttcaacgcagatccataaagatgattcagactgaagaatagaaagaaaaataatgaagaaaaatgaagagatacccattggataccataatatagtggtccccaacctttttggcatgagggaccagttttgtggaagacaatttttccacagccagttgggggaggctttagttagattctcatacggagtgcacaacctagatccctcacatgctcagttcacaataggatttgctctctgtgagaatctaatgccatcactgatcagacaggaggcagagctcaggcagtaatgcttgcttgcctgctgctcacctcctgctgtgtagcccagtttctaataggccacagactggtaccagtccatggccctggggttgggaacccctgtcctaacaggatgtgtaacaatgtatgtgtaattaagttgtaacatatatgtaattaagagtagaaaacatatgtggaattaaggagtaacaacatatgtgttaataagagtactgagaaggagagaatagggcagacaaaaatatttgagtagattattaacctgaagcagattgtttttgcttaagctgcttattgtaacctccagattacactttaaaaatgggggaaataaactaacaaaggaattagaatggtactctagaacatatctattcaacctgcagaaggcagtaaaggaggaagagaggaacaaaagtgatatgagacatatagaaaataaataacaacatggtagatataaatccttccatatcaataattatattacatataagtgaattaaaaactcaataaagagcagagattgccagactgccttaaaagcaggatccaaatatatatggtctataagagtcacattctagattcaaagacatagttgaaagtaaaatgatggaaaaagatgacatgcaaacagtaataagaaagctagagtgactgtactaaaatcagacaaaattggctgggtgcagtggctcacacctgtaatcccagcattttgggaggctgaggcagacagatcactcgaggtcaggagttcaagaccagcctggtcaacatggtgaaactctgtctctactaaaaattagctgggtatggtggcaaatgcctgtagtcccagctacttgggatgctgaggcaagagaacggcttgaatccgggaggcagaggttgcagtgagccaaggtcacgccactgcactccagcctgggcaacagagtgagactccatcccaaaaataaaataaaaataaataaaatcagacaaaatagactttaaaaacaaaccatgttattagagatactgagaagcattttacaatgacaaaagggaaaatttaacaggaagaaatagaaatcataaacagaagtcataaagaaataaaaatttataacagctaaaaacacagccctgaagtatatgaaataaaactgtcagaaatgaagagagaaacagacaactgaacaataatagacaactcaacaataatagtactaactcttgttgattttctgtcttgttgttctatcaattattcagagtgagttattgaactattacccaactactattcttggatgaaatggtgggaggtgaggctatgtggcactctgcttaataccctcccctgttctggtgtcagggagacaaatgtggagctgacttttcgtcagaaacagtggtacccagaaagtagtggggtaacagatcccaagtgctcaaagtaaaaaaaaaaaaaaaaaaaaaaaaaaaaagccaaccaagaatactgtgtccagaaaagtttctttcaaaaagaaggcaaaataaaagcattcccagataaacaaaaacagaattccttgttagcagaccagttttgtaagaactactagaggaagttcttcaggcaaaaaggaagtgctcccaggaagttcacatatatccaaaagcaaagagcaaggaggtaaataggagcaaagctgttctagagtaaggaaataccaccagttggtaactcaaatccataaaaaccaaaaaagtggatcaaatatatgatataaggaggttaataaaacagaaactagaaatatatacttgctctcctttcagcttctttaaagatatatcattatatagtatgatcattataatagcgcataataaagatgtaatatatgtaacaataccacaaaaagtggtaaaactgaataaactcatacaggaataacttctgtatctcaccaggattaatataaatatgaagtaaattttgagacgatacataaggtaagccctagagcaaacactaataacaaatagaatattgaagaatcataaaagaaatgaaaatttatattagaaagtagtcactagatggaaaagaaagcagcaaaggagaaatagaggaacaagaaatagtacatagaaaagaccaaaagtaaaactgtggatataaatctaattatatcaataataatattaaatgtgaatggattaaacaatctaatcaaaggcaggaattatcagaccagatttgaaaaacaggatccatctgtattccatctatatgaggcacactttagatgataaatgccaactgaaagtaaaaggatggaaaaagatatatcatgtaagcagcaaccataagtaacctgaagtgctataataaagtcaaaggagattttaaattaagaatgttactgaagttaaatatgaatatctcataatgataaaatgtcaattcatgagaagatacaatgattataaacatatattcacctaacaatagagaactaaaacataagaagcaaaaactgacagaactgaacagagaaatagccaattcaacaatagtagttggagacttcaacactccactttcaataatgtgtagtacaagaaagaagatcaataaggaaacagaagatatgagcaacaccataaaccaactagactcaaaaggtaattatagagcacttcgcccaacaaccaacattgaatatacagtattttcaagtgcacatgagacattctccaagaaggaccatatgctaagtcacgaaacaaacctgcataaatttaaaaggattgaaataatacaaggtatctttttctgaatataatgaaataaaagtagaactcagtagcaaagaaattagggaaacatacacatgtggaaattaaacaacactacattcttaaataatcaatgggtgaaagaattcacaagggaaatggaacgtactttgagattaatgaaaatgaagatacaacataacagaacttatgggatacatttaaagcagtgtaaagatggaattttatagctatgaatgcctatatcaaaaaataaggcttcaaatcagtaagccaactctccacctcaagaaactagaaaaagaagagcaaactaaacctaaagcaagtagaaaaaacaaaataataaatattagagtagaaataaaatatagaatataaaaataataaagtcaacaaatccaaaatttggttctttgaaattaacaaacctttgatagattggtaagagagagggagagggagaagaaaagaaggggaggaagaaagagggggaggaggaaagacagagagggaagtgcatgaggcaaagggggagagagaaaactcaaattactaaaatcagaaatgaatgacagttttacaaattaaagcaaaaaaacgaggctagctgcagtggctcacacctgtaatcccagcactttgggaggccaaggcaggagaattgcttgtggccaggagttcgagaattgcttgtggccaggagttcaagaatagcatgcacaacaaagcaagaccctatctctacaaaatattttttgaataacagctggtgttgtggtgcacacctgtcataggctaaggggcaaggatcacttgagactaggagatcgaggttacagtgagctatgattacaccactctattccagcctgggcaacagagagagactctgtttctcaaaaagaaaaggaaaaaggaatgaatgagggaagtatactaccaacctgacagaaataaaaaggattatgaaggaacactatgaacaattttgtgccaataaattataaaacttagatgaaattgacaaattcctagaaagatgaaaactatgaaaactgacta

SEQ ID NO: 437 - DNA, 1810 bp, Homo sapiens
agatgtcatcttgatctaatcggaacaatttagtctagttgaggggaaggagccagcacttactaagtgatgactaaggcaggccggggcctacgcttggtgttatacacatttacaagcaacaatatgtttgggcaatctaaaaattatttatgcaacaagcaatcacctctggagggaaaaggaaaaggaacacagtaccctctcttgttttgggccaagtgtggactaaaccagctaatattaacaaatactgaggtgtttgaaaatgattactagaaaaccagaaatttttaacagaaattgttgaaaacccaaggaatgttaagaaagataaatcggacaggaaataaaccggtattttctggctccttttcataacaacagtgatagggtcagctaagttatagcaagaggggatgaatttgatcatccccaccccacctgtatagagagaagaagtctccattcttaatctagaaactcttaaaaggagctgccacccccacatctttccagattgctgggcagggctctctttttccagctttttacccacaaattgtgatggccaaacaccctcaccctcattttttacactcttagcaaagagatatgaatgcaaacagctactcaggtttgagaccaatcttctcaagaaaccatttctacacaagccctaagtgaagagaagaaactcaaccaaagtctacctgctgctttccagttcttctacttgttattttttatgtcaacagtaaataatttaaaatgattaacatggattccttggaatcctgcagccatgtgaacagttaaaagaaaattttaaaggactattagcttacctggaaccaaaccatgactaacctgcagggtatttactatttttggcctgtttataaacttcaagtacttccgtgaacaaagaaaggatggtaaacctgtctcaatcagccacaaacacatttaattccaagtatcagaattgtgtcaataacaattgtgtatgggtcctgggaggacaaaagccacggagaggtaatgtccactcctcagagtttcagagagatggagtggggaggtggcctgttggagttggctgtcaaggctaagatctggggaggtggtaggcagttgtgtcgtgtcctgtttcaagacaaggctctgaaacccccgtaagaagaaatcactgaaaatgcaaacactgagcagccacatcacagtccaggaggtgccgcttccacattttgtgctgctacatgtatgccgtgctctacatgggtcacagggggattctgccttggaagcaaagcaacagtaaagagtgctcaatcaattggtgaatattgatggaaggaggaggcttcgaattcctctggcttatttgaaagccacttgtaacacttccccagcaggagcaaacaataaaacactgagaagtacaaaggtaatacttccctcacaagtcaagatagcaaggaaggcatctggtacagagaagaactacctttacaatgatagggcagtttacgccaagacagtgatggacctaagcatgacctatcagattttgctttaaagaagaggataggttctcctttctccttaaatctatgttaatcactgaataacaaaagataataatatattaaaagctggtgaatgcggttgtccacaaaactttttaataagtaggtgaaggccaatttgtgtctagccacaaatgtacaaaacaagtgaatgcttactggcaactgttaattttttagaaataaaaggctaaaaaataaaaacaaaggaaaaaggg

SEQ ID NO: 438 - DNA, 3507 bp, Homo sapiens
gggcgcaggaggcccactcccccgactgggtcggctgctaccctcaggccagggtgtgcggtggagaaactgaggctctcctccagctgctctgggagaaaggaaagccggggaccccacacactggcgtctgtgtcccagaacacccagcaggggggagagcaatttaagaaataatctggttggcaaagggcgtcatgaaaatcagccatttctagagctgaggggcggtggtgtttagcccagaggacctagctagctttcagggaaaaaacggatgtggcctttcaggcagagcccagaaaaaaagacctgtgattaggagaccctaagaaccagcaaagaacttctaaatattggaggggaggtggtgtagctgcaaagagcccacacccacgctgagttagctctgacagcttctaaaggaaagggagatgcttagattatcctgagaaactggaggatctcctgagtgacctgaaaaggtcatctcactcatccgcctgtggctggagtaaaatatacggagcccatcccaggactcccagtgggagaggatgaacaatcacttctgaaactaagctcaggagaagttgaggagctttctcaagggagaagagctgccaggagaagcaagggtctctctcagtgccacttcctttccataaaccataatgatgggctctgaaattgtccaaggaaggaaacccatggcttctcagagcaaccagtaccaggggttcaagttcgtcagagagcatgttgaagttctattttattttcctccattggtcacctgctggggatgaggcataggcctagtgttgtcacctggaggaaagacatgatgcaattaacaaagctgctaatgcctcctctcaccctgacctctgctcttagcctctgtaccagcccaccctctgcatcctgcacagccagctgggccctgagaggtcctcctggccctcctcccacccgtcctttgcctgtcagatggagggtctttatgctgagatcactggagaaacagagcttcagtgcactctgtcacaccagcaatgagaaaacctttctaaaggggaaagctcacagtaggcagattcctgattattccataaatcctggagaagaaaaatataggttaacataaggattcaagaggatgacactctgtgtgttcaggcataagctaaattcactcattccgttatttagtgattttgttatttagggtgtgcctggcactgagctaggcgccggggctaccacatgaataagacagagatggcccctccctgaaccctgccgcatgcccttccactctgcctcccaggacaggaggctatgatacactttcctctcctgcaccagcatatgtctgtctccttcccagcccacccctagcaggtgttgtccccagccccagctgcttatgtctcgtgtgttctgccaagagctgcttctgtcagaaggcactaactctctggtgattgggtggtggatagaagaggtaacctaaaggcctgtccagaaaatgagatcaaagttggcagcctcctgggcccctcccaaaaaaggatatagccaccaccatttataattaattcaggccccacttcactctgtcccacctgctttctgtctctctctctctctttttttttttaagatctttttctgatatgcctggttgccccaatgcaagtctcctctttctgaagcttcctgtgccaccaggggcctgtccacctcagagacctctcaggtgcagctcagctgcatccacagggggtcctgagtccctaggccctgcacagatgtctacccaggttctcttggtctcttccatagctatgaggcctcctcattgagggtgcccaaacaccacccttaatcacaagtttgccagcctccaccttctaaccctcctagaccacatcagcccctgccttattccagtattttcctgatttcgcctatttccagcttccctcagccattcacaagcacagcctgatgctgtgcataggaagacctggcagtaagcctatggtgaacaaatatttttaatgaacaaacagaaattatggccccaaactgaaaacaccctggaagccacaaactctgttaccttcaaaagaagccagatctggaccgctgaggtttttaaaaaatgcaatgagcgaattagtgaaatcagttcatcacggacactgtgtctttcaggaaatgaagcctccgaagaaaaaagggatcctagcccctgccaaattccattctgtttcaaattagccttccagtaaaatgagggggctgtcctaactggtctttaaggtcctcctagtaccagagctctgaggctctgtatttcccctgaacaacctcttggaactctccacattctcataacagaagaaaatgcatttgtgctctgggctgaagctcagaagtgggctttcacgacagtcatttcaggcctgtttccctttttctcccttccctgaaagggcctctggtctttcccaagctgcctgagtagaaggaaacacacagctcccccagagcagagaggcccgcgagagggaaagctggcccaggcccagggcaggctcgcctctgactctgcagggacattattccctcccagccagcagggaacttctggaacttctaaacagcacatcctcgagccagcccaggcccccacagcatcctgcaccccaggtttacaagctttttaatgatggagttttgctcttacgcccaggctggaatgaagtggcatgatcttggctcactgcaacctctgccccaccaaaattcaagcaattctcctgcctcagcctcccgagtagctgggattacaggaagataactttggcagcagaatgggaagaagattggatgggagagagatcaaaggctgggagattctaagaggctgttgcagtatagtcgaggtttgtctgccagtggagtccatgtttccaccactgtcctacatggcctctcctcacgaatggctccaacctcctgggtgcgatggatgaagccgggtgcagagatggaaagagcagcccaactttcctaactggaggactgaagcgagagctctcactgtcggcctagtgtggattgactcctttccaccacattccccaaccaaggacagtctataccaagctcacagcactgaggcgctgggggagggccagcccacacctagccccgtcaatcttggtggcatggactccctcctaaagctttctcaggaggccccatttcctactgcagcggggcaagaattcaggaggagcccactcaaaggggagacagaggcagtgctccctgtgagcagctcttcctcctcagagctgtcatggacaattggagagaaaaaccgggacattctccccaaccaggatattttgtatgctttgcacttactgctgcgttcccttcatctaaaagctctaaaatttcaaataaaaaggtacaatgaaagca

SEQ ID NO: 439 - DNA, 653 bp, Homo sapiens
aggctatctagctagggagtgatggagcccagatccgaatccagactgtaagctccttcagtgctggagcagtgtcattcatccatttgttcatttacggatcaaatatttaatgcataactaccacatgcatgatgctttgctaagcccttggggaggcaaagatgaagacatattccttgctttcaagcaggtgctgacagctgagccattccacgcaccttcggagcaaagaactgccggaaaccagggccaagttcagagcctgaaatttttttcaaaggctacaaggagaaacctggggggcctgatcacacattacataagccgtatgtgagcagaggatgccactgatgctaggaacccagtgcctgtcggaattgcgcaaggtttacgcagaagcacttaagtgttgcaacatgaccccacatctttaccaaaaatgtgaaacattcacgcagcacacactttaaaaacactaaagcttgtctccgccaggtggctaaggctgcttgatggggctgacaggagaggagctttgcaggggggcctgacttactgtagctcttggcccagggagctgaacacgcagtactttgtaccccaatagccctgggcagcccaagcctctgataaaatgtacttttctgtgt

SEQ ID NO: 440 - DNA, 2128 bp, Homo sapiens
attgctgtctctgaagttggtcagggcaagccactgggatttggggagcagaagtggacctgtcaatgaaagcagcattccagacaaagcaagaatggcaccaccgtttattgctgccagtctatctgaaattcctttgcccagctggtcgctatctataagacactgggaggagaaaagttccctctcattgaacagacatactaccccaaccacaaagagatgctgacactgcccacgttccctgtggtggtgaagattggccacgctcactcaggcatgggcaaggtgaggcagagaggcctgctgtgcttcagggttgaaccaagaagggcagttttcagagcgcccatttgtgaactgctattctccctctgtcactgatgaattctttccaaagagaagatgatttgccacctctaaagccatgagtgtcacccaaccagacctctttcagtcaaagtggaaaaccactacgacttccaggacattgccagcgtggtggctctcacccagacctatgccactgcagagcctttcattgactccaagtatgacatccgggtccagaagattggcaacaactacaaggcttacatgaggacatcgatctcagggaactggaagacgaacactggctctgcgatgctggagcagattgccatgtcagacaggtacaaactgtgggtggacacctgctctgagatgtttggcggcctggacatctgtgctgtcaaagctgtacatggcaaagatgggaaagactacatttttgaggtcatggactgtagcatgccactgattggggaacatcaggtggaggacaggcaactcatcaccgaactagtcatcagcaagatgaaccagctgctgtccaggactcctgccctgtctcctcagagacccctaacaacccagcagccacagagcggaacacttaaggatccggactcaagcaagaccccacctcagcggccaccccctcaagggggccctgggcaaccccaaggaatgcagcccccaggcaaggtgctgcctccacgccggctcccccctggaccatcactgccaccttcctcctcttcctcctcttcttcctcctcctcggctcctcagcggccgggcggccccaccacccacggagatgcaccctccagcagcagctccctggcagaggcccagccacccctggctgctccaccacagaagccccagcctcacccacagctcaacaagtcgcagtccctgacaaatgccttcagcttctctgagtcctccttcttccggtcttcagccaatgaggatgaagccaaagcagagaccatccggagcttgaggaagtcctttgccagcctcttttcagattagctcttcagacacacggggcacccagcccaaccgggaaaggcatctaagacattcaccaacaacagtcagccagcttggtggttatgtcccatgaccttgacgtgtgtggtcccttcctctgctctgttgtactaagtgatgttgtgcagcccagaaaggaccatttgacagtctcagggcaggtgcctacccagcaaggggtacctggcatcagagaggaaagagctgcttccctgtagtcatgagagcttccttctgaagtcatcgttcgctgtgagtttagtggccttattgtgacagtgccatcatgtcttattcttccctgtgaaaccaggattaatcgtggactcctggcagcttaacctagctcagttgcagtgctaagcatgccccgcccccattcagtgatacctgtttgggaagtatatacttccccaaaagtactcttggccctaagttttaggaactttccccgacctggatcccttgtcatacctgtgttactgtttaaagcacacccacccaacttacaagatcttaggctgctgtggtggtgaagcaccttgagtctgctgatattcgggagaacaaggatctgcagtttccccttttctcccctctgaagagtggttcttatgtgcaatctgcagtaaccttgaactccagagctgcactatagaggagaatgcatgccactatgacagcagtatgccaagctttgtgttcatctcctaataaacgttaagacctttggtgtaat

SEQ ID NO: 441 - DNA, 666 bp, Homo sapiens
cctaaatgactgacactgaatagccatcctttcaggagagagtccatttcagacccacaggaagtatgaccttagtctcaagacacctttatcaaaatacaacagttctaatagctgcctaagacttattcagatgaatctttttgttatacaaccacataagcatatggagaaagagaatattttgggaagtacctgtttatgcaacatgttttagcctttcagatagttcctgtggtacacatttggcttgtacactcaaaagatggacgtgaataccactctatcagagtaagttcatgaagcagccctgagagagaataaactagaacccatggggcgtagcgtgaaggacagcctggattgttcctttctcttaataggcttgtaccaactggactgcattttctgtctagttttaggtgaagtagatctttcagaacctgtcctggcccaaacctgaaaatggtcctgaagtcacaatgtctccagaatctaggagtgcctctctgaagtgcttggttgagacggaattttaccatgttgaccaggctgatctggaactcctgacctcagcatgaaaatccttacaagatgccagcaccatgctcttggagttcccggcttccagaactgtggaccaaataaaacactattgtttataaa

SEQ ID NO: 442 - DNA, 508 bp, Homo sapiens
atgcctcgccctgcttcggctcgcgcacggtgcgcgcacccactgacctgcgcccactgtctggcactccctagtgagatgaacccggtacctcagatggaaatgcagaaatcaccgtcttctgcgtcgctcacgctgggagctgtagaccggagctgttcctattcggccatcttggctcccagttgtgtggttttaaaactttgaatatatcatctcattccttcctggcccacaaggtttttgctgagaagtctcctgacatccttatgggtctggaaataactgggaaagaaaagccttgtggaaagaagacatctccagttcttgaggctgggaagtccaagatcaagatactggcagttctaatatctgggaaaacatgctgcttcttcaaagactccaatttcagatggcaaaatgcatggaagctgagatggaccttctggagttttcgataaaccactgtagctcagtcagaggtccaattatgatgatacccacacag

SEQ ID NO: 443 - DNA, 2658 bp, Homo sapiens
tttcttttccggaccctgcagtggcgcctaaagtctgagagagggaagtcgcctctgtgctcatcagccaatcagtgtcgccgcggttcctggttctaaagtcctcgccggcccaccgggactcagattctccccagacgccaaggttgcgggtcatggagtcccgaaccctcctcctgctgttctcgggagccgtggccctgatccagacctgggcagattacaattacaatcaaggcagaaatgatctcatttttacattacaactctggaaaaggcaatagactgagatgcaagtgtgcccccaagtgatgggcagaaggagagaaggtgttttggatgcattctagaacacaggtaatctaaggagagttgatcaaggccgtggaagagtcctccagccactattggccatcaaaggagtcctctgtgtcccaggaatggtcctgctttggtgtccctggtgtgacccatcacccgctgggaacagcctgagagaagtagggcctctgcaccaatgctgctgaggatgtcagagcacaggaacgaggccttgggaaattacctggaaatgcgactgaaatcttccttcctgaggggtctgggctcttggaaatcaaaccctctcaggttgggtggctggacgattctcctcacacttacaatgggacaaggggaaccaggaggcccccaaggggatccctgggttccacacgaactcctcctaccctcattgtgtgacagcagccatgcctcctcctggggatcaggatctattacctgtgcctggagaggaggggactcctcttctcacccgctggtctctggacacatactgtccaattcccctgtggcagctgtaatgtgtagttcaatgggcactcatttgtccccttttaagggtaccctcctttagaatccaggaccttctaccctgcagagtgtggttttgggagagaagtgcaaaatcccacgacaggtgagttgaaggaatgggatatggagccacatccacttccaccccttggtatctggacccacgtgttcttcctactgagattacagaactgtagagatgtctttgatttttaaaatgcaccatgtcctgaaagatggcaccctcccacccgcagagtgcttcctgcaagctggcgttgagctgtgcctatagaagctcttttcaacattctttatggccagcagcccttggttggtgcagatggtgataggaccagtgggtcccacagcatggccacactgcacctccttcgctgtcaagtgggtcccccacgaagatactgcacggagagcagtgccaagcctgtggatcaggaatatcaacagcccccagagagtggtgctggctgagggtctgagagcaggacaggaaaacccacctatggaataggtgcctatccctgtgaagatgaacctctggcccttccaggatggaaggagtgcaatgtagtcaactcctcacttagggtctggttggtcacctaaagaaatagagccctaccagggaagatcattgggttcaaatgctgatgagtaggacatttagaggtggcagtgtctggatctaccttggtaggagggagtcagtactgttggacccataggtagcctcatccctgccactgtgtttgctccatttatgtacccatcctacccggcctgggctgacccatggggaaggctggctaatttcagtgcttctgcttggttgttcagggccatttcaggtttgggtgttttctggggatgttaacatgggattcaggctcaactcacaagaaacttttccatctcatgatggatgctgttgggcatgtccaatgtatgacttcatgagttacacagatgctaattcgtaggggcacttggaatcacatggttgttttgtgtcccatggtcaagcattctatcttatcagggcctacagtaacatgccaaaagttgcttccaacatatttctctgctttggatggggcatatttctgtgctgtggatgacatggccttactccagaatcccaggccctccactgtgactctcctactggtgcttggttcagctccaccccaaatcttaccccaccactggcactttcagcaccagggggtctgaaggatggtgactgcgccatggcctggatctgctgcagtgtcctttcctgtggaggctccactcaaagctggcatcctcctatgtcacctagagtgtgggtcaaagcaatacacctacatgtagaatgtgatgtcagaactcaaacaggctcaccaggcagtgtgcttccttccttgcatgaggatgcaagatgcaacagtttgtctttcacattggaagggacacccctggatgcccctaaccactagacctgtaaaacttcactgcagtggccacttctgaatctctgtaaggtttatttatcttcaccctctggagagaagatgttttaccaaagcctctagtgtaccttcctcctcttactcatccatcccagtcaacatgatgttgtcaatgaaataaaggaatttaatattctatagtatatccaggttctccagatctcttaagactgtactatagaggcctggggaattataatagccctgaggcaaactatgaattaaagtgttgtggatcccacatgaa

SEQ ID NO: 444 - DNA, 568 bp, Homo sapiens
agcaaatgtgccacgtcaagactggaaatcacagcccttgagtgtgtctcagtcagcgcagcagaattcaggggggaaagctgaatgcaacccctggtgcaggaagggaggcttttcctgaggaccgggagaggattttaagttttgcacactagggaccaagaagccctcggggacactgctgagaaaagactgccgaagggaagaccagcggggatcatggaatctattccagaggaaactaaccaacagtgagcatcttcaactaaaactacccctggatgtaataagtgttgcatgcatcattcctttaattgagcagagttaactggatcaaattatttatgggagagagaggaaaagttataaagaattatagtaatttttaatttccaccaatatactctttgtaagtgaatcactctataattactttctgttgcactgaatgcagcaacaataacacaatagtattttaaggcactggtttttggcatactctaaccttgtaattatttaaataacagccaagtttactcatgtttttgattctgtcaagaaaaaaaaa

SEQ ID NO: 445 - DNA, 1969 bp, Homo sapiens
actttgtcgtactccttccttgctgactaagaggaacagaacacagagcagcctggcggtgtcctaccaacaagcctccgtttctccttcctgtacactagggctcctgaaactcacctgatgaagtctccgtctgtcacccaggctggagtgtaatggagcaatctcggctcactgcaacctctgcctcccaggttcaagcgattctcttgcctcagcctcccgagtagctggaattataggtgcatgccaccacgctcggctaattttttgtatttttagtaaagacggagtttcaccatgttggtcaggatggtctccgtctcttgacctcgagatcagcccgcctcggcctcccaaagtgctgggattacaggcgtgagccactgtgcccggccttggtttctaaatactattttgaagtatctgtggagaaatggttacttcgagggctggggcaggaatatataagataacattggaacaaattctgacgccagaacatgaagaaatatttgaaaaaggatggggcatattgactgaacacagaagacaaacatgcatgacctcagcctaatcgtgagaaaacatcaaagaaatccaaattgataaacattctgtaaaataattggccatgctcagcaaaagtgtcacaatcacaaaagacaagggaagaataagaaacggtcacagcctggaggaatctaaggacataacaactgagtgcaatgtgagatcctcgattcgatcttggagaagaaagaggacgttaagagaaatattgacaaaattcaaataaggtctgcacattaggtaatggtaagatacgttgacatcaatttcctggttggatacttgtattacatatactattatgtatataattattatattacaattacatatacagttgtatattatatataatacaataaatgtatatatatgattataatacaataaatgtatatatacagttttatatataacaactattatacatataatacaattatatatatagctaacatcaggataggctggttgaggatttatatgaatctttgctaattttgcatgtttaaaattatttcaacataaaaaaattatatgggtcatgtagttttttgtgcagtttaattctaggcaccatagtttctgttttaatgggtgtattttcttctttcaaggaattgggatagtctgttgtattaaaaacctattcatttttgtacattaagattcttctggccaggcgcaatggctcaagcctataatcccagcacttgggaacctgaggcaggcagatcacctgaggtcaggagttcaagaccagcatgtccaacatggtgaaaccccatctctactaaaaatacaaaaaaaattagccaggcatggtggcacatgcctgtaatcccagctacttgggaggctgaggaggagactcactagaactcaggaagcagaggttgcagtgagccaagactgcgccactgcactctggcctaagcaacagagggagactccatctcaaaaaaaaaaaaagattatttctctaacttactggtttatcttttatagcttatttcaggtgatttgttgtgtttgtctatagagtaaaataacatgtctaatgagttataatttaatgtccttccattcaatcactgtatttcaaatttattccaatattttggaataagcttccaatattttaacttaaatagggaaggtcatacttggtattttcctgacctcagctggaatgccttcatagtgttcacatgaacacatttggcctgagagagacttattatgccgagaatgtgtgtaaccctttttacttaggaattgtgggtggagtttttccccccgcccaagaatgattgttaatttccgtccatcattttcctttgattgttcttcatctcgaaaacaaataataaaataataaaataaataaataaaa

SEQ ID NO: 446 - DNA, 920 bp, Homo sapiens
cggataaggggtgtggggtgcggggacaatgggccagagcttctcatgcagcctgcaccagcgccgggtcggagagtcagaggccaccctgagatggaccgagatcttcagttggggaggcgcctccggtgagcttgcggccagatgccccctcagtagtcctccgcaacaggtgccgcgcagccgagtggcgggctagcataccgcctgcccgcaattcggccaggcctcgagcctgctccgccttcccgctgcggtagcgccgccggggaaacgccgccacgggctgcatgggcagcgctcgcgccccgccgctgagccgccggggagccgtccagtcttcgaatcccagaaacacaaagatggtgcagacccaggccctgctttgactgggagaaagatgcattcagttgactaaaacttgaacggtcggctccaccagtgcaaggattgtgcctgtcctcttcccgggctgatcttcccctgtgcctggaacagcacctgctatataaattatgtgctggatacacacactcgaaaagcaagagatcaggctccctgagaaaggcagtttacttctatagaagggtgcaccctcacagatggaccaatgtgtcaggagaattcagtcacacccaaagcaggagatgcgggaggccagatgcgcaagatggacactcggctcctccttcgtccccgcctctcctcgcttccagggtagcagcctcaacaagggaaactattgttccagtggaggctgcgaggatgtcggtgatttacgcgccgagctgtagctgcaaaaggacaagggcaagtgccggcccgacctagggcccaccggtctctggcttgctcttgtgagtaggtgcaccctgcccgcttgtggtggcctcaggggtaagaaatcaggacccacccag

SEQ ID NO: 447 - DNA, 545 bp, Homo sapiens
aatttgtgatcaattttacctgatggtgacagcttggtgtataagttagtgctaatgtatattactgcatttcatttctgtggagcctgtcagctgagcaaaggagggaaactcaggatggagaactcctccccctccatccataagtggcacaccactggcctcctggtgttattaaaggaaaattggaaaagtttccagaagattaagcagaaagcttacaacttgcacaagactctcaattttccagtggctctgacagaaggataaatcttcggctgttttaactaaaatggacggtcaagttggtatccatcgtgaagctaaatgaatatctggacaggagtcagacaaagggaaggagaatccaggggaagatgaagcagctgcaggcctgtctgctaccctatatccggggaagagccagaaagcctcctgggtccagcatccctgtcttcttgtcaacttttcaagtaaagtaatgcatttcattacattttggatgccacaccagtttaatcccattgatagagggctatgcaatc

SEQ ID NO: 448 - DNA, 763 bp, Homo sapiens
caatcatgtaatcgttcagttacttcaaacgtaaagtaggctcagatttattttttcctaacaaactggttctagtccactcaagattctatccaaaaagcagtatttagcacttttcaggctaattccaaacaaacgaagattaacagatcatcagtttagcttcacacatgaaattgaaaaatgaattgctggtcaaaatgctaaaaacacaaatgtgaaatttatatgtgttccttgttcctaaatattgaaaaaatatcaactaatcatcaagtttgccaaagcaaaaaaaaattgaaatataattcctagttaattggtttaccattcattattacttctctttgaattcagtaacttatcaatgattaaagatgtgcttcaacaagttaattctttaagttcaaataactggaaaccattttctcaatggtgcagcatttcttaatgtcagttcaagatgtttggagacatattgctgattttagaagctgatgtgtgctgatttatgaaggaattgtttagcttgtactctgggctctgatcaagggagatacactctcagatacagcctggcatttaagggtacctctttcctagctgattatctgcttcctgagttcagttgtaatagcttgcgagcttctcccatcccatatgactggattctgatttcttattttctgatagcagggtaaactttgttctcccttattactaaacgttgacttgacaaataaatagacctcctgcattttaa

SEQ ID NO: 449 - DNA, 432 bp, Homo sapiens
cacagggcctaggtgtcccaggagcccaggcgctgcagccctaggggacaaaggggaggaggaggcgaaagaagtcgggaatgattctcctatcctaccaacccgtgtgatggaccctggaccacaagaagaggaagcagttaggggcagtggagtcaccctggggttgactgcactcatcatccacaggatgtgcacacttacttcacagacactcttctgcagtctcaaaatctcacccatcaactatgacccctcctacctgctgccccaacaacatatttaatcagcagctaacactatgtagccccagggggttgcagcgcctgggttcttagggggatcccaggtccccaaaaggagtttagaatccaaactgaagagagcagacaagcacatgagaaatgcgaataaaactaaccacatctaagg

SEQ ID NO: 450 - DNA, 287 bp, Homo sapiens
tggacaaacggcaggcaagccccctgtgctcctcgctggattgagcttctagagcctcagagatggaattcgccgttttgccgcgatttggcgttaacttattgacccatggggaggagggtcacttcccgtgaaaagaaggcagagatgttttgctgtgcccagtgtgaggaagcgaaggaaaagaaagatcttttgaaaatgtgtacatctacttgcagcttgaaaattccaagtgccagacatttttcttggaggaaataaatgtcttcaatttattcatctta

SEQ ID NO: 451 - DNA, 202 bp, Homo sapiens
atccagataaaaagtagaaggtttagagatattgatgctttggcaagatccattccgtacataaaggcaaggtccagctctgtcacccacactggacttcggtggtacaatcctagctcactgcggcctcgaacttctgggctcaagtgatcctccagattctgacagaagatacagatggaactcattggtcagagatcac

SEQ ID NO: 452 - DNA, 227 bp, Homo sapiens
ggaaaggagcatgcgctggaagctgtgtgctgttggttttgaggatcttcagtaagctgaaagcggagagtcaggggccttgtgtcctaccatggtatttgctaacgtttagagagtgcttccccttgccgagcactggcaagaaggccctcaccagatgccagcaccttgacattggactttccagcctccagaaatgtgagaaataaatgtctttactttataaa

SEQ ID NO: 453 - DNA, 474 bp, Homo sapiens
ggcttccgttcgcggactttggcccaggcgcgtgggcgctgccgagaggctgggagcccgggaaccggttcctggacttgagcggagcgagaaagagcgcgccgcctgcacgactggactggagcggccgggtgccctggaggcccctgggaattgcagtccttgcgcaggtggagagtgagcccttatgagaaaactcaagactcagaaacaataaaggttacagagatgaaattgacagagcctgaatttcaggttatgattctgtatggtttctttggtgctgcattagacctgagctctgattgaaaattcttccacgctcgctacattccaaaactttatctccaatatgaatttccagatgcctcacaaggtctgagctccatctgaaggctttcccatgcttgtcacattcatagggcttttctccactatgaattctatgatgtcgaataaagtgtgagctctgat

SEQ ID NO: 454 - DNA, 574 bp, Homo sapiens
tttcagggactgagccttgccatcttctaagggttcaaatgtgcctttatagatatttcactgaactaataggaatgagaagatattatctcacatttggcaagttgctatgaagtcataacttaaattaagcacaaggctgatgttctcaccataagacatttttgtacaagactaagaactcggcatgcttttacattggaaatttggtaattaatatcagcatcctgattttccattggggagtaagtcaaccttccttggatagtagcatagggacctttattgtacataagtaacctggacttggacagagtcaatgaatttatccacgaatgggtatctgccttcagtccagtgaaaatcaaccaggtacttctgtacagcccgagggggaatatgtccttttctctgcctgaagttgcccatggtcatgtttgtgattatacggggtaaactgagaataaaataatcacatacaaaagaagaatcaaaaaaatgagatatgatcttgataacctaatttaaactctaagtaattctcataacaggatttagtgaacattctaaccct

SEQ ID NO: 455 - DNA, 311 bp, Homo sapiens
cccagaagctagctgggcctgagctggacatttagtgccagaagattctcaaaggggtccctgattcagaaaaataagaaccactccacagagggactgctgagattctgagcgtcgcaagccttctggagttctaaatggtgctcctggcagtcccctctgtgggtctctatgctgcagaggcaaagccatgtgtcctcatcccgccctgcacctggcagtgtgactgagaggggaagccaggatggggttcctgttggatcccacatgtgtttcctccctggcttgtggaagaaaatgtgttctccaaa

SEQ ID NO: 456 - DNA, 391 bp, Homo sapiens
tgccgtggccaccagcctccacctttcaacagccagagcattgaaactaccttctttcctttaatgtaatcaaattcttgggcagagttgatcgtaatcagtgttgactgtttgttattttaaatagtaattttttttcttatcctggcaaagttcatctccttgtggctccagattttcagtctagttattttatgtcttccaccatttgtgtctgaaaggttaaatgtggtgcctttttttccttaccgcatgcataaatgcatgtattttctgtatttggacgtagaactctgtgtgttgggggctgggataaagaaagaggcaaccatctttggctgatgtgttagagatatgcttactttacaataaacaaaggctctttgtgaaa

SEQ ID NO: 457 - DNA, 762 bp, Homo sapiens
gcggagggtgcggccagcgcggtacccgccccggcgaggcgctggggaggcccgggtggggagaagaaatggggcctgggggacggtaggagcctccgtgcggagaccactgttcaaggccacagacatttatgcagtgtgtgattctttctaaaacaactccctggaagagaggacatttaattcaacaatttattggccacctactgtgcaccaggcagtgaacttggaactggggctactgggttacagcagtgaccaagacagaggtccctgttcttaaggagcaagtgagggcaacagaaaagagcagtcagctgtcatgcgagggcactcaagcagccctgtggaaagctctacgtggtgagaaactgaagcctcctgccaacaccaacaaggaactgagacctacttccaacagccatctgagtgatcgatccatcctggaatcagatcctccagccccagtcaagtcttcagatgactgcagccctgaccagcatctcaactgcaacctcgtgaatgaccctgagccagaaccatgcaactaaactctgcgtggattcatgacccacagaaactgtgagatggtagctgtttgctttgttaagcctctaagtctggaaagaatgtcttaagcagtagcagacaatgaacacaagattattattcagctgttgaattggaagaggaggggaagaaaaaattttcagatcacaaaatattcattgtgtaaaacttcaaaaattctgaaatttaagg

SEQ ID NO: 458 - DNA, 2374 bp, Homo sapiens
tcactgcaagctccgccttccgggttcacgccattctcctgcctcagcctcccgagtagctgggactacaggcgcccgccactgcgcccggctaattttttgtatttttagtagagagggggtttcaccgtggtctcgatctcctgacctcgtgatccgcccgcctcagcctcccaaagtgctgggattacaggcgtgagccaccgcgcccggccagttcaatggattttaaaaattattattctctagaaaaaagaccacgaactttggagtggacatcctgagacctgcctacgaagaccattaggtggcctccagaagacactcccctgattcctacaccgagggaacacacagcagcaagctaggaaagaaggggtgacccagcccaacgctgtaaaccagggcgcgaaccggcgttgagctgtgcagctgcgccctgggctccagtcctgctctgccgcagaccccaccggagccagcacctgcctccccgaccctcgctggggcggctgtgagatgagcccagagccttcctgagccaaccctcgcaaggaaagtctgtctgttcaccccactatccttgtcttgaaggatgaagaaaagagggccccccgggaggtcccaaaaggtggaatggacatctgggatccaagcacagcaatttctttatttttcttaagcctctcactagaggatgaaaatcgttctgcataaaggcctgggctttatgaaaaatatattcacacctcccgtgtccgagctgggataccaaagaagttcctggttgagtactacttatgaatgaaggattcaggggatgcacaggacacagaggaatctgggggatattatggttctgggaatgtggaatgtaacgtctcatcttcagcccatctgtgctactgatcatctcattccagaagccatgccttctctcaggagcagacagcacaagactttcctgccagaggcacagtccccagtgggagtagcatccacataagacaggatgcagagatgtcttcaagcagcttcaaacaaaacttcaagaaagaaagtgcaagtgaaaaaggaaattcatccttccagtcacttaacacagcactgtcacggacaccttgtgcctccttaaaattcgtatactgaagttctaagccccagtaccccagaatgtgaccttctttggaaatagggtcattgcagatatgattagttaagaggagatcatactggagtgggctttaatccaatatgactggtgtccttatgtaaaggggaaatttggacacagacacacacaaggagaacaccatgtgaactgaagtcaaagatttgggtgatgcttctacaagccaagaaatgccaaagatgaccagcaaagcaccggcagctggtggaggagcctggaccagattcttcctcacagccctcaaaaggaaccaatcttgccaaagctttgacttagacttctagccccctgtgatggttaatgttaagtggcagcttgactgggttaagggatgcccagatagctggtaagacagtatgtctgtgtgcatctctcagagtgtttctggacaagatcagcatttgaatccttagagtaaagaagatctgccctcacccacgtgcatcaccctatctctggagagcgcgaacaaacaggaggaagggcacatatgctccttctgttccagctggcacatccatcttctcctgccccctgacttcagagctcctggttctcgggcctcaggattccagcacttacatgagagcgtgcttccccctccctactccacccctaggttctccgccctttggcctctgactgaattccaccaccagcttttcagggtctccagcttgcagacggcagatcgtgggacttcttggcctccataattatgtaagccaattcccataataaatctcctatctatctatctatctatccatctatcaatcatctatctagtctatctatctatctatctctatcctattgattctgtgtctctgaggaaccctaatacacctccagaactgtgagatgatacatttctgtggtttaagccactcagaaggtggtactttgtttcaccaggcctagcaaactaatacaagtgcatggaaggtgactactcatgactgcaacttagagaacaagggttataataaaaataaaagtgttatacaaaggtggcaagataaatgacaataaatgaaaatattaacatgtgaattaaaaagtaaagatatttttcctagcattctcccagaaagtagagacgcgtctctcttgtttgccatcatatccagcaatggcaagataagttctaggcacttcataaaaatttgttgaatgaaa

SEQ ID NO: 459 - DNA, 596 bp, Homo sapiens
ctgcaactgtcccatctgtctgacctaacatagtgggactgagatgaaagcaactgaacgtacagatgccgcttccagaccagaaccacctgagcacaggaggaaacaaacacatggactggcaagggaggagaatgggtttcctggctgggcactgggcaagtggacagctgcggcctgcccctctgacttggtgatcatctgccctgcactagccagaggaacctcgacctcccaggaattcttctgcttgcctgtaagagaggaggactaggtttgtgttcacaaaccaggctggggcctcctttggatggggaggcagtgggtctgaggtgggacctgctcccagacatgtcgtactgatgatactggtgcaggagggatggtgtctgctggcgcctctggttttaagtattaatagctataattttacaggggctgaagggaaaaagataaaagaatgccaaagaaattatgtctataattctcaacatctattgtgaatatacactagttttttaatgaactgcagttactctgaataccaaaaagcactaaaaatactttaaattaaaacttgttatcacatccacaca

SEQ ID NO: 460 - DNA, 2103 bp, Homo sapiens
gtgcactgtctggtcaagagcagtgtccatgtgcgtttctgtggcagcagtgcacgtggggtgggtggggggtgcgtacggtggggcttgtaggttaagatgtctctgcggtggtgtggggctggaggccgagccaggcacggcagctggccctctccaggcgcatggaggaattctccctttgccgttccaaggatgccgccgcctcctaccggggctcccgggggggtcagccaacactacaaagggcagcgagtcctcagggcgcccgggagccaccagtctgctctcgggctctactcagactagcgccaacagtctccgcggacagactcgcatcagccgccctggggctcggcctcctcccataggctcctcttcctctctttcattcaagtcttcaaactttgaaaaaaatatgagcttttgccaaataagacgggatagtttatggagttttctgaggcgcattgaactctggtcagcccctcgagcgtgggctcggccatcagcaggcccggtgggttggccgggctggccctcccaggctgcctttctctctggtcgcggcctggcccgccccggcctccaccgccgcaattcatgctggtgccgcgcccgcagccccactcctggtatgcctgagattctccaggggccaagccggtcctccttcccggcccactcttccagggccaggacgctcccgcggagccagcccatcgtggctgggggtcccaggggctggaggcctgcctggttagcctctgtttcccagacattgactcgaggcgcctccagtcctctcaaccccctgactttcaagtcctttcaagtccttgtgccctgaccaagttatgaggaaaagagggctgagggcctggaggtgggctcgcaccccctcgaacccacctagatgtctcctcctccccagcctatgagttcagacttggggggctccatctgtccctccctgaggtccctcatcttgtccctgctctgattctgtcagcagatcctgaacactccttggtggggacccatgcctccaaggctgcccccaatgccagctgtcctggggaaactccccagaactctcggggaaaggcccgagaaccttcggaggaagcctccgggactcctcgccacctgctctgtttctctcccggccccactgccttcaggtatcaggaagagggcaggcccctgtgccccctctccccttcccagggcggccaacaatactccaccatggggcgcttcctttcttctctggaaactaagacattggactgaaggaactggcctgaggggggctgaccgggggcccgtgctgctgggagctctacgcacaagaggccgccggggtcacggacaggaacctcagcccagggtgctggcctttctccttcgcaggagtcccccaaaatccacacagcgactcgagcagccttccactcagccagaggagggtcgggctcccccgcctgctctcggtggtggcgtctggcccttcctgccgtttccaaggcctccggaagcaccaacccagttctcagttacctcctctggccggaaggcctcacgttgtcctccagagctgctctgggcccagggctggctccgtgaccacctgatggacgtgctgggcagcatgggctcccaaggcagcatccccagctgctctcccaccccaccccagctgcccggcggctgggcccacgagggctctggggacacttccataggaaaggggcctggcactttgtgattgccacgtgtttcctgttaagccgcctgcccccagtgcaaatctctgtgttttgctctctcctgaacaaaaatgtaaaccgacgccggaaagcaaatggtatcgaatacctttcttgcccataagggtttttacaaagaacgtgtctcactaggaactaggacactcatcggcccgagaccaactcctggataaaaggaataaggagaatcgtgtttgtaacgagttacaggattgtttctttcctggattttaaacttttgttaaattgtgaaattatggaggagttttatagaaaaaaaaagtgaaataaagtcagatgggaaagcaga

SEQ ID NO: 461 - DNA, 861 bp, Homo sapiens
cgcctcccgggttcaagcgattctcttgcctcagcctcccgagcagctgggactacaggtgtgtgccaccacaccggcctaattttcttttcttttcttttcttttctttttattttttgagacggagtttcactctttcgcccaggctggagtgcagtggcgtgatctcagctcactgcaaactccgcctctcgggttcaggccattctcctgcctcagcctcctgagtagctgggaccacaggcgcctgccaccacgcccagctaatttttttttttgtattttttagtagagacggggtttcaccctgttagccaggatggtctcgatctcctgacctcatgatccgcccgcctcagcctcccaaagtgctgggataacaggcgtgaaccaccatgcccagccacgcccagctaattttctgtattttagtagagatgggatttcaccatgttgcccaggctggtcttgaactcctgggtccaggcagtctgcccaccttggcctcccaaagtactgagattacaggcatgagccaccgggcctggccccacggtgtgactttgacctcctcatgggaggaaaaagcaggatgaagcggggatgatgtctgtcggtcctcagcaggagcatctgccaacgtctccacattgtggacctgagattgttctccggaagctgcagtcggagcatcgccaggcccagccctgggtcctccacccgggccactgcctctcaggcggcctctccctgcccccgcccctccggggccccacagggcggccagtgcagacctgggtgtgcaacggccccatcagcgtttgtttcatgaacaaataaatgtctaaattcaggaccca

SEQ ID NO: 462 - DNA, 866 bp, Homo sapiens
tgaggatgaggaacatggtgttgcagttcaaaccagttccagccaaaatggactctagtcacaaacaaatagtaataacaatccaaacttgtggctgaatagagttctgaagttttgagaaagaggtgattcagctcaaaagttttgtttagaatctacttcctagtacccaccagcttaggctgagtttcccagaatcagatctgtgttggagatttgtgtgtatgatgtttattggggagcttccccagaaacaacacctttaagtacaggaaacaattgaacagggacaaaaatcctacagtgataaaattataacagaagtcgtaggtaatcctttggggctctctggagctaaaacagcttttccaaattgtctataaattgatgcaagaggaacacatcttcatacttcacgttaaacagtcactgggcacaggctaccctaggagaaagcttgtaaacttggatgaagtaggttcctttgacagaaagcaattccagaagagagatgtacctatgagataacagtagccagcactcccagaagctcacaagtgactgcctttgtcctgacagaggtatctgaacagtgcactatgccatccactacaacccatttctacgtttatctgtttattttaagacaataattagaataagctccaagagaacagagaccttgtctatctcatacattgatatccccagaatttacaacagctcagtatttactcaataagtatttgttgactaagtgattgaactgaatgagtaattaaagtatatttataggtgccacattttgtaaactatcacttggcatatcacagagaatactaataaatgaaaacacagattgggaa

SEQ ID NO: 463 - DNA, 388 bp, Homo sapiens
catagagtcccccttgatacggctgttcagcagaccaactttgttgtaaatatttagataaaaatgggctttagagcagccacatctgaagacccacaaggctgaatgttacacaggcaatcagaatctgattgaagataaactcatcctatttggatcagagcattagaagaaagaaagaactgacacttctcaaccttctctagttgaagacttctctttgctataactacttgaagagttcagcagaaaaattttactgaagaatccctgatcctcctttaagtagctgtagagaatattcactaagtgtaatgggacacgtctctctcatgcccacttcttttctcttatccctgcaagaaaatgaagttttgttggagtcaga

SEQ ID NO: 464 - DNA, 1992 bp, Homo sapiens
caggtacctgggtttctgtactaatattgcaccctgaattttgagaaatatttataagcacctactaacttcatgaggaaaatacctttgtccaagtgatcaactgttaaatttatatccctctacctatcaatgatatattaatctgttttttaaaaaaaggcagaaaaagacaaaaaatggaaaagtaaaatgggcaagagatttcttactttttccttcgcactttctggtatttcccagtttttctaaaactagcatatactattttaaaattataggtcaataataatacatgaatgtgctttccttgtaagaaattaagacattccagataaggctaaaaagtccctgttgacctctaatcctggattcctccctcatacctagagaaaatgtctgttaaatattggtatgcttttttttttctagatctttttcaatgcagagttatttgtggtttatatctatggcatcatgtgtgtcttgtcctaaaactttttaaagctcaatattgtatctttcactattttttatcttggtatgtgcaaaactactttatcagcttattctttttacctgcttcagagttttccatgagaatggacattccacagtttatacagcctttcctctatgatggccattaggcatctttcctttttttttttggcaattagtagtcttctttcattgagaagaattggtatgtcatttaaaaatttaattctagcttcctaaactaaaaaaactccagaaagctcatgcctcattctaatctcagaaagcactgtctaggcttggagatctccccagctgtctaagtagaaagcagaatgaggacttcagtgagcctaatccctgctctgtgttccccatccttccccgacccctagcccccaaggactgggatcaatattggaaacctgtgctttagttcttccacctctgctgctgctatgctgtgtgacctcagtgatacatgtgagtgaccacccagacggtgcctgaggaagtggtcctttccttgcggcccccatcaatagtctgcctctggattctgaacaggggaagctgaattgatggtctctgagtcacagttcctcatgaaaagaggtgcttaacaggagacactcggggactgaggcttcagggacccacccccccccgccaccccgccccacctccactgttctggtgcccctgaggccttcagaagttgttcctatttatccctacgacttctgagggctacgttgctatagcaacctgggtctgctgatctgtgtaaaaaacttatcaattagctgtctggagagtccatttaaggggtaacagagaagcaattactccttatagaggaagcgcaaacagtccccatttcagagcctctcagggagagtctgagaatggcaggtccaagtcactcattttagggacgggggcactgagggatgaaatgaactggttcatcccaagtcacaaagacaattagaggcaaggcatcctttctggctctgattcagaagctccattatctctctacctttgttccaggcttctcctttcccctcccgtctattctccaagcacctattgcctccaagatgggctctagactgtaagagccttgtccttcactctcccagtagcccccaggcctttgaaaacagccaggcagaccccctcacctgctgctcacatggcatcctgtggtggcccacgaagccccagtgacctgctgcctggctgcctccctccacggctctaacctctgtccccttggcaccagctcactatgaggtcctccctattccttaagaccaagctccagcctcttcaaaaacagcacatctctctctgacacagccactctccctttatcctgtgtattccttcacagctcccctccccatctgcaaccacactctgattgttacgactttgctcgttcccctctctggaataaaaatggtaaaactctgtctctta

SEQ ID NO: 465 - DNA, 754 bp, Homo sapiens
cctgcggagttggcggaggcggcggaggctcctccagggactggggcaccgatctgcgtagaaacgggtggcggggaagagaggggaggagagctctgagtgggaagcggaaccgggggcctgggacccgtcgcgtcagagccaggcaagtgaaccggagcaaacgacttccgatccagtctgcgctgttgcggctcccgtttgggatttgatttgcagcatctttgagcctctacgacaaaaaaccgcgaagcacgcccagccctcccccggcaccccgaaaagcacccactccctcccggggacacagctgggcgcgtccacacccccgcagccccacaccatgttgtgcggaaggacttccactccccgcctgtgtcgttgatgtcagaccccaggccagcctccgggcgctgcagttctcccggctaatgctgaggctgcggctccggctctagcacaggcaccagccgccgccgcacccggcctcagcgcccaccgtctgcatgtgcccgccgtagccgtctgcccagcccgcagcccgcgctccacggagcgctggagaccaccgtggggggccccttctgccctcgagagaagcggtcttggaggtattgatttaggtggttggattttttccgtggatctatcaattcacaattcgaatttggaagaaagaaggaaaacatgacgtctccagccaaattcaaaaaggataaggagatcatagcagagtacgatactcaggtcaaag

SEQ ID NO: 466 - DNA, 451 bp, Homo sapiens
agttatttaatatagcagttcataatttaggccatggatcatctctgcagagaatcctaccatgctgcattcttgctttaaacctttcgccctctaaaacaatgcccaagagccaatgttagtcatggtcttcctgtatttgctctaggtaagctgtttcatagccttccaggacaacacttgcacaggttatctttaagcaccaacaaaagaaatggagaaatttgagccatgtatcctgagctctgaaaggcagcaatcatcttgaccccaagcatacaccatgttcagcttcctccccttggccaggtaccacagctacttctatcccagtgatcagcaggccctccagcatgaagacctttgagaaggatctatagctgtcaactcctaatatgatttgtgcactatcaccttgaagtaaaccagactagttattttcatgctaaga

SEQ ID NO: 467 - DNA, 529 bp, Homo sapiens
cctggtcgcgctgtgccgggtgtgacactacggagagcagattacattatcaaaagcaccaagttgaaacatttgcaaggtgtgcatcatttcacaattattggcaatggttcaatggtttcatctgctttgaacggtttcttctctatcattaagaggtgaggaaactgagcactaagacactaaataacttgcccagggtcatacgacagacatgagaggtttatatcaggcagtctccacccctgttccgaagtcaagaggctgactcgggttgctacttcttgacagaccggaccccagatcgccgaagaccatttggacacacttctatcaaatcctggcggtctccttctaacaggtatgcagttttctctgtagacccttaatacacagataagacttgaaggaatttatctgcattccctgattggtgtggcaatggaagtcccgccctgcatcccgacactgagcacagctgcagctttcgcttgttcattcattcagtagatattattttcatgcctac

SEQ ID NO: 468 - DNA, 1744 bp, Homo sapiens
actgggcagaccttgctggccacggcctccacgtgcagtgaccgttctcttggcagcgtctcaggctgtctggaccagctgtcacagtctcgctgtgggtgagtcacctgaggcactgtatggcggatagaaggattcattgccctgggaggttttgcctggcattctgcagaagcattgctgtatcttaccagacaggaatacagatgaagacccccaggcccagggaattcgatcactggctgagaactcacagctaaggagggggagcctgggattccttcctggtgctcacacccgagacccttttgtcactgtgttcaaaggcactgctgcacagacgtgattcttctttcaacgaacatctccaggacttcctccggggtctgtgacctcatctataattaaagggaaagagatcttcctgagattagcccatttaacttgtttaactagatgcatgctgcaaaaactgttttcaagaaatgaacaattgactatttaaaaagagccaagccttaaaagaagaccaggttttaatagggaaaacattcagtaaaatattattctgcagtaacttgtggaatgactgctgtacacacagctctgggctgggtacctggaagctcacgagcttgtttggcctcccctcctggacacaggaggtgtcaaggctgtggtcagcagaatctacccagctggacactgagtggacgccctgtggggtggctgtgaaatgggtccactttgtagtggcagcatccctgatagtacttctgaaagggacaagatagaaaagcaaaccaaactgaaactgagaagtcgtggatgataccaggggcgcacagtggctgacaggaagagactgcctggggggtctcggagccagtggctggagtggagttagtttgaccgagtcctggactagggaggggacccccaaagcatgcccagcatggcgctagtggggcccaggcaccccatgtcccaacgactagaaccaataatcaggttaacactcattaaataagaagtgtctgtgcctcctgggataaaaatcctttataacgatctgggacgcgagctcaagtccctgttcccttgtcctccacagcagtgtgcagcgtggaactcggcggttcggggtccctgagtccctgagccactgtctaccccctgctccatcccaaatgcagagacccctgagcactcatgtggacatgccccaccatgccctggctgctccttcaggatggcgcagggccaccgctatgggaggactctaaagggtgggtctcaagccctcctctgcttaccctaaatcaggagagcaaaccgaatgcactgccctcttccttcactcctgcatcccatcccccgctatggcctcactatcaggtctgctgtgtgccaaaatattttaccatgccctaaaagtgagatgttggaagtggacaaggaggaaatatttatgaatatttgagtctgttattctttatgttaagcattttggcttctgttgtactcctaaatcactactgagagcagagaaagagctctttgtagaaatgagatgtgttcctgtgtgctgcctgtgacgcatcccgttgtcaccggagtgccgtggccctaaggaatgacagcattaaggcatggacgttaaagatggacaaaagaattgttcacggtgttgtattttaaaatgactatgtgtatgacaattaaactattgtgtcttcgttta

SEQ ID NO: 469 - DNA, 1602 bp, Homo sapiens
agtgaggtcggcgcccgccagtaacaaacatggctccctgaagccgctcaggctcaagagcaacatggaggtctgcacttaatcgctcctctccgggggcggccataccgaggaggcgtctcttccgtgcaggcaggctctcctggggacctcagagattctctccagcggcagcggaaaacggacaatgggtggattcgggtccagattctggtaggagggagtttgggatcgagatctggaaaaaagcactagactggaagaggacgcgatggagtcggagccgctggcggggacaaaaaccagaggccggggaaggcgccggtgggaggcaaggcacggatggactttacctgcgcacgcgtcgcagccatctccgcgcacagtggtggccaccgcgactggtgctgaagtgttggcgcgtgccgggcgctccgctgggacccgggttgctggccctgagtctcagctttctcatctgtacggttgggacaagtacagtaaccctcgcccgtcaagacgggccagggctgtggcgagggtccacgccttagagcaggtacctatcttgtgcagggccctgagatggggtctgactcagttcctgcggggaacttcaccagtgacccagtcagtgcccttcagttaaagaccaccaggagcacacttgcaggagtagggctgattggagccattgtacagtgtcgggaacataccaggacactgagaatagtgtcatgtcataaggacccagagcagatggaccctgctgtgatgcacaaagaggaccacgcaagatatgataaagatctacatcactgaattttggttccatttttgtatctcagcttccaggaaataaaaaagaattctaacattcatactttcagtattttatgtgagaggttttgttgtcaaaatcaagtctgagagcaatgtttgttggggcctttaattggagtcaccaagcgataaaggggacattgtcctcaacaataaccctataataaacacgttttggacaataaatatatgacaatttcttaaaagcaatttcttgggcaatcaagacagtatggcttgagtatggagttatacgatggtttggattaatccagtattaaatctttggttattacagaaatcaatggagcctattcttccaaataatccttaaatattacttatctcaactgagattttggtgaaaatttagctttagagcttttattgacctgccaatgacctgaagttaagattattcttttctactgaatgaagacaaactaccttataaaaattaacccagaaggctgtagagggatgaaatgggattttgttggcaccaagacctgattgctttgccagttaccctcacccctggctcacaaggaaagtgtatggaggagattctcgaggaaccacatgagttttaatatcataagcttctgccctgaattgaaagcctacatcatcctgtgcatttcacaaaatcctaatgaaaactacacgaagctcaaagtatagataaacatatcagtgttgacaaccgtgaaaccacgctatccaaaggctacgagctctgaggaattcctgttagct

SEQ ID NO: 470 - DNA, 558 bp, Homo sapiens
cacagggctgaaatccctaatgttgaagcttcctgaccaggaaaacgagcagagggcccagagagcttagccattacagaatggcttggttcgtcacttggcctggctcagccctgctttgggatgtgttgatagtgcctttcttggactaaaatccttgctctctgcctgtcgtgctccatgtcacttcagaatgccagagccagaaaaggcctcagagctcggaggccttgtgctgtggctttgtctttctgcttgcacctgtcacggctcgcttcagggaacagcgcagacccgcatgctcagctctcagtccggctccctgctacccctgtgaccaggagcaccttcatgtctgctcgccctgtgatttggagagtgtgtttgatgcgcttggcttctgctgatggcctatcctcccagttctggccagaggcagatgcggtgggggcctcttctccactgcccccctgcctgcacctccagcaggtggcccagtcctatatttccattgctttgctctttcttgctttaaaataaacaacaaaggcaacagac

SEQ ID NO: 471 - DNA, 686 bp, Homo sapiens
tataaatgcccgttaaagcaagagctcttgtgtttctgttcctgtggagtgcagctgaaatgaccgctactgctccttcacagtatatttacatgagcttcctgtggacatcagcaccatttaaaattaaggctggaacacagatgtggggctggaagtggagcagccccttttagccatgaggcccaaagccacatgctaaggatggtgaagcaggggatagaaagagcctgtgtctttgctgacttccttaagccacggcaccagcctgggcctgccctactctggacatctaaatgtcaggagctaagaatcaagtcagtctagaggtgttcgttgccatgtggagagatccttcccaagaagaaagatgctacaaagtgtcctggaaatcctctttgcccatccagatccaccctccctagcctgctctgtacctcaggaagctgcttttcatggttcacataaaccaggctcctgtaccctccagataggtccatcctatgggtggtaccagcaggagaccagagagatgaaggagggaaaaaaagaacattaggggttgaattgtatcaccccaaaattcatatggtgaagtataaccccttcggaatgtaaccttattggaaatgtcagaggcacgtgaaccagagcaactccatcttgaataggggctgggtaaaatg

SEQ ID NO: 472 - DNA, 584 bp, Homo sapiens
gtagatttctgcagatcgcaacaagcctcgactgcttattggcacagtctgcaaagggcctcctccgttccaaagttgctcatcctaaaacctgaaaaaaaaaatgactcagaagtggttcccatctcaagaactacccacgagtctcagtggacacatgtgagtatgagattccccgatgcagccttccaatccagcagaggttccaaccaacttccaaacaggtgcaacttgatggcacctcatttttggctgtaccagatgccttctatctctggactcctgccctcagacttctccgacacctgaagaaagcttctgggacagctgacatgcacaacctgggagctaaaacatgtgggaccagctgtgaccaatgaacaatgatggacaggagacgataaccccattagttccttacagtgctgagataaatttcatgagtctcctagaagatctgatgggattgaacatcagttgtacctagcatggccgctgtactggctttccttccttccctatttcatcccccctcgtccctcctactccttgggatcacattgacaaataagtctcttgcatgc

SEQ ID NO: 473 - DNA, 480 bp, Homo sapiens
ggtgaccacgtcctccggctggcgcagcagcaggaagagcaggaagtcggagatgagcgcgtgggcttcggggtgctgccgcagatagctggcgtggccgagccggagctcctcctggcaggggacagagcccgagcctcagccggacgggacccccgcgccccaggagcccccagccgctcgctccaaggagagctaaggggcgctggagccttctagcccctacgggtgtgcatttcaatcaggtgcctggagtgcaacacaacatgtgagagtgagaatcttcccagaccgcctgctatggactgaattgtctctctaacccccagtgtggtggtatttggagaaaggccatgtgaggacacattgagaaggcacttgtctgcaagctaggaagacagccctcaccagaaaccaaccctgatggcaccatgatcttggacttcctgccttccagcaaatatatttctcttgaagcca

SEQ ID NO: 474 - DNA, 961 bp, Homo sapiens
ggaggaagcggcgagggcgagccgcggggtctcggcgcctctgtatgcttgcacttaacgagaacccagagcgaacacgacccacatttctctttttgttttaagaggaaatataggagttacagcatagaattacaatatctggacattagaaataacaggtcccggtcacggtatggcaccgcgcgacacacttggtccctgaggcctggatgccgctcagcaaacgttcgcggaatagggttgggtttactgtcccccaccgagccggttgctcattcattcagcataattgaatacctcctgtgtgccaggcactgaatcaagtgtcggagacaatgtcctgccctcaagctcctggccggttacttgacaaccttccgggacctcaacgctatgtgcctactgtgtgaaagcaaagtgccaggtggaggacacaaagatggcgagcgacacaggatagtccttaacaattaagcgtgactaattttaataacaaatgagaatatgatgtgacatccgttccaaatcctgtcgttccaagtaacttcttaagcatctttcacgatacagcctctgcttgaaaggaattaaaacaggtacaagcatggaaggagacgttgctatcatatttcaagaataagaaaatgctgttttgtgtggttgtgcagcaggcaatgaaatgagcttacattcaagcttccgtgttttactgaaacaacagtcacagatgcagtagatgttaaaggttgaaagacgagtgcagtaaaagcattatgaggacaagaagaaaacgtaaatatttgtgttgtttcattctttgttgtggtggcagaaacagccccctctttctaaggtaactccaatataatgatctctcccagctttgaaatactccatgtctgtttcattttccagaaatatggaaaaatgaatatataataaaaaaccctatttctca

SEQ ID NO: 475 - DNA, 2010 bp, Homo sapiens
gcgcccaaggtcacacagctgggatgtggcagagctggggttccagctcctgttcccattgctggacagctgccacatctggcacccaatttaggaccccgcggggaggcccaagccccgggggtggcgggggatcctagaggaaagtggcaaggccaggaccctggagcagagccagagtagaaaactgaggctctgagagatgaagctacttgccaaggtcacgcagcacagtcacatcctactgaacatcatcctgttctctgggtggaatgtcaccatcgcccaggtggggatttttgtgtgttttgttcactgctgtacacccagcccccagcacagcgcctgtccaggacaagtgcccagtaaacacttgggaagcaatgcaagcgtcctcccagcagctcctgcaaacagacccccgacccaagcccttccttctgcctccactgccaccactgctgctcatctctgctggcacagaagtctcttccctggtcttccagaaatcccctctccacactcagccagagggagctattaaaactgtgggccagcccacatcagtccacagcaaagtcctctctaagggatctctgttgcttggagaataaaccctcggattccttccttggctctcggggcctcctctctgacctccctctgtctcctctcccagccttcctcctcactcaccctccagccatgctggcttcctccttgctcctgaaacagcctgaggcccacactgccccgggccctttgcactggctgtttcctctgcctggaacacttctcctaggcatccacagggctccctcccacaactccttcgggtgcccacatgggaagccatccctgaccacccccccgacttccttctgagcaaggtagggtctttctacctagtcatgagggcagggatttttgtctgttgtgttctctgtgtgcccccagtgccatcccagtgcctggcagatggtaagtgctcgacacacattggctgactgcctgaatgaacaactctatgagccgatggcagataaggacactgaggtcctctggggtaggtgaccagcccaaggccacacagctggtctgagattaggccaggagaggagcccgggttggtcacatcctggagttggcgtcttggaaactgcatcaggagaataacaaagatgagacgcaggctctaacaagtggataccagtgactctcgccccgccagccccagccctgcagccttgggcccttccaggagtcatggtctgcctgcctggggcattccaggcttcgacccaggtcctgcactttctattttgagcctcttagtcctgaggactgtgtgttcccagcaggcggcgcgggccagaggctgagcctgggtgtggctgtcaccctatctggggccagagacccagattcccgggcccttaacctgttggctgctgagggctctggcataagccctgttccctgcttgattgtctccccttcaagcccctgccctggtatcgtatcggcccatctcaccttggattatatccctgtttggccccatttgaatcctggctctgcccctttccagcaatgtgaccttgggcaagtcacttcatctctctgggtctcagtttcttcatctgggaaatggggacaataagagtacctgtctctggccatgtgtggtgactcatgcctgtaaccccagcgctttgggaagccgaggcgagagaattgcttgagaccaggagtttgagatcagccctgggcaacatagtgagacccctgtctctacaaaattctaaaaaaattagccgggtgtggtggtgtgtgcctgtagtcccagctattctagaggctgaggcgggaggattgcttgagcccaggagtttgaggctgcagtgagctatgattatgcccctgcacatcagcctgggtgatagattgaggccccatctctaaaaataacaatactaataataaataaaaatgaaaatgagtacctgt

SEQ ID NO: 476 - DNA, 1870 bp, Homo sapiens
tttacacgaacgcccttccaggactctgtctgcttttggggtggaagtgccctgccaaaaactccagctctccatgctggctgtgtggccagcatacctcctgccttttcaacgattcctctgccctggatagagagcggtgtctcataacagtttggaaactacaaaagtttccctggcaggatgaatgattgactcggcaacatgttcttgccttttggagttgccctccaatttttccaggcttgattctgtaaatcatttcatcttgtaaaaatactgggctgtgagcacggatgatctcaaagatgaggaaacagaagctgggatatgtgagtaaacatttccaaggtcctgcagctaatcaatggttgacaacttctttcctctgcctatgttgccatccatgtcatggtttgtgtcaagactctaggagaagtctaccatcagcaccacagctactgtgcacaaatccagaatgccagactgaagtcagaaggaaagatcctttatatattgaaagaagaaagtagaaccatttctgggtcccagctgtgggaagagctcctgtggctgtgaattctgacttctgggtcttggcacaaggtgtggccagcaagctaagctgtcctgagggtgtgcagggccaggggctgaagacagtgttggagcatccacagactggtttgtctcaagaagcatgttactaaatatgaaatagcaaaatctgcaagtgggtttacttttcccccatagattagaatggattcaatattatctctttattagcgtcacttttaatcacttgtataacaagtaggacagaaaggtggcttgaaagtcaatcatgtgagaattccagataaattgactttgctcacaacaatctgttattcatgtgactatcaactgtcatgtgtgctggggcaaaaaaagaagataaggattcactggtatcagatagttccaggaggggaaacccaggattgaactttttcagccttctatggtaaaatttcctgctctgtcggtgcgccaaagcttttttcagtttcctaaactcccatattcaagaagataagctattttctcttctttctcatccttccttgacaaagcaaagcatattttcattgtctactctgtgtcatccatgcttggttcctgtcctcaaagagcttatagttcaaataaaggagagggagcattttacaagggaattaaaggtaaaagattctgaaagccagtttaaaaagtcgtgagggaggggtctgggagaagctgagcaggggtgaaagggtacgaaacattatggaaggagaacaggggagcaccctgactactgggtggaaacaccaatcagtgggtagaaaccacacagtggtaacactgatcagtgggtagaaaacaatgacagcaggtatatgaggcatggaacacttggcttattgtaaagttttcaaaatatgcagtcctttctatccaccaggggttgggagttgtctttgtatatcaaccgtggaagggctgttttggttcatcattctgtggtctacctgggtagacctgatgcagccgtgtttctgaggaaaggaagaacagcttttgttttgtgatatgtaatggtagatgtagtgccatggaatgatgcagatttcattcagatattcttggatcttggccccaggactcactcattcttccctatatgagcattggtagttacaggttttatccttcctttaattgtaagtcttttgaagccaaaaactgtatccaatttgtcactgtctcctaacagtacttagcagtgtctgatgcatcatagggagtttgtaaatgtttggataaataaagggaaaacaaaaac

SEQ ID NO: 477 - DNA, 4218 bp, Homo sapiens
tgaatgaatggtatatgaagttgtttgttgttttttcatctttttggctagctcagagtgtaacttatttacccaaagtcacacaactattccttcacttattcagtcaacagatgtgtttcctatatgtcaggaactttctgtgttctggagataatggtgatctttcctcctatattgttgctaaggcacagacaagcacaggcaggtaatagacataaaaaaacgtgattttatgtgtggtaagtggtattcaagaaaataagaggaatggtatagaatgtggtggaagtaggggatacaaggacactggctaatttagaatgggaaaatccctctgagatgaggatattagagccgtgacctgaatgacctccatttgaagatcagcgaaaaatctatacgagagaaagcagtaagtacaaagtccccagtttgggaaatgcttggcacacctgaggagcagaaagaagggctggtgtggctggagcctaatgaaatttaaattgagaggaggatgtgtctaggccagtttatgtcatgcttgatagaccagggtaagaaatttgagttgtatttgagttgcaatggacagcattggaaggctttaaacaaggaagagacttttttttaaagaccgctggctacgatatagagaaaagactataatgatgcagagacaagttaagttttatctaagtagttatactgatttgttctgagggaaataaagtaatgcatattgtccttttaggttcaatctgagcgaattagagaaggaatggaaaaagttaccaaatagccactaacaatggcctaagattgtgaatgtggtggtcttgttttcctccttacttgtggcattaacaaagtgtatgagcttcctatttgaaatctgtggaatatgtatattgaaatctttagatttttttggtttaaatgcttttcagaattgacaaactgtttttcagttaatttcacatctaaattaaatgaaaacaatctcaaataagtacaattgctactgaaattgtcaaaggaattttgctgaggcaaagcagtgaaaacatttcccttctataaagaagttatgatgcttgaacttaatggctatgaaggttaaaaattttaaatacagattaatctctgtgctagtgtttagagagagatgacatataagaattttttggctcttcatgttattttaaatgctcatgagtaataccagaaacaggctttatttggaaatagatatactatttaagacaaaatttgaagagatttattttaaagtgttccatttctctttgagaaatattttttttctttgcctagatacctggcacagtgatgaacttaatagaagattctgtcctcactatgcatatggtctgtgttgtgggttcttccacataagcaaacaggtgaagattaagccaggccacccatgtgggggatctagcccactgccaagggtgactttttagggtgcttgggcctcatccatccttttataatcaagattattaaaacaatgggagatgctgtatgctgatctccagaagaacaaagaattagttgggtgttaaaccaagaacactaaaaatgcagcagtagccaaaattgctgtgaccaggtataggacagtaaaaggaaggctgtaaaaagaacctctgaggacccaggtgactctagctgttaatgtctgtctgtccttggatattgggaactgaagcagatgtctaagctgtagagctagagttgacatgagatagctctgtctcttcttgggtctgtggaagttgcagtctttatcgagtggcagtgattagaccactctaagacccaaggcttatgaggctggggagcttccagggtgaggaagaagcaaagtactagctactacctcctagaaaagatgcgagaatttgggagtggtgggaggaactgagagaccctgtgatttccagcaacttaaagagacaagcaagaccaggtgtccacctgggaagccatttttacatattttagaatcttggcttattgaacaagctcaggtctattgcttactaagcttctcttcttgctaagtttccaattagtaatttaagtcgtgctgtgaaggattgtatgcagtttgaaactccacagtccagattcatttgagttaacacctctgtatcccatatatgtattctcttaatacatcacctaatatttccaaagcccccccccccagtcactgtcatctggtcatcctctatcttctcacaatactttttcctcatagcactaaatagtacctgtcctcatattaagtgtctgtttattatctgcctccttccctggaatgtaagcttcatgagggcaggagtgcagttttgtttattactgtaacctcagagtagagaagcctggccacatagtagatgctagtattcgtttcctagggctgctgtaacagataccatacatgagttacttaaaacaacagaaatttattctttcacagtttaggtggccagaagtcccaaaccaagatataacaaattatatctgcaaagcctttatttccacagaaccacattctgaggttctgggtggacattaatttggcagggagtagtggggggacactaacctactacagtgctcagtaaatatttattgggtgaatgaaaattcagagtgtattctaagctgtaaaccccttggatgttttcatcacagtcttctcttaataactgctacagaacataaggattagtttgtggtcccagattttttaggctccaattctgcttctaccactttctacttgtgagctcttaggcaagctatttaactttgtaagcctcagtttcttctgtaaaatggtgacaataagaaataacagtaagtgcccaataagttttaactattattatgtgtctatagctattttaaagcactttctatatgtaatcctcataacaaccgtattaggtgagcctattacacttctcattttatgacaaaggaaactagatttgtttcaagaatgaaaaacctagaaaattatatgtcactttatgaagtgcctggcacatagtacatagaatagcttagctacaataatatagatatgtgactttacctcataactttaagacatctcaaattgattcacaaatcagaaaaaaaatctgaggcatcagatgtgaggtgaggtgaggtgaggcatctcagtttttgcacatatggttactgttattgagggagctccatgtcattgagggagctccacgtcattgagggaggactgggtgggatgctggccaaaggtaggggcatatttaggcagtgaaattgcagttatgggacccctctatagcactagatgtgtgagaggactaaaaataaaattcctttgaaatttcttacagggtcatatattacctccttcccaatgactactgtggtatattagagtaggggattgatgtcccagaaatattatgtacatcaaacagaagatctacacaaattgttttatcagatactgaatatatcaatgggctagagtgtattatagtacatatgggtatgttgttttcccccttttgactaaataaactctcccctctctgcaacaggtaaatttccagtttacctttttcttgctgtttttaattttttttattttgaaggctttgtatctttatatctcagctgaaaatattacattctaactccccaaagctattctcacattatttgcaagtattttttcatagtttacatgtttgtgtatttgtttaatacattccacaagactgaaagtcttggtgagggcaggaactctgtctaggttgttcatctggcagccagcaaacccaaaataagtattagttgaatgaatagctaaatagatgagccatggggtagcatatctgttttagctactgcttgcctgttatcatcctgggatgctgcttgcttctccgtgatctcttcttgttcttaaattgtcttcagttgtagtactaagtactaatttgatctgtaatgtgatatgtggctgaagtttgctctgtaaaatcaccgtttcctgaggtatattcaatatctttaatttttccataaatctcttcaaggtttgtgtgtgttttcttttaaattatctaactagttggatgtatgcttgaagtgctagacaataaaagtttcaataggcta

SEQ ID NO: 478 - DNA, 185 bp, Homo sapiens
cctttttggagacagattcgcagtggtcgcttcttctccttggatttgttaaggattccaagtaactcttatttggtgagtaaatctgctaattgttttttgcttatcagctctttgtcaatgatttctgtaatggaaataggattgaagagacttttattctagttggtcaggatttacctctg

SEQ ID NO: 479 - DNA, 1610 bp, Homo sapiens
ctgggaatcaatgtgtgaggtggtgctatgtagcaggaacccctcttgctttgcaaatagttttttgtttgttttcctttttgcccaatagagccctgctctactgacccttcaatgtgcccgtgtgcctaaatattcctggtcgtgtgaaaagaacccaggtattagctgaactaaggagcacaattctgcaacattttggcacccaaacacggggcttgagaaatgaatgcaattggagaaactggttgttttaccaggcgttgattggaaatgtgtgcttccctttaagcagtcaagctcaacttgcagaactgatgggaaccccttgggaaaactggcctcaaatgtttgtctacacagtccacatacagggttcttaacctgcggaaacactttctgaaaatgtcagaactcttgaaaacatggatgaggaaaagcataagtactgctttatgcttttcttatgaattttaaaagatgtaatttaaaggtactttaaagtgatatttgtgcccttgtaactgattcaaagtagactgctaaggacaataagtaataagagtctacaaatatcagtaaattatgagaaaaaacggtctaatggtacttaaaattgcattgtgatttattaaataacattgaacagctccacctgtaacattaagattccatttgagcatatagaaaatatatttatcgcaacctgaagtgatttggaaagtatgctgggaagaaaatatatttacaaattagtctcagagggtaggtatcctgtagccagatggaataagaagagagggaagggagattttgttcaaagggggagcataagctaaggaataaagccacaaacaatgattaaattaggtaaagtgcaattagctgaatattgcataagcatacatatgggaagaagtggaaaaaggagtgacaatatgaagctaaagggtttgaagtgttcaagataatactaggcttcctagcctattccgagacatcttgttttagagtgcaatagataagaactctaaggatgaaagtaggagacatgcattctagtctacgttttggttaatggactgaaagtgaaagatggactgaaattgggggatggaataaaaatgtgatagaatagaaaatagaaaaagcaattagcctaatgtcattgatacttagagaaaatatggaaaatagtaaattagtgatatatatcttttctaattcaccagggtgagtgaacaaaggaaatcggatttaaaagtattcatgacatagatgcaataaggtttctcagtcagacatagcaaattgagggaagggaagatttagaggattggaaaatgtcttgcttgtagactaataggatatcaataagccatatgagcaataatttgaaatagtttttgtaaagtatcatgaaggtaaaccctgtttagaacaaattagatttgaagtacttgtgacaaatgcaattgacaatgcctttatgcagctggaaaattgttgcttagcagaaaagcttgtgctggacaaatagatgtccaaattgaatagatgttttcttaagctgaactaattgagacaaatatccttattaaatcaaaaaa

SEQ ID NO: 480 - DNA, 444 bp, Homo sapiens
gagagagctctctggggtctctttttgtcaggatgctaatcccatcctgggggcctcaccgtcatgacctcctctaaccctaatcacctcccaaaggccccgcctcctaatactatcccacggaggggttagggcatcaacataagaatttggagggggccacagttcagtccacagcaggatgtgtgtgtgtggagtgaagcagactgaccgggcctcaacatcacctgggaatcctggaaggaaacaggttcctgggccttgctccaacctaaggaacccgaatctgcatagctcacatggcgccgtatttccaacgttcagagcacattggaaagttgggaggaaggatgaggcttgtgttttcactcacaaactccctccagaagatgataatgaaagtgtctgacgcataaggaaataaataagatggttatgtgccca

SEQ ID NO: 481 - DNA, 4083 bp, Homo sapiens
tacacataacctagcctatttatttgtatctaaaattccctagccgcaccatcaccgtaaacaccaagggaaaaaattaaggaggttcctggtgggaaaagggcgagttggggggacagggtgtctgcgaggtgacgggatacagaaaactagggtgtcaaaagggagcaagaacctgttttgggggcaacttaaggatccaagtgtcacggggtctgggcaatgcaggacgggaggggctgcgtgagtgagtacagaagggaaatgagtgagggggcatgggatctcagagaaaatcagggccctctgagcaaagtggaaaggacgaccgccgcagctcctcgggccgtagctcgaccccgccttcccttttgcgcagaatcctcgccttggctgcagcagcgcgctgcccccactggccggcgtgccgtgatcgatcgcaggctgcgtcaggagcctcccggcgtataaataggggtggcagaacggcgccgagccgcacacagccatccatcctcccccttccctctctcccctgtcctctctctccgggctcccaccgccgccgcgggccggggagccaccggccgccaccatgagttccttcagctacgagccgtactactcgacctcctacaagcggcgctacgtggagacgccccgggtgcacatctccagcgtgcgcagcggctacagcaccgcacgctcagcttactccagctactcggcgccggtgtcttcctcgctgtccgtgcgccgcagctactcctccagctctggatcgttgatgcccagtctggagaacctcgacctgagccaggtagccgccatcagcaacgacctcaagtccatccgcacgcaggagaaggcgcagctccaggacctcaatgaccgcttcgccagcttcatcgagcgcgtgcacgagctggagcagcagaacaaggtcctggaagccgagctgctggtgctgcgccagaagcactccgagccatcccgcttccgggcgctgtacgagcaggagatccgcgacctgcgcctggcggcggaagatgccaccaacgagaagcaggcgctccagggcgagcgcgaagggctggaggagaccctgcgcaacctgcaggcgcgctatgaagaggaggtgctgagccgcgaggacgccgagggccggctgatggaagcgcgcaaaggcgccgacgaggcggcgctcgctcgcgccgagctcgagaagcgcatcgacagcttgatggacgaaatctcttttctgaagaaagtgcacgaagaggagatcgccgaactgcaggcgcagatccagtacgcgcagatctccgtggagatggacgtgaccaagcccgacctttccgccgcgctcaaggacatccgcgcgcagtacgagaagctggccgccaagaacatgcagaacgctgaggaatggttcaagagccgcttcaccgtgctgaccgagagcgccgccaagaacaccgacgccgtgcgcgccgccaaggacgaggtgtccgagagccgtcgtctgctcaaggccaagaccctggaaatcgaagcatgccggggcatgaatgaagcgctggagaagcagctgcaggagctggaggacaagcagaacgccgacatcagcgctatgcaggacacgatcaacaaattagaaaatgaattgaggaccacaaagagtgaaatggcacgatacctaaaagaataccaagacctcctcaacgtgaagatggctttggatattgagattgcagcttacaggaaactcttggaaggcgaggagacccgactcagtttcaccagcgtgggaagcataaccagtggctactcccagagctcccaggtctttggccgatctgcctacggcggtttacagaccagctcctatctgatgtccacccgctccttcccgtcctactacaccagccatgtccaagaggagcagatcgaagtggaggaaaccattgaggctgccaaggctgaggaagccaaggatgagccccccctctgaaggagaagccgaggaggaggagaaggacaaggaagaggccgaggaagaggaggcagctgaagaggaagaagctgccaaggaagagtctgaagaagcaaaagaagaagaagaaggaggtgaaggtgaagaaggagaggaaaccaaagaagctgaagaggaggagaagaaagttgaaggtgctggggaggaacaagcagctaagaagaaagattgaacccccatttccttaattatttcaggaataattctcccgaaatcaggtcaaccccatcaccaaccaaccaaccagttgagttccagattctatgtgaattaaaaagtcaatatatgtataattctgagatgacttaggttggacattcaatgttgtgctatgaatttcctctttatgcagagtatctgtttgcttgcagagtggctttctggcttgctgccagcctgtgcatggaccacgcttatgagttcaggatctacggcaatgtgaatcattcagatgtttacaataaaaaacaccacatgagtaaatgaattcactaatgttaatgttaaacttcatggaaaaatagtcctttgaaccttcggtggttagcaattaaagaccctgagttatgtgcaataaatagtaaataaagttataccgaatgatgtattttttgctgtggttgttacttaattaaaataccttaaagatggcaccaatataaagtatataccagtggactattgacctccaattttttaaaaagttgaaattttaacaattaccaatacttttttttcttccttcaattggaaattctgagggatacagttatgtcatgattacttgtgaaatctctccccacaaaaattttactgataataaacatgagtaaatgagaaagtctataaataacaatagactttgcctcataacacgtgttgtgttaggttttgggatggctttctagggagcaattctgaaattacttgacagatacactctttatggtaaacaggtcatttcagagtctagagtgctaaccattacactatggaaccatgataaataggtcatttcaaactgatatgtcacaatgcaatatggatagaatatgaatcccatacattcatccctataactgcattttaaaatatagtctaaatatcatgggaggaggttaaaacctgagaacatggtacaataagaaggaataattttttatctatatataatttcaggagaagggattaaaactaccaaaggttatttgccactccactgcaaacatgttgcctgcaatcctgagctcatgatttagtgtgttgttaagcgtaattctgttgcctcaagtaaataccacttaatgctacacatttttaaacctttaaaagctacagacacaagtaatgaaattatgagtcacttaaggggggaggtaatatgcttgtatgttacattgacattgctctgcatgtctctactgggagatatttggatttcaatgatagcttgactggttggacattgcatcaaatacacgccccatgtatcctttctgtcgtaaagttaagaacgctcttgcatttgatgtggaataaatatagatgatattactatctgctattctgcctttgttctgaaacaattgctttgtcagctaatttcattcaatatttgttttttagacgatctctataagttattaatttaacctgaaaccaaagtggtctccatttaaagttacttaatccctttgtaccacctatttctagttaaatatatgttgctatgcaaataggtaaagtgcttccttgccatgatggtaatggattggaactatgaaggctctcagtgtattggcttctgtaaagatgaggcgtctcctcagaaacaaaacttttcacatttctgcttactagacctgggttgatgtacatggtaagtctcaaacagatgcaagctatgtgcaaaaagtaactttagccaaatggaaatagctggatgctttgagaattacttggttgaagtaagaaaactgtaccatcctctatcctgtgtgccataataaaatagtaaaaaacctaaa

SEQ ID NO: 482 - DNA, 328 bp, Homo sapiens
accctccccccacctccccttcttggccttcgccagtgtgggagcctcgtctcactggagagtccgttcaggcaaggagaagaaccgggggccggagcggagcgtgtttcagaggtgcgtataaaatcccaggggcgccaggaggcagcagcgacggcgcagcgtgggacggccaggcgcgacgggagggaagcaaccggttgcagtccggcctcctgtacctggctggcccgggctggggctgcaagctttccagccaaacttatgtgaagcaaagtagttgcagtttgacaaagaatggcgtttcaataaatgacatagtaatttt

SEQ ID NO: 483 - DNA, 2272 bp, Homo sapiens
ctgctcaccatttctgagccgatgaggactcacctgggctcctcactggtcagggaactgtggcccagccgcagagtgattgctttgtcaagaagggaaacatttacctttccttcttccctctgctctctcctaattaacaattaaatggaaggagttgaaaagacatgtcagagacttcaatctcctcccggcctgaggatgaagggggctcgaacctgaatgttctcttcgctgtggccagaacctagggggctggggttgctgccagctcgactggaggcctgcttccagccccaggctgtggtgaggggcctcacagatttcacaaacaggagggcggctgaccaagcgccaaactatttagacaaacacacaccctcccttcccgccagagtttgggctgatttctcccaatgctaatgaacagctcataagtattaatagactccttggcacctaggagtcaggcagagtaacttccagtgtgaattttggccaaggaccctgatgcagcctcaggatcttccaagcccctgttgagtccagggggcatgagacacacagggaggctggggctgctcccaggaagcaggctcacaagagccagacaggctcccacagacagcttttaggtcacagaaacctctgcctgccaggtaggcatgaacacagaaaccctcccaaatcctcagactgtggagcacactccaggtgagccaggatcaatccctggtctcagagaacacttagatgggggtgaaaagcaggaactgagagcttcccacccagcacctgtccctgctaccagctaaacctgtgtcggtcagtgcaggaattgtacaggtgatgctctgagcctgtgctgaggccatgtatggactgaggaaacctcactgtgtgtatgtaaagttaattcaaacctatttccctgagtgcttacatattttcataaggaaagttctgttaggagagctgcctgaaacaacacctctgcctgtgctcccactttctcccgctggtgtggggaggagaggctgacatcgctgggtccacgttcctctgccctgggtggggtattaatgctgccattcccacgctgcctgctgtttcccctcatcctcaggagggctggtctctgtgctgcaggcagctccaccaggcctgggagcatgacaccgtctgccaatgccttgcccaggtccactggcctcacccttccgcaggcctgcgccttctgtgactctctgcctcagcaatttctctggatttctttgtcctcaggaatgtgctggggccacaggcaggtcaggccaggctttctggggagtgaatgctctctgccagtggcggatggaactggtagacacgtcccccggattcctcgcctgcaagtgggatggtgccaggaaagttctacaccatccttcccaggtcccaggaggacaagcacagttgtccacaagggaaccaagaggatgttgaaaaatcctggttggatctgaacttggaaacaaatttgaggaatctattttacttaatcctactgaaaaattccctaatgagttaaagaagaacaaagtaaaagaagataaaaaagcagttggtacttgaaatgaagatcaaatcatcaagtcctatatgtcacccacagatctgagatcactgactcccagagacacccagtttctcagtgtcagtacacactgcctgggttagtaagcacaggctgagacctgggaggaattgatgaaccaaatgtgtctgggcttttcacttcctcggcatgagtcagccaagaaagcccacctctcctccccagcagcgtgcagggcctctgcagataaatgtgcaggatagcagacctgggtgtggtgctgcctggcactgagccagcccccagattctttggctgcagagtggcctggccaactcacacaggtagcgcccttttattcttggaaaaggaagcaccaggtggaaagggaggttaaaggagggaacacaacttttttccagacccctctgcccaggatgttaaaggttgctggaaaatgcctttggtggctttaaatgtcacagatgacatattccaggatggatccagcctccactggacttggcccctctattttgattcctgcctttccccagcctcagccctgagcggcataatatctacacggggttagctgcaggtggaactcagaacacagctcctagacaagtagagtgaggcctatggcttcatcatcaaaatgtaaaatttaaa

SEQ ID NO: 484 - DNA, 287 bp, Homo sapiens
taataaatacaattccggatttattaaaaatcagggctcccctgctgtgccctcctggcactaaggaaataaataaccagagggggcacagctaggtaaagggggaaaaaatcagatctcaagacagactctttgaactaccctttctccctccccaattcccacccccttatggctcttgggacatagcacctgagcaggcacctcagtccgtgtagagtgtgaccggcaccaaggcatgtctgccctacccaagaagggagacagggctgaagcaccaattggag

SEQ ID NO: 485 - DNA, 9557 bp, Homo sapiens
ccagcctgtgctaagaaaactgccccacatcatctgcagtaggacgggggagttggagccctggtcaggccactctgctactgaccacagttttctcatctctaaaaaggcgcagtaacaatataattaccgtatgcagtcccccaggatacagggtcaaaggagagcacaaccatcgcagttggaagcccatggggcagaagcaaggtctcgctgtgttaccctggctggagtgcagtggctacttacaggcatgatcatagcatactgcagcctcgaactcctggactagagcagttctcctgcctcagcctccagagcagctgggactgcagacacgcaccacagagcccagcctgagtcattttgattctgtaactggcttcctctcggcgggcaggctcacaccctccacccccagctggagatggaaggaggatgctcaccgcccattcctcatgcaggccatcgatggaaatgtcagacagtgcgagtccacgcctgaacacttctggggtccgctctgggactgacactggcagatccatcggtgagctcccgcctgccacctctgggcctgcattgcggtgatagggccaagggcctgggccttcaattctccagacttgccaaaatgctcagcgcaggcctcgtcggcaactgcagacaagcagaggcagcacctgggctctgcctgtgcctggcacagtgaagcgagggtgggggcaggaatgagggtcctctccatgcaaggggggaagatagaagaacaaaatttcaccctaatgtagtgtctttagaccgtgcaatgttgtgctcctgttagtctgatatcaggggcttgcagcctggcaaaggaaaaaaaacaggctgaggcacatgatagaagacaggcagggatgccacaatcataaccatggcaaagaccaggatcagaaaggcccaccatctctgaccccaaatccctgggcagatggttccagaactcagaattttcccagttgtagaaagatggggccaggtgcagtggctcacgcctgtaatcccagcattttgggagtacaaggtgggcggatcacctgaggtcaggagttcgagaccagcctggccaacatggtgaaaccctgtctctactaaaaaaaaaaaaaaaaattagccgggcgtggcgatgcatgcctgtaatcccagctactcgggaggctgagccaggagaattgcttgaacccgggaggcggaggttgcagtgagccaagatcgcgccactacactccagtccgggcgacagagcaagagtccattcccccaccaccaaaaaaaaaaaaaaaagaaagaaagatgatgtgatacatatcacatatttcctaacacccccaaccaaacacatttatgcatatgcataaagcagacgaggaaagattctaaataggctctgaatctcagttttctcatctctacaatggggcagtgatggcatgcacctcccagggctgttctgagaatctgatgcctcccattgcactggtgagcctggcacaggcacaggtcccaccccaggccctttgaactggctgttcctttggcctggaacattcctccccagatacctcctgagagggctccctcacttccttcaaggcactgctcaaatgctacctcttcacagaggctttccctgaccaccccgtctctttcctcttcctgcatagcctctgtcacctgacattttatgtcataaattactcatttattaatttcctgctctcccacagtggcacccgagctctgtgagggcaagactttgttcggttgtgggctatgcccccaacccctcggacagtgcctgcacaggtggacatttttgttggatgaaggattttctgttaaatgtgtctggcacacacagaaaaacaaagcccagcaggtacgatggtgattattattgttactggtggcgctctattattgttattagtgtctgttgaaaaagaccctgagctataccagcccttggttctccagcctgtgaaatgggcatcctgggcactgaggcactagccttgggaagctgatagggggtccctgcaggagagacaaagaacactgcccacccccccgggggagcctgcgcccctcaccggaaagagaagcaggggggagcagagggagcttgcagccccacacgcagggctgccagaaggccatacataattcattgccaaatggggctgcgggcggctctccgcggcgtgcgctgggggctcactctgcgcctggcacttcgctgactgcgcctcacacgttgcctcattgcatcttcatggatttgcagggtgtgacccttccccctgttttacccagggggatcctgaggctcagaggatggggccaccgtgctagtcacacagcctctctgtggccaagctgggcctcgggccagcagattcggcccccagcggcccccattcactgcctctctgctgagggaaaagacgggcctggggagcgggtgggaggcacaaaggagaccccgctctgagacaggctgcagaagagggagctgggtctcagcagggctggggaaggctctggccccagccctccgcccaaccccctgccctcctctcctggaggagatgctccccaaattagccatcatgagcgctggctctgggggttgggcgttggggagcagtttgctcagctgtaaaatgggaataacagaagccgtccctgggactatgagatcaaggtgctcaagaaaagtggtgtctgctgaggggaaaagccagtcccaaaaggttgcatactctcattctgtttatttgtttttgtttttgagacagggtctcgccctgtcacccaggctggagtacagtggcgcaatatgggctcactgcaacctccacctcctgggctcaagtgatcctcccatctcagaccctcaaggagctggggctacaggcacgtgccaccgtgtccggctaatttttgtattttttgtagagacagggtttcaccatgttgcccaggctggtctcaaactcctgagctcaggtgatccgcctgccttggcctgcgataaaattgcacagaagtaaatacacacacgtgaggatacggaaaaccggggaaacctgagcaagagcagtcagaccccggctgtgatggcgcccagtagttctgcgagatgttaccattggggaaactgagtgaaggcgggtacctgggatccctctgttttcttttttgttgttgttgttattttgagatgaagtttccctcttgttgcccaggctgggtgatccacctgcctcggcctcccaaagtgctgggattacacgcgtgagccactgtgcccagcctctctgttttatttcttctttttttttttttttttttggagacgctctgtcgcccaggctggagtgcagtggcacgatattggctcactgcaagctccgcctcctgggttcacaccattctcctgcctcagcctcccgagtagctgggactacaggcgcccgccacctcgcccgtctaattttttgtatttttagtagaggcggggcttcaccgtgttagccaggatggtctcaatctcctgacctcgtcatccgcccgtctcggcctcccatagtgctgggattacaggcatgagccaccacgcccggctgttttatttcttataactgtacaggaatctacaatgattgtaacaaaaatttcaattaaggccactctaggcacatggcctgtggggtagccctgctcaacaagaagccgtcaaaaaaatgttttttaattaaaaaatttcttcaattaaaaagcgttatcttcctctgcccggaaagggttaagtgagtcactgcagttagctccccttcccccacaaccacctagaccaggccagggaccagcgggcaattgcctggcagctggagttttcctccactgtggactgtacttcttgcgtcactctgaatgtctccagtctttattccagaatgttctggtcctctcccacttttccaaggacaggaattccctagtggggctccagaagaggctctggaggagaacaagaaaggcccttgtcatccattggcctcaggctgggaaatctcggttccactcccagcccagcctcaatattaggttgtcagtctggagtctgagagccatgcccccacccccttagtccttcacctccaggagagttggggatactggaaagaatgttgagtgtcagagcccctctcagtggctcacgcctgaaatcccagccctttgggaggctgaggcaggtggattgcttgaggccaagagttcaagaccagcctggccaacgcgacgaaaccctgactctactaaaaatacaaaaattagctgggcgtggtggcacacacctgtaatcccagcagctcgggaggctgaggcaggagaattgtttgaacctgagaggtggaggttgcagtgagctgagatcacaacactgcactcaaaaagtagttaattaatttagtttaattaaaaaagaatattgagtgtcaggcaatctgggtagaacccattgtgtttctacaggatagaatctgctgtgttctctagcggaacttccggatcaccttcaccgtatgactctagacaatccctgtccactcttcagttttagatgccccattcaaagaatgaaagaattgtcctagatgatcctttagggtcttccaggctgatgacaagggggacctggcccctctgctgctggccaaagaggactttacttcccattccgtgtggttgaacaagaattgctgggctccagtcctgcctttggcccttccctacatgtgaccttgggccctctttgcctttcagaatcaatacagtgagagagttaacacaagctcaggttagtaagtcattcaacaaacatttactgagcgcttatcaaatactgcatgctggagtggacactggagaaaaaggtgaggagaaggccgggcgcagtggctcgtgactgtaattccagcactttgaggggcagaggcaggtggattacctgaggtcaggagtttgagaccagcctggccaacatggcaaaaccccgtctctactaaaaatacaaatattagccaggcatggtggtgcatatctgtagtcccagctactcaggaggctgagcaggagaatcacttgaactcaggaggtggagcgtgcagtgggccgagattgcacctctgcactccagcctgggcaacatagtgagactctgtctcaaataaataaataaagtgaggagaaaaaaataccatctctgtcttcacagaacttatagtttgagaggggagaatcccacaagtaaattataaatctcagctgagattatgcaaagaagcaaaggccggacgtggtggctcacgcctgtaatcccagcactttgggaggccgagacgggcggatcatgaggtcaggagattgagaccatcctggctaacacggtgaaaccctgtctctactaaaaatacaaaaaaattagctgggcgtggtggcgggcgtctgtagttccagctactcgggaggctgaggcaggaggatggcgtgaacccaggagcacaggttgcagtgagccgagatggcgccactgcactccagcctgggcgacagagcgagactctgtctcaaaaaaaaaaaaaaaaaaggaagcaaagtgcccagctgggatggtggtttcagaggccacagtgggagcttcccagagaagggatgattgagctaagtctaagcaaaaggggtggtcagggcagcagctgctccaaaacaggggctgggggcttatgtggagagagaagacatggagagaccatgcccagaaggaggcggcggcttcagtgaacagtgcaggggagcaggtccgaggaggccgcctaccaggggaaggagtctcatctccatcctagacaaaaaaaggatcttttgagatgcattaagcaggggagtcacagattggatttgtgttttgagaatctcctgcttacctagagaagaagggcatctcctgggccctcactgttgccttaaatgatttttattgtgtattacttaaacatgtgcaagcataaaatgagatataaactccttgtagctcttatacaagcatcagaccaagacaaattgacccatcacgtacaaaatcgattcaaatcagattaattttatgtgacatgttattatgccttttgtctgaaaccctgccaccacccacagtgcaattatggcccaaccactgtggtgttctgaatttgtgggacagagaatattggccttttaaacacgtgcatgcatgcatttgcgtgtgcgcacacacacacatcccaaatgattttttcccactatatatgaagaactcctacaaaccaaaaagaaaaaggcagacaattcaagagaaaaatgggggagggcttgcattaaagtacttcataacaagagtacttaggaggccaacaaatacacgaaaagctgctagcttcatgactcatgggggtggcttggtcagttcaggatactgtaacaaaataccttagactgggaaatttataaacaacggaatttattgctcacagttctggaggctgggaagtccaagatcaaggcagcagtagatccggtgcctgagcccgttccctgcttcaaacatggcaccttcttgctgtatcctcacatggtggaagggggaagacagttctctggggcctcttttataagggcagttatccaattcacaaggatagagccctcatgacctaatcacctttcaaagatccccatcttctaacaccttctaacaccatcaccttggtgattaggtctttttgttgttgttgttgttgagatggactctcactctgttgcctaggctggagtgcagtggcgtaatcttggttcactgcaacctctgcctcccgggctgaagtgattatcctgtctcagcctcccaagtggctgggattacaggcgtgtgccaccatgcccggctaattttcatatttttagtagagacagggtttcaccatgttggtcaggctggtctcgaactcctgacctcatgatccgcccacttcgtcctcccaaaatgctgggattacaggcatgagccactgcacccagccgattaagtcttaacgtatgagtttttgggagaaactcaaacattcggacaatagcaaggagaatacaaaaccacagtgagctaccgcttcagacaccagagaagtttaagtgaaaaagactggcaataccaagtgctgatgaggatatggagcaaccagaactctcagacattgctgatgggaatctaaattagtataaccaccacgaaagcatccgtaaggtttaattgtgttgaacacaccctgccctctgaccaagcatttccactcctgggcatacaggcaaaagaaatgcatccacgtgttcatcaaaagatgtaacctgtgccaggtgaggtggttcatgcctgtaatcccagcacatcgggaggccaaggagggaggattgcttgagcccagaagttcgagagcagcctaggcaacaaggcaaaacctcgtctctactaaaaagtagccaggcatgatggtatatgcctgtagtcccagctactcaggaggccaaggcatgcagattgattgaacccggaaggtggaggctacagtgaattgtgatctcgccactgcactccagcctgggtgacagagcaagatcttgtctcaattaaaaaaaaaggaagaaagaaagacataacctggaatattcacaccaacactattcaggatagccctaaactggaaagaatctgaatatcctccggctttagaacagagagaaattatagactattcattcatacaggggatgattgatcagctttaagaataaacaaaccgtacacaacaatatagatgaatctacaaccttaatgtgcaaaatagttcacatatataaaggacaaaaacaggcaaaactactccatggtgttagaaataggggtagaggttaccctcatgcggcaggagggttagtgataggggatttggaagaggaggagcccaatggactgaacagctgagctggaaacagcaatttgttccttaaagttctgaacccaactgttatccagcatggagtctgtctggagaggccagatgtggggcctctcacaggggaatgagaagtgcctctcagggtcccacccatgatccccctttccttgcccacacaaccaccaactggcaagtagtaacccaggacctgtagcccccactggcttgacacagagcataatgcaagcttttcctgctccaggtcctggacaccactttgccctttgccccacacgtacagccccctgaccaaaagctgggtactctggcttgactagagggagctagactccaggaataagtaaggagctgggcttccacgctagagaacaagagcttctctggggaaaggggcttcccatgaagccctggggcactgggagattaatgggcagacctctggcctcagcttccagggaaggggagggtgtgggccaacatgcggtggctacactgaccacaagccgatgaccccagccagcctcaggatgtctcagctctaggcatggtttttcgttttgttttgtcgtgttttgtttttgagatggaacctcgctctgtcgcctaggctggagtgaagtggcaccatctcgtctccctgcaacctccacctcctgggttcaagcgattctcctgcctcagcctcctgagtagctgagattacatgtgcgtgccaccttgcccagctaatttttgtatttttagtagagatagggtttcatcatgttagctaggctggtctcaaactcctgacctcaagtgatctgcctgcctcagcctcccaaagtgcaaggattacaggcatgagccaccatgcccggcataggcatggttttgacaatctgtctctttgtgccctggctccttctccaactcctctttggaggaggcacaggaggaggggtcatttcactgttcctgaaaagtagacatataacctacatgcaactgccaggtgataagggccccatctgtctggcatgacgttggaggtccacaaaggctgattagatgaatgctcagctctggggcctccccacagagctcacagacaggcgtgaaggaaagcaggactcttattagaatatgttcagagttttcactgaagaagcctcctgtgtgggccaggcactgtgctcagtgctttgattcacagtctcatttaattctcaccatttacagacaagaattcagctaagatccttttcaatcaagtctggcaatatctgcctttcaatggcagtgcctagtcctttcatatgtaatatacttatcattatgggtgggtttaagttttatcatcttgctatttgttatctatttgtcccccctcttttgttcctcctttactgccttctatttggttgagacttaataaaatattttattccatcttctcta

SEQ ID NO: 486 - DNA, 744 bp, Homo sapiens
gaggaacctacagcagagccgttagatcattggcaagtcctccaggcgacctcgcccaagttgggcaagagcggctccccggctggccaccaaaaatcgggcctgatctgatttggtttttttttttttttgagttttgctattgttgcccaggctggagtgcaattgcgcgatctcggatctcggttcaccgcaacctcggcctcctgggttcaagcgattctcctacctcagcctcccgagtagctgggattacaggcatgcgccaccacgcccggctaattttgttttttttttgttgttgttgttgttttagtagaggcggtgtttcaccatgttggccaggctggtcttgagctcccgacctcaggtgatccgcccgcctcggcctcccaaagtgctgggattacaggcgtgagccaccgcgctaggccaagaaggatgtattttaagaaagcttcctgttcaatgttcccctgctctgtgcgcttctctgggcggtggtgttaaaggaagccccttcccttgaagtatcctggtgttcaaagaatctttcctctatttacaaattataaaaccccgttgggaagaaataattagatgtcattattggctggtcctggtggcttacccctataatcatcctagcatgctttgggaggccaaggcaggggaggatcgcttgagcccaggagtttgagagcagcctgggcagcatagtgagaccgccatctcttaaaaaag

SEQ ID NO: 487 - DNA, 1715 bp, Homo sapiens
ggcttgcaaagcggtagggagacgatcgggccgctggccgctgtctcggcgttcagcaatagaggccttcccggatctcccgagaggcggggagcgagcctgggtccagcagccttctccctcccgagaacagcagaaaggggggactcgacagaatgacctctgtttccccaaggaagtgcactctgacgataacctcgggagggacgagaagggccgctctttcggagagcggccgccgcccctggagtaggggactcagtggccacgaaggccttccctgctcgcgacctttccacgggaaggcacgaagcttccgatgggggccccggggcgctcctgacttttctacggcgcgagggctctgactctgcggttcaggtttgaaagtcctttggaagctcgcaagtggtggtctcccaccacctcctcggtcatcgcaggaagaaggcgcagtgagggcgggagtctggatgagcggagagtagccaccgcggagaagagtgcgggcttgcaggagccgacgaagataactcgaaatgtgggcaggcaggtgttggtgggtcttgaaagtgggaaagcacgagaaaagaacaatgttcgcgtccgcttagaatacggaaacaagtgagctttaaaggaaaatactcattctcattacccctgtccaggaagaagagtgctgatctgctgcttccagtccgctgggctggagagcagaaagaggctacttgatcccagccaagccagtgtctgtcccccagcaagcacttctgccttggtgtgatccccattccttttctaaaaatacaaaataataagaagtcctggaaggaaatacactaaaatgttcccagtggttaatcatgcgtacagtagtagattatatgcagctttcattttctgctttagacttttgtctattttccacaacttttctaaagtttctacaaaggccatatatttccaccataagcagaaaaaatgaaaacgtaagcatttaaatggcacatacaatataatctcaatagtataaacatgcatacaaaagacaggaaggagatatgaagaactgctaacagtatgttatttttcacaactaggatatagtctcctgtcctgctttacctttcaggtattttcatctgataaatagagaaacagtttaaaataaattcagtcatcctgttcaatagccaagaggttccaaaatgagataatgaatttaaaagccttcgggaactataaagaaaagtaatgcattagtattattttgaagataagtttacaatatttcttactgtaaattatcaaatcacttttgggtgcattgtcagtctttctgtacatggattcgtttcactgtggcaaaggcaacttgcagataagctgataaagattccagaactacaaatcaaactaggccctggagtagcagtaaaattccaaacccaaaggcccatccagtctgtccactacattcctatattgatgagagcagaacagacactcatgagagacatgacttctgcttcccccataactaagaagagagattaccatactgatgatctccctggaggtttcatagcaaggtttgacttgatgaattaattaataaagctaaatatcctgaagatttggtggaaatatgctttgacatttacatctaagtgttcatccgtgaaaatcaataaaatattttttcatgcaga

SEQ ID NO: 488 - DNA, 283 bp, Homo sapiens
ggtattttaaaatatttggtagtcacttaaaatgcataatgacagacaatagggtgtcataatatggtttattaatcttttttcattttccactagatgtggcaactacatagttggaagaaatgtggcggccgggggcagtggctcacgcctgtaatcctagcactttgggaggctgaggcaggagagtcgcttgaacctgcgagtcagaggttgcagtgagccaagatcgctccacttcactccagcctggtcaaaagagtgagactctgtctcaaaaaaa

SEQ ID NO: 489 - DNA, 414 bp, Homo sapiens
tcccggggacaactttgcaaggccatgtgctcgtcctccttaggaaggaagagggagaaatccctgcggctcggttttgttccaatggtctgctcagcgagtgattcccgtttccccaaaggctgcccctcattagcatgaacgggggtgggggtgtggagaaggggttgggggagagaaagcaagcaaaagaccaggctcacttttagagcctgggaaccctgtctgcaaaaatgacagctagagctttctggctcctctgtttgatcgtcggatcatcccccgaagcaccggtggcggagagaaaaacctcgccgccgcacagcagaaagccggactcccgcggctgcccgagcgcggaggagacaccggggccccgcgcgcagccactccttgaggccccgcagcggccgc

SEQ ID NO: 490 - DNA, 526 bp, Homo sapiens
atcacctggtgcccggctcgcgcggtcagccctgcgcggcgcttctctctttttattcttttgcctgcgacgggcagtgggagtcgcggggtgaagactcctttgaggctggagggttcggggcgtccctgccctttggtaggacactgcggctcctgcctgggactcggcgccggcgagcccgtgcttgggccgcgggtctcaggcgtcttttgggcagccacattgggtcataagagaatgagctcaagcgactgggtccctgagcgcctttggacgttgtgtcctgccgaggaggcttaggctttcccgtgggtcgagggtcctggtgacctccgaggccctccaaagaatttcatcatggtgctttggatgatcagtaacaagaaaaatgaaattctggattgaggatgagcagtccaggaatgacctctctacaactagagaaagaagaatgcatgcaatgtgttccctgtagtccaagaaccagggtagccctgctggagctctacagagccatgtgcca

SEQ ID NO: 491 - DNA, 1260 bp, Homo sapiens
ttttctcccgccttttctcctagatgtgccttgtttgcaaaatcatgtctatcatgtccacgactcgcctcaattttttttcttttgtttttgtggcactttcattctctctcaattcttcaaattcacatggaaaccaaggaaaacaagctccgttttgctttcaatattgatgcatttctgctctaaggctttgacaccaccctgggtggctgtgtcaagagatgaaagacaaaatgaaagaggccgcggaagcacagactggcagaattccaaaacccgaaaaacaagcaaggcaccaaattaacaagcccaatcacattggttacatttcccagtattatcgaagatcaagcaagaaagaaaaagacagaaaacaaatgcgaaaccacagcttccttggctctttttgcccatatgccgaagagccgagcattgccgccaagcattggcaccggccatgcggagactagcgaaagctttgcaattcctctacttctcagtgatgactcgggctttctccttacattcttgatgggcatgaccggtcctgtcagctgggtggccaatttctgttcttcagcagaactgtctcccttcttgggggccgagggctttctggggaagaggatgagtttggagcaatactcattcagacgctgcacattggcctgcagggaatcggtggacttgttctgcctcctcggatccacagagatgccagtggtccgggtcaccttcttgtgaatgcccgccaccctgagctccaggctgaagcctctgccggcgcgcaccttgatgtgataacgcacagcagggcacagcacaatgggccagatgggtcccgactctccgggcgcggggcgatgcagcgccctttggcttgccgggccttgattctgcggatcttctggttgaaccacgtggccacacgctgctgccagtccttgtggaagtggggcttcaacatcatgccattcctgctgggcgccatggctgcctacggccctcctacgaaggaaacactttatagatttctatagcagtgttacatagtaaggttttatggcgagttttgtagcatggatcatactaccttaggactgatggtaaagttttagtctaaggaaagctctgaaaatttgaaaatgtgtaaccacccaatgagttcagcttgcccactgcctagacagaaccatttatcaagacgggcatgcaaagccggctgtgtgggagacccgttttattattattcaaatc

SEQ ID NO: 492 - DNA, 1937 bp, Homo sapiens
attacagatgggccatgggagtttttccactacagatatttacgtttataaatcacgttgtcttcttagaaaagtcagaaggaggttaaaacagtcaagccacagacctgtagaaaatatagtatcaacaactctcaaatctgaaaacaaacacccagtaacaaaatgggcaaaatatttgaacagacatttcaccaaaggaactatacagatgaacattaaaagatgctaaacattgtagttattagggaagtgtaaatcaaatccacaatggaacacttttacatacttattacaatggctataaaaccctgacaatatcaagtatggcaaggtatgcaaagcaactggaagtctcatgcattgctgatgagaatgcaaaatgacagcctttttggaaagaagtgataaggacagaaggcagggctttactgggtagaagagggtggttcactggcaaaggtcccaccctcaagccttgaaaccgaagccctaaatgagaacagttatccctgttatcctgcccaaatgttactctttagcctgtccagcccccctatcccgtgcccatataaaccccagacctcagctggcagacagacaagcggctgaacatcaagaggagaagaagcaactgagtgtcagagatgtggcttaacttcaggtggcatgacttcagggaggagcccggccagagacagcagacttcagggaaaggtcactttcttcctgcaccatcccctttgcagctccccttccactgagagccacttccaccatttaataaaatcgtccacatccatcaactttcaaaccattcatgcaacctgattcttcctggatgctgaacaagaacctgggtaccaacagggcagggtgtaaaaggctgccaccctgactctccattgagtgggttaacacttagctgtccacggatggcaactgctaaaagagcatgaattgtaacacatccctaaatgctgctgttgggctggagcccaaaagtgctcatcgaagccctggcacccgcttgcctgcgtgctcccgctcccacagagagtttgagcatggtggtggccaagtaagtaggccacacccctgtcgcaagtcccgagaaggggtcaagggaactctcccatctcagaagtatggcaatttcttataaaattgaacatagggttactgtacaacctggcaatttcactcctaggcatttagccaagtgaaacttatgtcctctaagactgtgtgtacaaatttttatatgtgctttactcataatagccgaaataccctggaaatagcccaactgatcttcattgagtgaattgctaaataagctctgtgttatattacatccacacaacagaatcctgaccatcattgaaaaggagtggactattaatacatgcaataacttggatcaatctcaaatgcattacactaagtgaaagagaccagacttaaagcctaccttctgtgacattagagataaggtgaaaccacaggaacagaaaacatattagtgttgccaggagcaaaaggtgggggaggtgttgactttcaaagcacaggaggaaattttttgttgttgttctttatcttgattgtgttagtgcccacatgactgtatgcatttctcataattcacagaactgtatactaataagggtgcacttcactgcacataaatgaatctcaacagacaaaaggttaaaaaagaaagaaatctcgggacaggaatcatggatttttgtattatccttgtatttgatggttgtttccagtttggtcactcatctgtttgttcattcctttaacaagtatgtgtcgagtgcctactatgtgctgggcactgtaggttcaatggtaagaaaagcagatacaggactgctcttgtgaagttccttgaaagaaataaaacaaagtgcaaaata

SEQ ID NO: 493 - DNA, 1569 bp, Homo sapiens
ataccgggtctcacactgtcaccgaggctggagtacagtggcacaacctctgctcactgcagcctccacctgccaggctcaagcaattctcctgcctcagcctcccgagtagctgggattacaggaagtgagctcacaatgactcaagctgccacatactgttgattgtgaaatgccagttgaagcatatgtcctgcgagcttaggggtgctacaagttgaccactgcagcagtaaagatgactctgaagaatggcgtgggatggttcctttcaaatgcacttgagcagcggtctccaaccacagggccacagagctggagctggatctaccatgaaagacttgtgaatccaggaagagagactgactgggcaacatgttattcagaatctccctgtgccatccaggctggagtgcagtgatgtgatcatagctcactatagctttggccttctgagatcaagcaatcctcccatctcaacctcccaagtagctaggactacacatgcatgtcacccatgcccagatcatttttgtagagtcagagtttcaccgtggtggccaggttggccatgttggccagatggggtcttcttttgttgcccaggctggccacaaattcctgggctcaagttatcctcccacctcgtccttgtagagatgagatttagttatgtcgtccaggctgatctcaaactcctgggctaaatcgattgtctcacctcagcctctcaagtatgttatgaaggttatatgttaggaagggtcccaggaggtagacccacacagatgggatttgggcataggtttggtttcccagggggcagtgctgagctctttgccagtgggaaatgggatgctggtgatttccagtaggtgacctcacagtgactcaagctaccacttactgttgattgtgacgaaatgccagctgaggcacatgccttgggagctaagtggttgctgcccttgaccactgtgaagactggtgtgggaagggtcgttttggatgcacttgagcaggggtccccaacccctgagccatggagccgcaaggagccacacagcaggaggtgggaacatccagttgcaggaaaacaagcttaacacgcccactgattctacattatgctcctacctcccggcagcctctccaggcccagaactttctccagtcagcctctacagaccaagctcatgactcacaatggcctatttaggcccataccctacgtcacggcagcctccgcagatgaggctactgcctcacaacagcctccacaggcacagctccatcgttacaatggcctctttagacccagctcctgcctcccagccttctctccaggccctgaacattctcaggtctccctctgttgtccaaggctggagtgtagtagtgctatcgcagctgactgcagcctcaaccttccaggctgaagcgatcctcccacctcaacctcccacgtggctgagactacaggtgcttgccactatgcccaactaatatttggaattttcgtatacgtggattccagaggggtgacagcgaaacgtgagtaagcatgga

SEQ ID NO: 494 - DNA, 648 bp, Homo sapiens
gctgctcgtcttttacggcccttcaacgcccaccacgacccactcctcttggagaccccgggcgacggtggggctcttgggcattctgagactgcgcttggtggagaccccgggcgacggtggagctcttgggcattctgagactgcgcttggtggagccccctactggccagactggatttctcagcctgcgactcagccccaggctacacgaaagaagccagacctggcttttactgcctcctgaggccttcgtcttgttcacactgagtgtccagtccctccaaatccggctacactctactggcaaggagcacctgggccatgttttagagatcatccgaggactaaccccaaaagtttatgaagagaaagcagaggccgagctgaagagatggacccgggtcacacccaggtaaaggcaggatctaaactgaaactggtgtcagatctggttgccttgcacccctgatatcaggtgaagcaacactgggcaggatagagcagagtgaggtcagagtgtgaagatccagcctgatgcccaaactgacgcctcttcattctcccctgctccatctgtaaacgtcacggttaatccatctactttattgcattatatagagaaataaatgaaatgtcatagctgta

SEQ ID NO: 495 - DNA, 1207 bp, Homo sapiens
aaaagaataaaagcaggctgcccgagccggcagtggcaagctgctgggcttcccttccacattgtggaagctttgttcttttgctctttgcgataaatcttgcccctgctcactctttgggtccacactgcctttatgagctgtaacgccacgaaggtctgcagcttcacgaacccatcgggaggaacgaacaattccagacgcgctgccttaagagctgtaacactcaccgcgaaggtccgcagcttcgctcctgagccagcgagaccacgaacccaccagaaggaagaaactccgaacacatcccaacatcagaagaaacaaactccaaacacatccgaacatcagaaggaacaaactccagacgcgccaccttaagagctgtaacaccgcgagggtccgcggctttattcttgaagtcagtgagaccaagaacccaccagttccggacacaatacttttcacactgcatgatgaagaaatttagctttattgttagggaattcctgaagattctgaaattgtgaactgacaagcccatggatgtctacaaagagtgaactgatcactgtgggctggcctttgaggcatcagtgagctccagtgcctgggacaatgcctgacacttagcagacagtcagtgaatgtgttatataaatgaatgaatacttggagcgtgagaatcagagcggcaaaaatatttgtccataatatgcctaaagataaaaacggaagcctcagaactagataagtgcattgtaattgaatgctgaattcacagagataacatctgagatttattaagcatcaagtcatgtcttaaaaattttatatacattttaggatttaactcttataaaaatcctgtgggcattgtggctctggagacctggaagcactgctaactgttctctcgattttctgacgctcggccacatcaacctgtcatactagttgtgaggagaagtcaaggacagtgacacagccagccagtctgaggcattttccatcatcctgaaggagttgccctatcctgcttttcactggagggggcatggatgggggctcctgacacactgacctctgtcagttccttcagcacaccaggctaatccccagtcttgcgcctttggaccagaggttttctttgctcagaatactgtttcaacagatctttgcatagctggctctcgctatttgactaaaa

SEQ ID NO: 496 - DNA, 131 bp, Homo sapiens
ctccatgtatctttgggacctgtcagccgtggcagtctcccttcctagccatggaagagcatatccttgtttattggcaaagctgtcaccatttaattggtatcagattctgacttgcacaagtaacattc

SEQ ID NO: 497 - DNA, 766 bp, Homo sapiens
ggttaagggagaagtgatggaggcgattcgaagctgtctttcctaccctcttcagtacctcttccagtgatgtgaagttaaaaccagagatggagtctccctgtgttgcccagtctggtcttgagagcttcagttttaaataataaattgttctcgtctttctaaatttcaatcaaaacacaggatgtattttaaaagggaaaaactgtgaggtaaaagaatagggtgaggggaggaaagaaataacttcatagagaaaaattcaatgaacccttggaagaaaatatatggaagtatggttactgacttgggaaagaagagaaaggtacaatgtaactgcacatagaagccagtcctgaaaagaagcaagccggctgaagttatctgcaactcagaagcacttggtaccacccaaggggagataagaggagatctcatcagaggtgcctgaaaagcacctcagccgaaggcctcacatagagagacctaagaatgaaggcacctggactaggaatgtgaatatgtgaaagaacatgaccggccaggggccctgagttattgaatgcaacccccttcagacactgcaacacacaggctgtgcaccaagcctagtatgggaaggacagcttttcttcatgaggcctgccaggtaaagccagctatgaaacaggaagttgaccttcaccagacactgaacctactggcaccttgatcttggacttcccagccttacaaactgtaagaaataaatgtctgttgttcataa

SEQ ID NO: 498 - DNA, 547 bp, Homo sapiens
tttctcagcctggagactgaaagctctctttggctgttggccctcccaggcagagtccactggctgttagggtgaaatggggctgatgcttcctggaatccaccagaagtatgcaaattgcaccatctctttcagctgcctgcgcctgcattccatcgaggattccggctcgtcccccagtggcaacaactagagaggaggtgaggatccccggcgctgccatctgataggctgtctccctagctcctcttgcactggcaatcctttcatcacacaggccttgttttgaagggacctattccacccacagtcgtttctcacctctaggaggccaaaaagctgtagtcattgctgtggtatcaggaactcgagttcctctcagaggtgttgtgaagagcttcccttccaacagtacatggcctaaataccagggaggaagtttctgactttttccatcttcagtaaaacagaacctctgttgtggatgcagtggctttgcaaggagagtggcattgtctcttggtgaatgtagttgttcaagtcatgg

SEQ ID NO: 499 - DNA, 672 bp, Homo sapiens
ggaatagcgtcatcagttctataagagagcgtgtgccgaaggcctcggcctttcacattcgggaagcgtcgggattaggtgaaagtacgtagttgtctttcgtaagttaaaatgataattgggccgaaacttactgccttacctaaaaggcagcgcagtcaggatattggtaggtcgggggcggctttggaaacccttaagtttacaagcatgcgcggacttgagtgctcattaggtcgccgggcgtccacgtgcagccctggaccctgaaccccggcgtgcgtgggccgtgggccctcggggaaaggttccgtgcactcggggactccggtgaagcctgttcagccgtctgtgtcatgtggccatcttgagtctactctgtcgctcttgtgccctagcaccccgagaaccgtcagtttgagccagatggaagctgagctgaacacattacgatggatgatggaaacataagactatcaagaaatccaagtggtaatgggcgaagtttattcagcatccggcaatggacttatcgtagttggggaaacgggtgttccgaataatatcctggaagttatcaggacacctattttaaatataggcctgaattttgtaaagtaatatttaaggtggtccgtgataattaaataaaatgcttaattcatgtggcta

SEQ ID NO: 500 - DNA, 618 bp, Homo sapiens
gggaggagtgctcggccagggaggagtctgttgtcagagagcctgtgtcgtggctgtggatgaggctttctggagctgggagcaggtgtttgtataagcaatgggaaaggctctggggattatgcaggcgtgaagaccccacaccatcggggggcggaaggctgagtgatgctgagctggtgccactgcctggtgagaaagtggctcggttcaaaggtaccacggaaggagggcacggaggagaagcttctggtgtggtttgtctgtgtgtctgtgaagcatttacctccaacacactggcagatggtgccgataccctggggataatataatcaaactaaccgtctctgcgcagcctggataaaaccatgcaaaacgaaaggtatcagcttgttttcaaacatcacaaaaccattctgaagaagcaaaccaggttggatgagtccaatgactgatatgtgttcctatgacttctcctacacctgcttcctggcgtgcccatcctgggacactggcgagtctgctcactgacactggcacgggcctgtctgtacagtcacagacggattttgctccctccgaccttcctggactcctgaacccgatcaagatgcatct

SEQ ID NO: 501 - DNA, 1799 bp, Homo sapiens
ctcctcctcctcctcctccccgccggggtgaaactcgagcgccccacccgcgcctgacctccccgagcccctccccgggccccgccccttcccggtacaggacccccaccttcgctcctgggagccccgctgcaccccaggagttccattccagcctccccagtgcgagtgcggccgagcgctgacttttgggggctccctcccccgtctcactgggtccctctgcggctcccccgcccgctgtcccggttcagacgtggctgcaccccggaggggggcgccggccgagacctgagacgtggcgctccctctctgccggcctcggcttcagtgcttgaatttcagccacatccctaagctgccatctcagaccagaggaacagggaggggggctttctggaaagaacatcacctggaagaaatcaggacatgactgtgggccatgagtgaccttcaaaggaaagccgggtatctgtggtctttaagatgtgatccatgacatttaaaaactgaagaaatggaaagatcatctgatcaggcccatcagtctttttcctaatgctaaacattggtacaaagacgtgaagtttgatgtctcactaagattgcctagggctgctttattgctcacctacttcaaagtattgggaaaacatgattatgggtacaggtgatgctgtgttgcccccagacaggtttcttttgtcaggttcttttgatggattaggaacctacaagtggggagattttagggaaatagcccctccacttggatttcaccaaaacgtctttagggttctcttaccccaagaaacacgcattcctctttagtgtggcagcccactctattggcaaagttaagcagaccagttttactaaaaaggagccacccagaaacttagacagaaaatacttgaggcacagatgagaatgagcacaaatgtgcatagcaagtgcagtttcctggcccttaaactgaagggccaggtcagtctgctcctccaggcacagcctgggaccccatcatgtgccccactctgcagtctgagcttccactcaagtccaccagggcctgcctcacatatatatacaagacccaatgtcagagtctgcctctgcccatgtctggtcagagggttgcactttgccactgctacatgttcccagaggttggcacagcatgacctggacctcacctaacccaggcaaactctgctcatcttcgagctctctggaacccatttctcaagggagaaccacattcccccacctcacagccaagttcaaggaagcagcctggctaaagcaatgactcaaggataccagaagcagagcacgcatttaagaagatgcgctgactcgcaggagcagctgactcttcttaagaagagtttactgattcttctttcagtacgggccttttaataagatattgtattttacttcagctatgggtgcagacaattaaaggattctagaaatctgaaagtgttttgccttgtcctcttggttaaatttctggatatattgtctagcaactcaatttgcttaaacaaaattgttgtgtcaaaaaagcccaagtcatcttttataagtgtggtctggggagaagaaaaaaatgctaagtttaaaagatttttggaatatctgaagaaaatacagatagcttgtaatggagatgaagcctctggatggtttccagggtgttattttccgacattgagtcttgtatatatcttgaatgtctataagcaaagaatggctatactgtttttaaaaagatatgttttatacttatt

SEQ ID NO: 502 - DNA, 631 bp, Homo sapiens
cttattgcctgcaaagctgcctgaaaaagtagtttctcaagaaaagcagtttctcaagaaacatttcagtaataaatgaatgagtgaaatggtgtgtaagccataaccatcttagaaacagctgtgaaatcaagcatgctggctgggagatgtggctcctctccgcggcacagtgtctatatcactgatcaggtggacagatagtcccagaaggaggccctcaccaacccatttccccagacacagtcagaactggggtcagctgcagagatgggaaccgcaagaggaaggagacccttaacaaggaccaggaaagtggtgtatgcataaagaaaggaagctgttcttgaaatgtgccagtgacctcatccctgtccctgaggccagcatgagtgcttgcagtgcaagtgacccatctgccagggtgacctcaggcctcggactaacagcaaataaagccatgaacacactgttctctggacacttttgcaatttttcctttccagggcctacagctctagacttgagacctgcaactcttcccctttgttcactatgactctaacaaatttaaaacatgtcagttctctccaaccccaagaaatgtgaataaatgtttccgaaaaccaga

SEQ ID NO: 503 - DNA, 2424 bp, Homo sapiens
ttttcgaggtcggccgcgtggctggaagacatggccactccagtcggtgttgagcacggcgagcagtctcaggcctttagtgatgatggtgcagtcagcctcagtttccaaagccggaaaaggatcctctagtagccacggtgtggcagctgctctgaaccaggacctggacccggacccaaagtgccatgtctttaatgttagctcccagcgatgccagatgggatcagcacagccctgcctctgctgctaattgttcctctaaagtaatcgccatgcgttctttgggcttcatctttaaaggaatgaagcaactgagattattctggaaaaccttttggcagttagtgaaattagagtacaactaagaacattttcagacctccactgtggatgacctgggtataatctcacaaatcgatgggactgcaaggattgtaaactgaaatgaacatgattatactctgttggaagagcctaagaggaaactgatgccatgagtttcagagagtaatgcttaaccccagttacacaggatgccgtcttgtgtttcctcttgtttagttacccactacagtgattttgtgatctgctaatgggttgccacccacaaccattgctttagcacttttacttcaaatcaatgaaggattgataaaagttctcctggtgtctccgcagagtgccttccaggaacagatctttgcatagaatatcagtggtttccttttttgtttcaaatagtggtcagaaaatacccagtgttgactcaccaaggcaatcagcttcctttttccctttttttgttttttttttaacattttatatttttgctttattttattttattttattttattttattttattttattttattttttgagacggagttccactctgtcgccaggctggagtgaagtggtacaatcttggctcactgcaacctccacctcccgggttcaagcaattctcctggctcagcctcctgagtgctgggactacaggcgcgtaccttctttagtagagactgggtttcaccatgttggccaggatggtctctatctcctgaccttgtgatctgcctgcctcagcttcccaaagtgctgagatgacaggtgtgagccatcagacccagcatttttttttttaatttaaatttaaattttttttcatttttttgagaggttttttttgttttgttttgttgttgttgttgttgttgtttttgagacagtcttgctctgtcacccaggctgggagtgcagtggcatgatctctgcaacctctacctcccaggttcaagcaattcttgtgcctcagcctcccaagtaactgggactacaggtgcacgctaccacacctggctgattttttttgttttagtagagacagggtttcaaccatgttgcccaggttggtctcaaactcctgagctcaggcaatccacccgccttggcctcccaaagtgctaggattacaggtgtgagccaccacacccagctattttttctttcgttttttaattttaaagttgggggggggtctcaatttgttaccctggctggtctcgaactcccggacttaagcgatcctctggctccaagcccactaccagtctcaggtttctttactaaaagatcactacctttttttctcttatctgctgccatgtgagatgtggctttcaccttccgccatgattgtgaggccttcccagccatgtagaactgtaagtccaataaacctcttttgtaaattaaaaaaaaaaaatcactatttaagatactaggatggattgtgactgttgaggagtacttacatatcctacatttgactacattatttccaaaccaagtattccatccaaaggaacatactgctatcatagagaccaaggagggactgtttaaggttgccaaggtgaagcgagctgagaggctttgtcctcgtgccagtaactctgaaatctctcttaattcctgctgtccaggcagcagaatgccatggtttccccaagtaggtagctgctttagcagttaaagcccaaatgtctgttctgttgatcagaggtctctgaatttctgaagtggtgtttcgtttctggtgactgagttaatcctttacaatccctcttgtaaagtgtgctaatagaaagaatccacctttcaaagctgcagaaccagaccgtgccctaaattgaccaacgtaactgatgtgcctcaggaagtctcttgccagctgtccctgtgaagacccccctcctcccccccagctgctgccttgcacactgaagcatctcagactgtgcaaagccgtgtagtcatcaagacagtaaatcccagggcttggttaagtgctgtgtgataacttgtttggatgagacttaacttaaaaccacttacaataaacttgggaaactac

SEQ ID NO: 504 - DNA, 1788 bp, Homo sapiens
aacccccgcctagccccttcacagcaaatgcgctttttgccctgaagttgtgtgagaccgaccttaaactttctccgaccctatctcgggatgctacggctcaggtcgtggtggtttcgggaacctcaagacaacattccccagctgacctttgggaactttaactcgggtcgtcatgtacggaaaggtagtctatggggtacgcagaatggaaaagggcttccacatcagtcgtgtccgaggacgctctccaacttttgatgtccctggagagtttctgatatttccctggagagtttcagaaaggatttcttccgacagacgtgaccccagaaggctgccgagggagactttaggacaagaggcgttgtttttgtgagaatgaatttttatactttaccccgaccccaccccctaccccccgcccaggtaaatccaagtaaatgattttctgaaggtcggtctcctagaaagcgtttaggctctggttttttgttttgtttctattttcgtgttttcccagttagggaaggaagaggagcctgtgcagagttgaactggggtggagaggtgccttgtaaagtatggtttccagagatggtgagacctcgtagctaagcgttgtttcctctgcacgtaactgtgagttgtgaacttgtggctcctgggggagcgggacagggcctggcagtgcgggggagggggcaaggaattcaggaagttggcgagaattcttcgtttttcattcttcgttgtaaattgcttctaaacacttctgaattttaaattgctaccgagaaggtccagaaaccgttctcatccaatttagtcacttttattacgttccactttgcctcccccaatcactgcggcggctcccagtttcagcgtggccgcatttggaaaaggctgaaggtagaaaactctggaatggagaggctggcgactggagcaggatccaggggctttaaattttaacctgaatgcgatcgaatgcgcgactcccagaagagatagccaggcgtccgcccggccgctcaacccccgccaggactcggaatgccttgcttttggttcttttcgtgagttccgaccaaatgtttaagtggactgggttttgcagaagctcatttgtaagcactgacggaaatgggttgtgggcatttgatttcctttgattccaacgttttgaaataatgtttctcggatttgctattcgaagcaattttctaaaaactcatatcttatttgctaaaaataaactctttggctcagtttgtgtccaggctgtgtacggcctccaaccctgagccccgaggagatcgagccctggcgcgagcctgatctctgtcctgtgtgtttctttgtatttgcaagtacaaggatgtctgcgtggatatccctggacactcgataccccccggggacctgcttttcccgcagctccgcagacgcggcgggagggcgcgctggccccggcgctgctgggacagaggtgagcagcggggtggacattgaccgattcgacaacgttcgggctctaagggctcgggaagggacccggcattttaccctccagattcccaatctatttttaaaaataatgttcaaaacatatgggaaaaataagtgattgctccttttcatggtcacagattgtatttattttttcagactggttttccaacctaacgagggaatgggtagtgaatgttgttgttgttgttgttgtttatgttggttaatttcgaaataaaactgtttaactcgtacagttgattcagacag

SEQ ID NO: 505 - DNA, 448 bp, Homo sapiens
attttctcttcctgcggtcaggtgaggagagttcttcgcctcgcgccaggattctgaggcctccccagccatgtggaactggcaaggattgtgatgacgtttttgctattccagtgcagaaagcatttcatgtaaaacctggggttgatgacatgagcaatatccggagagagagagagagattcctgtagaatacaagacaagactatcacaatgttacatgacgatgaccttaaggaatgaaggatgctctatcctgctgagtgatttatcctcaaagctgaaatgttgggtctgtgaaagtaatgagaagcacagtggaaataagtttctgaaggatggaagaggctggaggctggctagtgggagaaggttcccagacacgtgagagacccagcaacagattaaaatcatccttacctgacaagaggactcagtgaatcaatgt

SEQ ID NO: 506 - DNA, 180 bp, Homo sapiens
ctgtccaaaggcagagttccattgtgacactccagaatgctgtcctttgaaaccatttgaaatgaaagacaggacatagagtgaacatgggatttaggaaagtggaggactatgagaaagacaattttggtcagagtcttattcaagaatgggaacttggaagaacatgtggaaataaat

SEQ ID NO: 507 - DNA, 559 bp, Homo sapiens
gctttatctgctgtgccttgtttctccccggccctaggcggaaggtgctctaccagcgtgcacccaggaatatccaccgccatgtgatcctctctgagatcaaggaagccgtcgctgccctgcccccggctaagtcctatcagccatggaaacaccattgctctcttcttccggtcactgttgccaaactataccatggagcacagacgcagtcttcagcaaggaagtgctgggaacgccctggagtgaacccaggaagatgcctgcagtgggtgccagggcccctctccaccgtccctgctgggcttcggggccacgcccgactgctgtgaacggcctgcggagcaccacgtgcgacggctggaggcgagaggtctgcctttgatgtggctgttggtgcagggcctgtggtgccttccgcagcggaaatggcgcgccgcccggggagggcgggagcagcgtcccgggtgcccctgtgaggatgagcgacgagatgactggagggtccctgaagacctcactagggtgcccccagccggtccgctcccaggaagcgaca

SEQ ID NO: 508 - DNA, 3091 bp, Homo sapiens
gcaaaggcctcccttggctctctgataaagttggagctgtgggtgcagcatttcacttggacctagcagcatcaatgagccagctcctcactggggaacatgcaaacccccagctgctggtgtgcaggaaaagaatccaggagatcacctgatgaagcccagcattttacagataggcagtggagcaggggaatccagttgacactgtggctaaatttcagaaaacctcccatgagatcttgcaaaggagatggagaaaatatggctgaatgccagcaaggtaggacggaagcatgactgctctaacaaccaagctcaaagagcactgctcacccaatgtttccttcatgactagagcaaagtggtgaaaggaccctggtgagaggcccaaagaacaggaggtgtgagccaagagaaggtcctgccaggcctatgttgcaggctatttggaggctgaacttgaggtcagtatcaccagcatttttaggacggcagtggcctgatcaagtttatattctgagaggagcacttgggtgaccaggtgaagaatggcctaggggtcagtcccaccagagatcaggagtatccacctcacacaccagcctagccccagaggacagggtcttgagcctgtctctgaagcactgctcccgtctccatcctgactcatcctgagacacagttactgaatgtttactgtgggccaggctctcactgtacattattctattcaaatcccataacagccccataatgtaggcatcatttctactttgtaagtgaggaaacggataaagaggagtgtataacttgtccaactccctcccttctcccaccatttatgaatgtcagagtcaagactgagcaaggtctagttgattccacagcccagaagaatcacgtttctgatacatgggatacattgtgggttctcccatgactactaggacacacaatgagaaaggcctaggaaggactgaaacctctggagccagctaaccatttacacaaagcccaggagatgagagctggggcagggagtagagcgcaggagggatggggtctctctgatcacattgccaccggggaggatgttttctctgtgcaggtctatttaaagtatctacttcccatacgtttctcatgtgtttcccttactgaagtacagtgtttttgaatatgaattcaaatgttttcttgggcccacaatgaaaggacaagagtttctttagaaaacagccacttaaaactgggatgtacttgaaagtcaggcagtgacaagaagccccatgctctaacttacacacgctgacagatgcgcagacttatcattgctccttggctggtctgcacaccaaccactcttacacaggtacaacaacaatcagactataaatgatcaaaatcaactattgaaaggatcccaggccatgtgtcagagatgacaccctaggcagttggctaacacacacattgcagcaggtcttaaatgaatagtccattctggataaagtcattgcttcccttgagatgcaagaaactgtgctgttctgctcctgggtagcctgatgaattgactagagcaaagagacttccagcaggagcaaaggccctgaagtaggaacttgcttagcatgttaaaggaagtgtggctgaaggctagtgaggtaggtgagggcacagagatgaagtcagagaaagcagcaggagaccaaacagtgtagggccttagaggtcatctaaggactccagtttttactctgaatgaggtaagagccaatggaggacactaaagagaagagtaacatgcatgacttacggttttaaagggtcagcctggctcatgggctatagatggaactccagatatgcagcaattgtaacatccagcagagagatgataatgtcttgaaccaaagtgctattggtagaggtgatgaaaagggtttaggtattagacacattttgaaataagggtgtattagtcaaggtactccagagaaacaggaccaataaaagttgagaaaaaaaaaaattaacaaattggctcctgtgagggttggcaaatctgaaatccatagggcaggccagcagtctggagactcaagtaagagttgctattgcagtctttagtcaaaattccacagagcagcagactagagactcatataagtttcccatgttgcagtcaagaattcttgagaagaatttcttctttttcaggaaacttcagtcttcagtcttaaggccttcaactgattggaaggcccccagtcagctagtgggaagacccatgcacattagagagggtaatctgctttgttcactgtctactgatgtcaatgttaattatctttaaaaaaaaataccttcaacatctattttgttctttggtcaaacaactggccaccataacctagccaagagaacacatgaaattaaccatcacagagacccatgaggatgtgttgatacattgaatgtatgagaggaaaaaaaaaaatctactttagagtagttctgattttttttatctgaacaactgaaataatttaataattattgaaatgttaaatgctaggagaaaagaagctttgtgaattgaaaccaggagtttggttttgtatatgtaatatttaatagtcctttagtatatccaagcaaatgtagacaaagcaatctggagttcatggagaagttaaaagctgaaggtaagtatttgggagttgtcactgtgtagagggtatgtaaagttagaagaccaagcaagatctcttaaggcagaaagtggaggatagaatacagaggatatatcaagaatgagccctacaagcacattaatttttatatgaataagaaaggagtagaaaccagcaaaagcgatagagaaatagtggccagtgagacgatatgcaccaagagcataagatggtacagaattcaagtgaagaaagtgtttcaagagcagaaggtgattaactatgtcaaatgctgctaataagtaagatgtgcacagagaatttaccactggacatcttggtggagcagtggagataaaagctagattgagaaagcttcaagagtatacggt

SEQ ID NO: 509 - DNA, 2155 bp, Homo sapiens
atggaaatcgtctttgacaaaactgaaatgccctgaagttttaattttttaaatacatgtaatgaattggtatatggtagatactcgtggctacttagtatttaccaaatgctttgtttccatctcgtttatttttattttttatttttttaagagacagtcttgctatgttgcccaggctggacttgaactcctagtctcagccaaccccttctgcctcagcctcctgagtagctgggatcataggcatgtgccactgctcctagctcttccatctcagtcttatgatgtagttactattttcattttataaataagaaaatagaagctcaaataaaatgggtagtttccttgaggtcatcctgttagtaagtggtggaatgaagttacaaacctaggttttattggtcagcacacacagtgccgggcactggcagtacagcagtgaacaaaaggtctgttggtttgtctgaagctctcaaccttgattctgcatagactcggtggattgcccaaggccactcaaccagttaatatcagagccagctctgctgtttgaccagtatattattttcaccatgctgtatctgcttctcagtcaccaaaagcaccagctaaaattgtatatagactgattaggggacttccaacctaagattgtcctggaaacttaattcttatcttggctcatctcttcaaaacagatgcctctttcgttggtgacctcagatacactgttcagaagtactcaaagtattccttttttctcacatttgagagtcactctagcattttaatgagttaagcaagccagccctgcatttccaaacccttcccagaagtctaaccttactttgatctgatgacatgggctttttaaaagattactatttttttagaggtggggtctcactatgttgcccaggctggaatataatggctattcacaggcacagttagggtgcactactgccgtgaactccaggactcaagccatcttcctgccacagcctcctgagtaacctaggactataggtgcatgccaccatgcccagctgacaatggctttatatacataatatttcctcagcaacaatttatgtcttatttggcacctgtaaaaccctcttcactgattatgcctgtttaaaggtttggtatttactccaagtcacctgcctttagccatggagtattcaagtttctttcagaatgagaatttggagggtgctcatagaaatataaaacaaggctgggcatggcggcttacaccttgtaatcccagcactttaggaggctgaggcaggtggatcacgaggtcgggagttcgagaccagcctggccaacacagtgaaacctcatctctactaaaaatacaaaaattagccaggcatggtggtgcatgcctgtaattccagctgctcggaaggctgaggcaggagaatcgcttgaacgcgggaggtggagtttgcagtgagccaggatcacaccactgcactccagcctgggcgacagagagactctgtctcaaaaaaaaaaaaaaaaaaaaaaaagaagaagaagaagaaatacaaaaccaactctttatagtagacagtttatcccccagaaagctttttaggctgaaaacgtttctatagattttggatttccttctgatagctaaaatttgtttctgtataacagagtagtgccctataagccagttcagtgcacattaaatggctgttcttagaattatgaatctgaggcttatgcagtgaggctctagctctctggagtcagttggtcaagtgggattcctgaggactgagcaaacacacacagagcaggattttgtcctaagttttcttagggatcctatccaaaaacaccattacttgaatttcccagcttccttttacagggagacttccttgctatgtgtactcccacctcggtatgtcaaatcattttctcagaggaagtacagcataaaataataaccagcatttgtagagcacttcttgtgggccttcttgggcaaatagacattctcatggaatgctctaaaattgttaagttcttgcacttgctctcaagtcatttataatctaattgctggtcttcctggtatgaacaaagatgtttgcttgttaataaattcctaccacat

SEQ ID NO: 510 - DNA, 472 bp, Homo sapiens
actccagcctgggagacagagcaagactgtctcaaaaaaaaaaaaaaaagttatttcactagcaacatataattaccataaaacaaaggagggttttaaatgaactacacatgcaaaatacactagaaaagctagatatttttaaaaacgtggtgaattatttggtaaagccaaaatattttaattcataagttactattcccccaatgcatctattttgtaaatgctgtttcacatatgaggtttgtaaaaaagcaaaatatatgtataaaatggcgtacataaagatgttctacaaatatagccagaagttattgttttactgtatgcaaagagtgatggcaatttttaattcaaatgtttttaaatatttcgaactgaaactaaatcttaccaatgtaaaattgccacaaagacggctggaaaagagaaaagttattaaaagctgctttattataaaataccattaaaa

SEQ ID NO: 511 - DNA, 2838 bp, Homo sapiens
agagttcactgcgaggactgggatcacccgtcaccccgccctggtctacggaaaatgacaagtgtttactgatatagaaacggaataacggcgctgtgggctggggtgggcggagctgccttcaggcttctggtctccagcggcggggaactcacacctgccgctgtgaaaatgcagacccgcggggcagtaattccgagtccagcctggggcgcgatctggaatcttgactcgcttgaaacaccacgacggattcggagacaggtgagtagagaaatgagcctcagcccctcccacgggccgcccacggattccaggatccggaaactcttcctgctgctgcgtcaccccaggaaggcagcgcccgcctctgggcagttctgatggaaactggcttcgccgcccagaggaaaacccacaactaaggggccaagaaaaagcctccatggtcccgccctttcagtgaggatcctaatttataccccgagtgtggcccccatcaaagtctgcagtgacagccgagcgcggtggctcacgtctgtaatcccggcactttgggagaccatggcgggcggatcacttgaggtcaggagttcgagaccagcttggccaacatggtgaagccccttctctactagaaatacaaaaattagccgggtgtggtcgtaggcgcctgtagtcccagctactcggaggctgaggcagaaaaatggcttgaacgcgggaggcggagcttgcagggagccgagatcgcgccactgcactccagcctgggcgacagagactccatctcacacacacacaaaaaatgtagagtgacgttcactgaaatgatactagaccagcgggagggacccagagcgctgcggttcacagaatgcggtgacagcgccgcctcgcgtcctttacttcaactgccccaggcagacgtggtcacgtgtgttggcctggaggctggaatacaccggggtcaaatgcagagtggagaaaggagggaaggatgggaggacgtgttgaagaaagacagtaagagctagcgctatggttcatatctgtaaaactagagttttcggaggcgaggcaggaggatcgtgtgagaccaggagtttgaggtcgcagtgagccgtgatcacaccactgcactccagcctggacgacagagtgagaccctgcttttatatacttttcatattttctgtaattaagcaagttttgtgtccggaattggtgggttcttgatctcactgacttcaagaatgaaactgtggaccctcgcggtgagtgttacagctcttaaggtggcgcgtctggagtttgttccttctgatgttcggacgtgtccggagttttttccttctggtgggttcgtggtctcgctggctcaggagtgaagctacagagctttgcggtcagtgttatagctcttaaggcggcacgtctggagttgtttgtttctcccggtgggcttttggtcttgctggcttcaggagtgaagctgtagaccttcacagtgagtgttacagctcataaaagcactatggacccaaagagtgagcagtagcaagatttattgcagagcaaaagaacaaagctttagcagtgtggaagagaacccgactgggttgccactgctggctcgggcagcctgcttttattctcttatctggccccacccacatcctgctgattggtagagccgagtggtctgttttgacagggtgctgattggtgcgtttgcaatccctgagctagacacaaaggttctccaagtccccatcagattagttagatacacagtatggacacaaaggttctccaaggccccaccagagcagctagatacagagtgtagattggtgcattcacaaaccttgagctaaacacagggtgctgattggtgtgtttacaaaccttgagctagatacagagtgccgattggtgtatttacaatccctgagctagacataaaggttctccaaggccccaccagagcagctagatagagtgtggattggtgcactcacaaaccctgagctaggcacaaggtgctgattggtgtgtttacaatccctgagctagacataaagactctccacgtccccaccagactcaggagcccagctggcttcacttagtggatcccgcaccggggctgcaggtggagctgcctaccagtcccgcacggtgcgcttgcattcctcagcccttgggtggtcgatgggactgggcgccgtggagcagggggtggtgctcgtcgaggaggctcgggccgcacaggagcccttggagtgggtgggaggcttaggcatggcgggctgcaggtccccagccctgccccgcgggaaggcagctaaggctcggtgagaaatcgagcgcagcgctggtgggctggcactgctgggggacccagtacaccctccgcagctgctggcccgggtgctaagtccctcattgccaggggccagcagggctggccggctgctccgagtgcggggcccgccaagcccacgcccacccggaactccagctggccggcaagcgcggcacacagccccggttcccgctcgcgcctctccctccacacctccccgcaagctgaaggagagggctccggccttggccagcccagaaaggggctcccacagtgcagcggtgggctgaagggctcctcaagtgccgccaaagtaggagcccaggcagaggaggcggggagagcaagcgagggctgtgaggactgccagcacgctgtcacctctcggttttactttattttaggataaaatatctattgtgaattttaaaaacatgtaaaataaaattttaattaaaaagcctaaa

SEQ ID NO: 512 - DNA, 602 bp, Homo sapiens
attcacgcctggaaaacgctcttctgagaggatctgtggaggtcaacccaggagagagaagacaggactgaagcactgaaagggtcctgccgttaagggcgcaggattgtatagaatatataatagcagtagcagctctgtttacggagcattaaccttacgtggagttatttcctgcatttcctcctttcgtctttacaaggtagccgtttggcgtcgtgagagattgggtctctccacattgccccggctgctctccaacccctgagttcaagtgattcacctcccttggcctcccaaagtactgggattacaggcgtgagccaccgtgcctggctgagaagatggatttaagacatattttggagcggaaagtgaccagaagaggtgtgcagtttccaggcctggcccatacagacctccaacaggtgctcccctgtgctgttactccttctgccaactggaagcagatggtgaccaggctctggagaaggcaaggcctgaagatgggagattcctaagtggaggagaactgtgccttactgacctaaatatccactcagtattgttatgtgagaataaataaacttgtgttgaccgtt

SEQ ID NO: 513 - DNA, 493 bp, Homo sapiens
cgctgctgtcaccccggccgcgccccccaactttctgcacagtcgcggagctggaagtttccgggcttcgcggacacgctgggctgggtttcagtcgcggctccgaggttggcaacaaagagggaaagaaggaggaaaagcaggccggggaggggaggaagagaaccgcgcggaggccgcggcgccgagagccccagaacttccaattctacccagaagcttttttcgtcgtgtttttctcttagacatgatcctctctgaggttggtcctgggcttccatacgtgattcatggaagaggtctcagccccaagagcccctgagggtactgtccactccccctggaaacttccagaacctgacgtggggctgaagacatagaggctctgagagttacataattgattctgactttggctgttggtcaacagtgtcataaggtaaaataaggctgttgtagaatctgctcagccagggaggggaaaggagtcggc

SEQ ID NO: 514 - DNA, 547 bp, Homo sapiens
tctttccacccgagcgcgaggtagacgccggggccacccgcagcacgcagagcttctgggagccggtggcaaggccgaattgggatgcaaaccaaatggacgtgggtgactggcagaaaacgcctcccacaaatgggagggatttcggagggaaccgaaagaaagttggaaaccaagttacagctgaagccagggccttctcctacccgactcccgcggcccattaaaacctacgtgagcttatctgataccttcaagccctgttttgtggccccatctcctcttcagatggcaatgtgcctagctacactacatttcctgcctcccttgcagctagaggtggccaatgagatataaacagatgctgtaagacatgatgtctagatccctagcagtcatcccagaccatgagataactttgagaaggaacaccatgtacaaaggactgtgcagaagagggttggcaggagcctggatctctgatgacttcacccttgactgcccacctcaccaggctgtacaagccactgttactggcagatgaatg

SEQ ID NO: 515 - DNA, 1143 bp, Homo sapiens
aacttttttaaaagtgaaaaaggaagcaaataatactgtatatttcatacactatatcttaatttgagatatatatgtatgtatatttaaatttagaaccatatattaaaatttttgcagtggttatttctgaaaggtggtttatggatggattaaatttctttctttgtacttttctgtatttttcaaattttctacaaacgaccatagtagaaaataatagagaagctgcaaaaaagggagaaaatttttataatagagaaaaagttgcaaaaaaggggagacacccaagtttatagtactatattttaggcaaattgccatgaaaaattgttaaacttaaaaaaaaaacttaaagaggtaaggtttggtgttattgagcacttcaaatgtggctagctcaaactgagatagctgtaagtataaattaccaaatggatttcaaagtcttagtgcaaaaagagaatatgaaatatctcatgtatttttaaacattggttacatgataaaaaaaattttgttagattaaataaactatattattttcttagtccattttgtgctgctataacagaatgtctgacactggttagtttacaattctggaggctggagtccaaggtcaaggggtggcatctggtgatggccttcttgcttcatcatcccatggcagaaggcaggagagcaagagaatgtgtaggagagaaatagagggccaaactcatttttctaacaagccctctcttgagataactaacttactccctcaataacaacattaatccactcacaagggcagagccttcatgacctaatcggcacttattaggctgtaccaccaacattgctgcattggggataaagtttctgatacataaactttggggaacatattcaaatcataggaattgttaaaagtaattttatgtatttctttttactttttaaaatgtacctaccagaaagtttacaattaaacatatggctgatgtttgtggctatatatgtattggacagtgctggtctagaatatcatccaatttttaataaacccctgaaacccaagtgactttaagtgctttacctttcccctaacatcctcttcagtattatccaataaaaaggctttatcctccatcctaa

SEQ ID NO: 516 - DNA, 4237 bp, Homo sapiens
agcagacattttcaaaggcttctctccccttcttctcctctctctgtcccccatgcggaaaggggaaaatagaagtagaatccagattggggcgcgtggctgatttggtcctcctcccgcaccatcctcccccagacagcagagaaactttgatgtctgggtgcatggcattcagggacagaggagcctgggcatcccagcaaatgcagccgcatgttccgcctctggacggcctctctgaactcctttgtgaggggagatgaagcccacagagctggaaagagcagcgttttgaaatgaggaagtgtggatcggcattccttgagctcagtgctagccaccttggcgatggggtgagccaaccaggagctcagatttataaaacttttgagctttgtgggccctagggggccactgtggcctacctgctgattttcagatggggaaatgggggctcagagaggggacaagatttgcttaatggcacctagcaaattggtaacaggtccaggagtagattccatgccttcagcctctggtgagacgtctttcctctgcaccaggaagtggaacttcaaacagcaccaggggttggaacttttgtttcaaatcctctctgcctcatccccacccactgcccagcaactcaaggctgggtctttcgccccctcaggctcagaagggctgtggcccagccacagagccagggggcctcctcagtagtattggccttcacactcttggtgctaaagttctccagttacttttttattaaaccaacatgtacagaaaaactcagttttcggctgggcacagtggctcacacctgtaatcccagcactttgggaggccgaggcaggcagatcacttgaggtcaggagttcgagaccagcctggccaacatggtgaaaccctgtctctacaaaaatacaaaaattagctgggcgtggaggcgcgtgcctgtagtccctgctagtcaagagggtgaggcaggagaatcgcttgaacctgggaagccgaagtagcagtgagccgagatcgcgccactgcactccagcctgggtgatagagctggagggaaaccctgataccacttctgggtccagatggctgtggctggaatgcggccacagccaggaacagcgtggtacggataccagtggggctctggtcttttcccagaggctggcacctttcatgccgagttgggcctcgggtctcggggctctaggccctgctgtgccagtggcctgatgtgtggccttatatgccagtcacaccctgctccagacctcggtttcctcatccacaaaatgggaaagctgggctagaaaatctctcaggaaggtaggtctctgctagctcccagccttccatggcagtgcaaagggaaccttcccaacaaagtaagagccaaaggctaagatggcagtctgtggtttgtagaaccttctagaagaccacgagacttggtaagctgagcttctaagtggtccaggatgcagggctggtgtcacaggtgtgtgaccagtagagctacacagggctttgtgcccagaagggccccacgcttgggaaataaggctctgcagtcactgtcttcaaattcttaataattttatctttgtcactgtgttttgtaagtgaagtccaatgggacagtggaatgtgaactgggagcatggagcctcccatctccctgcgtccaggatctgcttctcagctgcttgctcctctgcccccacagctccagctccagctccactcaccttctacctccctgcctcccacccagcaaccactgccaacctgcccccaacctgggcacaggcacaccctgtgggggagggggacaagcacaccccacagcatctcagagtggggcatggtggcagcagtccccatcctgcactggcagcccagggcacatttcatgtgggactctgcgggggtgagcctctagccccccccagatccagtacctcgtgtgtcctggtacaaaatttgtagtgccccgggggctgcccatctgctatgggttggggcaggggcctgtgggaggatgcctggctcaacctcctgccctaggcctggagcacaacatgtgggcccagcagctcacaggaaagggagccagaagatgggttcaagtgtttgtgtgttccccaagtcaccagggtgcctgtgggggtctgcactcccccaggagaaccctcatgtctagggagcactccatggggtcatctccatgcctgagaggaccctctcttccttctttcaaccttccggagcccagcttgtctcttccggccaggtcaaggtatcctcctgagagaaccgtgaaatacagtgtgccgctttgataattccacatgcatgttcaatattcggatatttccagttaaaactggcattgcacaatataaaaaggaatggtaaaagtcatgctaataatttaaaattttgactttacttagaatggtattaactagcaaatttaaaacaccatgacaaattgaaagtgagactggggaagaaagcaaaaagcatgttttctgactgtttgaacaaggggccccacattttcgttttgtagtgggtcctgaaaattatgtagccagtcctgcctggtgagccacctaccctcttgggcatttagttgtctatcagtaaactagatcattaacactgcgcctgcccctcctgctcacgggcacgttaggaacatgcgcttggataaaatccaagccagagatttagaaaccagtgtgtggtgccagctctcagccttggaaccacaagcccatttttcttaaaaagggatctggactggcatccaaagagatttcagtcccctcatataggtttaaccaccatgggcaaggcagtctctctcccaggtattcctctcactaggtgctctgctctagaaatgaagtctaaaagcagccccatcaatacagaacagagttagaaccacccggagagatttaatctggaatcccagcaagttgtgaaatggaaagactagtcggccagagagctgaggtctcacagtgtgcaaagaccagtcctcagtatctgcacccatccatttgagtttcaggtgaagcctaggatttgggagctcaatacaaagatgccagcatgaaggagggtgggtgccaactaggtttggatttagagacatcctccttttgggaaaggaaaatatcctgattccacttaggtttccaggaagaaggcatccccatttcagaacagttttctaagccaccctcatggaggtttcacctgcagctttcagtctgctttgtctgatgtttgaggatgcaactgcccaaaaatgggtctaaagtagcatcccgtcacgttctgtaaaaagtaatactgctttaaggtaacacttatggaatgaatgaatgcatgaatgaatgagtcagtttggatgaagttgcctcaaatagagtctaaatataagatttcatactcgatagtgtcatttcaggatcaggaaaaattaggtgactcccatttggtttctacagcttttccccaatatcatgttaaagttttggcttttatcttatttcacttatttcattttgagtcatgtcttctggctccagctcagcttcctagagataattcattaggcccgagagctgctccagagtgggattagaacccgtgtagtacatagtcacattaaactgagatcggctaattaatcgctcttctccgtgtaactgagcgatcgcgctccttccccgaggaattgcaatttcatggttcctaatgatggtgcgattacattatgtggatcacttaggctgtgggtgtcaggagcggtacttggagcctctctcggtggggatgggagaagtcacttctaaaaccggggagatggaggaaagcagttagaatgtctgttactaatttttgttaacgtgctgctgtttcctacatctcattcaggcattagtttcaagttccattttcccccagcaccgtgtggcaccttccccagaaccctcacattttttttctaatattcacagggttattgtttgtaaaaaatctatttatttgctttattccatcaagtaatttattttcatgagatttcttggaaatgtggctctacatatcgttagtacaagtaatacattttgattgttgtttcctggaataacttgtattatttgatgagttaaataaaatgcctaattctaaa

SEQ ID NO: 517 - DNA, 5372 bp, Homo sapiens
ccgccaagcatattgctaggcacagagcaggtgtgcaacaaaagttatttctcaggctttccctcctctgagcgccgtcctccagagggtccggagtgtagctgggggttggagcagcagcctcctaggcgatgggacagagcccacagggtccggtatgccacggtttcttcgtcagaccctgggaatccaacgtcgcaaaataaacacggccgcgccgctaatcgccagttcggaggaaacaaaacagcgctgcgctgggggatctgggcaaaatcagccctccctcctcccgctccttcgccgcggccctcccctcctcgcgctgctctcgttcgcttggctcagctcagctcagctcagcgcagctccgcggccgccaagccgaggcgggcacggtctccgagtcgcggacgccagctccgagctccctctctccgccgcgcctccgccaggtcgcgccttcgtcgggaccacttcgggcaggagtcgcgtggcgaaggcctgcggccgcggcacaaagttgggggccgcgaagatgaggctgtccccggcgcccctgaagctgagccggactccggcactgctggccctggcgctgcccctggccgcggcgctggccttctccgacgagaccctggacaaagtgcccaagtcagagggctactgcagccgtatcctgcgcgcccagggcacgcggcgcgagggctacaccgagttcagcctccgcgtggagggcgaccccgacttctacaagccgggaaccagctaccgcgtaacactttcagctgctcctccctcctacttcagaggattcacattaattgccctcagagagaacagagagggtgataaggaagaagaccatgctgggaccttccagatcatagacgaagaagaaactcagtttatgagcaattgccctgttgcagtcactgaaagcactccacggaggaggacccggatccaggtgttttggatagcaccaccagcgggaacaggctgcgtgattctgaaggccagcatcgtacaaaaacgcattatttattttcaagatgagggctctctgaccaagaaactttgtgaacaagattccacatttgatggggtgactgacaaacccatcttagactgctgttgcggaactgccaagtacagactcacattttatgggaattggtccgagaagacacacccaaaggattaccctcgtcgggccaaccactggtctgcgatcatcggaggatcccactccaagaattatgtactgtgggaatatggaggatatgccagcgaaggcgtcaaacaagttgcagaattgggctcacccgtgaaaatggaggaagaaattcgacaacagagtgatgaggtcctcaccgtcatcaaagccaaagcccaatggccagcctggcagcctctcaacgtgagagcagcaccttcagctgaattttccgtggacagaacgcgccatttaatgtccttcctgaccatgatgggccctagtcccgactggaacgtaggcttatctgcagaagatctgtgcaccaaggaatgtggctgggtccagaaggtggtgcaagacctgattccctgggacgctggcaccgacagcggggtgacctatgagtcacccaacaaacccaccattccccaggagaaaatccggcccctgaccagcctggaccatcctcagagtcctttctatgacccagagggtgggtccatcactcaagtagccagagttgtcatcgagagaatcgcacggaagggtgaacaatgcaatattgtacctgacaatgtcgatgatattgtagctgacctggctccagaagagaaagatgaagatgacacccctgaaacctgcatctactccaactggtccccatggtccgcctgcagctcctccacctgtgacaaaggcaagaggatgcgacagcgcatgctgaaagcacagctggacctcagcgtcccctgccctgacacccaggacttccagccctgcatgggccctggctgcagtgacgaagacggctccacctgcaccatgtccgagtggatcacctggtcgccctgcagcatctcctgcggcatgggcatgaggtcccgggagaggtatgtgaagcagttcccggaggacggctccgtgtgcacgctgcccactgaggaaacggagaagtgcacggtcaacgaggagtgctctcccagcagctgcctgatgaccgagtggggcgagtgggacgagtgcagcgccacctgcggcatgggcatgaagaagcggcaccgcatgatcaagatgaaccccgcagatggctccatgtgcaaagccgagacatcacaggcagagaagtgcatgatgccagagtgccacaccatcccatgcttgctgtccccatggtccgagtggagtgactgcagcgtgacctgcgggaagggcatgcgaacccgacagcggatgctcaagtctctggcagaacttggagactgcaatgaggatctggagcaggtggagaagtgcatgctccctgaatgccccattgactgtgagctcaccgagtggtcccagtggtcggaatgtaacaagtcatgtgggaaaggccacgtgattcgaacccggatgatccaaatggagcctcagtttggaggtgcaccctgcccagagactgtgcagcgaaaaaagtgccgcatccgaaaatgccttcgaaatccatccatccaaaagctacgctggagggaggcccgagagagccggcggagtgagcagctgaaggaagagtctgaaggggagcagttcccaggttgtaggatgcgcccatggacggcctggtcagaatgcaccaaactgtgcggaggtggaattcaggaacgttacatgactgtaaagaagagattcaaaagctcccagtttaccagctgcaaagacaagaaggagatcagagcatgcaatgttcatccttgttagcaagggtacgagttccccagggctgcactctagattccagagtcaccaatggctggattatttgcttgtttaagacaatttaaattgtgtacgctagttttcatttttgcagtgtggttcgcccagtagtcttgtggatgccagagacatcctttctgaatacttcttgatgggtacaggctgagtggggcgccctcacctccagccagcctcttcctgcagaggagtagtgtcagccaccttgtactaagctgaaacatgtccctctggagcttccacctggccagggaggacggagactttgacctactccacatggagaggcaaccatgtctggaagtgactatgcctgagtcccagggtgcggcaggtaggaaacattcacagatgaagacagcagattccccacattctcatctttggcctgttcaatgaaaccattgtttgcccatctcttcttagtggaactttaggtctcttttcaagtctcctcagtcatcaatagttcctggggaaaaacagagctggtagacttgaagaggagcattgatgttgggtggcttttgttctttcactgagaaattcggaatacatttgtctcacccctgatattggttcctgatgcccccccaacaaaaataaataaataaattatggctgctttatttaaatataaggtagctagtttttacacctgagataaataataagcttagagtgtatttttcccttgcttttgggggttcagaggagtatgtacaattcttctgggaagccagccttctgaactttttggtactaaatccttattggaaccaagacaaaggaagcaaaattggtctctttagagaccaatttgcctaaattttaaaatcttcctacacacatctagacgttcaagtttgcaaatcagtttttagcaagaaaacatttttgctatacaaacattttgctaagtctgcccaaagcccccccaatgcattccttcaacaaaatacaatctctgtactttaaagttattttagtcatgaaattttatatgcagagagaaaaagttaccgagacagaaaacaaatctaagggaaaggaatattatgggattaagctgagcaagcaattctggtggaaagtcaaacctgtcagtgctccacaccagggctgtggtcctcccagacatgcataggaatggccacaggtttacactgccttcccagcaattataagcacaccagattcagggagactgaccaccaagggatagtgtaaaaggacattttctcagttgggtccatcagcagtttttcttcctgcatttattgttgaaaactattgtttcatttcttcttttataggccttattactgcttaatccaaatgtgtaccattggtgagacacatacaatgctctgaatacactacgaatttgtattaaacacatcagaatatttccaaatacaacatagtatagtcctgaatatgtacttttaacacaagagagactattcaataaaaactcactgggtctttcatgtctttaagctaagtaagtgttcagaaggttcttttttatattgtcctccacctccatcattttcaataaaagatagggcttttgctcccttgttcttggagggaccattattacatctctgaactacctttgtatccaacatgttttaaatccttaaatgaattgctttctcccaaaaaaagcacaatataaagaaacacaagatttaattatttttctacttggggggaaaaaagtcctcatgtagaagcacccacttttgcaatgttgttctaagctatctatctaactctcagcccatgataaagttccttaagctggtgattcctaatcaaggacaagccaccctagtgtctcatgtttgtatttggtcccagttgggtacattttaaaatcctgattttggagacttaaaaccaggttaatggctaagaatgggtaacatgactcttgttggattgttattttttgtttgcaatggggaatttataagaagcatcaagtctctttcttaccaaagtcttgttaggtggtttatagttcttttggctaacaaatcattttggaaataaagattttttactacaaaaatgaaatttgtttggacttccacttgagacagtaaagagagtattagacacccagtaaaaactgccatataaagaagttgtaattgtttgttgtgtatgtatttttttcaatgccaaaccagctgtgatccaatttacatccacattttaggtccaacagcaagaagttcagagagagatttcccaaccagacattgggtcactcactggtcaccttgccagtgcattttattagaagggaatctgttgtagcaaatgggaataaacctgggtttctatagacccagaactg

SEQ ID NO: 518 - DNA, 366 bp, Homo sapiens
gcaacgtgttggaccttccggagcttctcagaagacagagggttttcttttgagatccctcccgtagctgtcatacagagtgcgatttatgacttgtaagttgtgctatggagcttgacaaccaaaccttcaatacatttatgaagagagcactaccgagactttatacaatggaataaaataacaaaatgtgctgacagcattcttccactcaaagagaaaaagtacttcaactcggccgggcacggtggctcacgcctgcacgcctgtaatctcagcactttgggaagccgagacgagcggatcacgaggtcaggagatcgagaccatcctggctaacacggtgaaaccgtgtctctactaaaa

SEQ ID NO: 519 - DNA, 2672 bp, Homo sapiens
aatcaacactccactcagacaatgcccagacctccagaaaccatgtgtcaagctcggattgccttagacaggtgcaatttaagaacagctttcatcctcttttctctcatattgtcacactatgtgttctgacttctggctcctttcctcacaagaagctcacccagctggaactcttatgggaccttggcaccagagaccacaaattcctctttgaagttttctaacagcaacaatggtatttctgacttggctttcttgtatttctctcacgttaacaaaattggttcagcatctaccatgggctacatgctgagctacagagtttcgctctgtcgcccaggctggagtgcagtggcgcgcgatctcggttcactgcaagctccacctcccgggttcacgccattctcctgcctcagcctcctgagtagctgggactacaggcgcccgccaccacacccaggaatccaacttgctgtttgctatcacatgtgctatacatgctgttgatgaaactgctaaaggggctgaatgtgactgacgtctttggaaggatgagacttagcgtgcctgtacagttgtgtccaaatgctgtcctcatctcccaatgaaaaggtattgtaaataaagagaaagatcagaggcttattttaaacactaaatatgagctaggagctgtcctagacactatgtaaaagttttatttagttctcactgtaatgttggccttatgttagcatcccatttttcagactgaggaaattatggctcagagaggttaagagacttattgaaggtcacacagctccacaaactttggtgtagattgaacgtgtacatgggtctatgtgactttgaatcttgcattctttacattattggaatatttcacagaaggaaaatgacatattaacatggcaataagatttctggttccagtctggttactggtcttccaagagtgttataggatgtatagcctgagctctgaagctttgttctgaagcatgctatcaatatgaacaaattggtatggaaggaagccacaaattatatactaaaatctagttcatcagaggaaaatatagttaaatacatttacattcccagaactgttaatattgaagaataaaacacacagtgggaaagagacgaagagaaaatacgcctgtttttatgacttgttgatatctacagggtttttccttaagcctcacaacaatttacagcattgccagcagcattcagtacattcagaacaggataatttcacccgcagctgaactagggccatgcctgggacagacagagaatggccttccagcagacatgccaagaagcaagccagggtcagtgagtgaagaggagggcaggcccatttgaagcaacacagtttatgtaagtgtgatctaactgctttcactggaaatgggtcagactccagttgagagaaccaggggcctgaatgaccccagcaaaatcactgtggcaattctttcaatcacctctgagaatatggccctgtgacgacataatgacgtttggattaattccagtcggctgtgttttcccctcctttcttgcctccccgtagttgatttgccaaattttttttgtttgcttaaatacgcggaactaaacaggatacattatatgacagtctgtgataaatttaccactgggaatagggaaaaagtatgggataaagaaataggtatttttcgcctctcacagctgtgattcagttctgactcaaaaggaagtgtgccacctactgaatcacagaaaccacttcctgtggctgtttggtttattctggaggagcatcaggccaagtgctgccctgccctgaccctgactggctcttcagagccaaggcattcacagcttgaggtggtttggcctcagactcttgagaacattgcatattaaattacaagtgtttcgtttcctagcaaggagtctttagcaacatgaaaacgaacgtgtgttatttgcaaaccaagtatatcattactgaacctgaatatccttactttttcataaggtacgtattccggatgaccactcttaagatctgaatgtacactggttctgtttttcctgaggggaacttgggcagtctgcagggtggcatttaccagctgagggacttcaagagcaccctttaatcagtgtggcagcactcaacttgtattcactcactcagagtatttttgagcatgtacttattgccatgtgctgtgctaggtaggggtagagggtacagtggtgaacaagaccccacagctcctgacctcatggctcatgtgttctacaccataagggaatcaagctgtgtctcccggggcaggggccttcctctgttcaccatgcagccccagcatctagcacctggcgttgcataaaggaggctctaaatcaagcttgtccaacccaaggcccacgggccacatgtggcccaggatggctttgaatgcagccaaacacaaatttgtaaactttcttaaaacattataagatttgtgtgtatgtgttttagtccatcagctattgttagtgttcatgtattttatgtgtggcccaagacaattcttctatgtggcccaaggaaaccaaagattgaacactcctgctctaaatacttgtttgttgaatagatacatgaaaag

SEQ ID NO: 520 - DNA, 351 bp, Homo sapiens
gtttgtttaatgatccgtcttctgcagtagtgagggtgttgtgtcatcctaggacagccttttgggagaggagccaagatggccaaataggaacggctctggtctacagctcccagcgtgagcgacacagaagatgggtgatttctgcatttccatctgagactggtgaaaatatatttatggactggtgcttgggaatcactacttagaagataaaaatatgatcttcatttctaatcacttataactgttgaatatctttatttttttctatctagaacttatgtttaaatctgttttaaaagtttcaaataaaactgtagtttcctccacattgaagaaaacttcaaa

SEQ ID NO: 521 - DNA, 989 bp, Homo sapiens
ttacaagtgaactttctttcctgttttaaagccttttaaataaacttccactcctgtgctgaaacttgccttagtctttttttctgctttatgcccctcagtcgaattctttcatctgaggaggcaagaattgaagttgctgcagacgcctgtggattcaccacaagtacattggagtaaccactgggaacaacaggttgccttagaagctttgcaggttgttttgtttttttgtttgtttgtttttttgagacggggtctcactttgtcgcccaggtttgttgcccaggctggagtgcagtggcgcaatctcggctctccgcaacctctgcctcccgggctcaagtgatcctcccacctcggcttcccgagtacctgggactacaggcatgcaccaccacacccggctaattttaatttttattttgtatttttagtagagttggggtttcaccatgttcccagctggtcttgaactcttgaggtgaagcaatccgcccacctcagcctcccaaagtgctgagattacagacgtgagccatcgcgcctagccttgcaagttgttttttgttgaacagaagaagctattcaaaaatgtccaggactctgttatttattcagcaagcttacaaagccatctttgattgactgattctttgacaatgactatctggatgacacaggaaggatgcaattctggccttggagagaaaacttgcaaggaaaggaacatgtttgaatttcagatgtgttcctcaatgaatcacgatcttcagggaatgtttcaggtggaggaaggggctcttggtcaatgagcctgaagactgcatggcaacctttgccagcttttggcctgaaaactcaacttcttcatttgagataattcctgttttatatactttcatttgagatattcctggtgtatcaactgaaacaaaatctatgaaatatcagattcacaaaaatacattttgaatattgaacgtgga

SEQ ID NO: 522 - DNA, 391 bp, Homo sapiens
gtggtgctggtgtccctccacttcccaaaagaatgatgccggactcattcttggtgctgaatgacaggttgatttctgttcctacatcaattggcacaggggagagctccacaaaaccaggcttaggaaagctaactgtgtaaacattctagtgggtgtctatggccaattccaaattggagcctgtagctatgaacaatgaagatcctgaaagttctgttccagtctttaaacctcatcattcaagtggtggatttacttttttctttacccacattttcccttcatttccctaattctattggagtggtttaagataattttgattagaagcagcagacaaaatgaataattgtattatgataggataattaaaaatgtatgagaatga

SEQ ID NO: 523 - DNA, 2468 bp, Homo sapiens
ttgaaatgctcgatgatcttctcttcccgcacgttctcgggccgggcgtggcggctcacacctgtaatctcagcactttggaaggccctggcggaaggatctcttgacgtcaggacttccaaaacagttgggcaacacagcaagaccccgttcccaggctgggggcaaagccgggctcggtggctcacgcctgtaattccagcactttgggaggccgaggtgggcggatcacctgagctcaggagttcgagaccagcctgaccaacatggtgaaacccatctctactaaacatacaaaaattacccgagcgtattggcgggcgcctgtagtcccagctacatgggaggctgaggcaggagaatcgcttgaacccgggaggcgaaggttgcagtgagccgagactgcgccactgcactacagcctggatgacaagagactcccgtctcaaaaaaaaaaaaaaaaagacacctttctttgggcttagtgagcaaacattctacgcagtgcctaatataagccggcccaggcaccacccaagccttcggccaggactgttttcccgtttcgagaaggctccatcacactccacacgggatccagtcaacagccgttccaaacatggcgcgggaaggggtggaagacaagccagcgcgacgccgtccagcctcatccccggggcacaaaggggagactaatctccaggaaactcggggtacagaatcgataaccccacaagaaactagtttccgcgagtgggccttaaggaaaaagtaggtcgggcacaagcgagctgttcagacgcacttcacagcaaagactcgcggacaacacagcgagacgaaaacggccccgtgcgcaggcgcgcggaaacacgactagcgcgcttcgggacgacccctcccccttccctcaaaggccaaggaagtggctccgacgcgcttgcgcgaggacggaatgttgaggggagggggaattctttcccttcattgtcagagagaaccgcccccgcacggcgagcgcgcgcgcgctcacgcaccactctcacactccggcgcgccaaaggctttccgcttggcgtctcgcgcatgcgcggagggggaagcagtggcgaaattggatgctttttgctgagtttctcagagaagtttctggaaagatggagccaaagggacgctggggggtggggagcgccaggaagcaagcgtttgaaagaaagcgaaaaaacccaagcgcaccgcgacacctccaaccttcaagccacggcccaagcagagcccaaggccactgagaccctcacgccagagaaaaagcacagggaccgcggcagccgctcctccctctgccactgctcagcccccgagactccccagcacggggagagggcagggggtagccatgagaaacctagagcgctcactggacttttgcgaggtggaaggaaagccgaaacccgccctttggagccgcctgtgcgcacgggccccgtcgagtgggctcagtacgttaggactcagcgtggccgccaaagcattggttgggggcgtctttcactaatttttcctaggttttctcttctatcgggctctgtggtcctttcaccacccatcttcactttggtggcctgacgctaacgctgcgagttggggaaaccgtagtaaccccgggcctgaggggcgtcccgggcggcggtgctccgtttcttccagcggttgcccctttaagaaaaagccccccggagaggggcccgtgtggctgagtaaaggtggcgtgcgcccgcacaaaggcgccgcgttgttggcgggctccggaccctgttgcccctgggcggggcggcgtgggaagaccggggcgcctgggcggggagaacgacgttggcgctagcggggcagggcagggggagggagtcacgggatttagcaggtgcttctccgcgaccgagcgactgccattttgtggtgcggccgccgccatttcgcgcggccgaggggcggggtgtgggcggagcggcgggcgcgcccgggctgtccctcggggcggcgggctaacgcggccgctttgttcttcgcttctcggctcgaggccccagtctcgaccgccgaccgcctcggaaccgggctgcatccgagctgccacgcggcgtgtgaaccttgaagcgcggccggggaatccgcaaggcgccgactctcttcctccttgcaagcccttcgaaagtgagatttctcaccccacccttgcagggtggagagaacacgtttcaaaaaggggatgcctagaactcagccgtgggaagtgcctgtctaaagccttgtgctggtgccagtagcaaacccgtgcgcgtgctcggctttgagcgatcatggagctctgcaaatagctcaactgcagagcgtgccccttagagctcctgtgctgctgggaggcctcataaaggtgccaaaaccaggtgtccccagcggttggcctcttt

SEQ ID NO: 524 - DNA, 239 bp, Homo sapiens
acgagagacttgctgaaggagaaacaaactgtgaagtctgaccctagggaatgagtgctatgcggatcagatcaagagagggcggctgcctggctctgatgcttcccagacttgggacccaaaactcaagaagacaacgaaacatagtttttgctcttgttgcccaggctggagtgcaatggcatcatctcagcttaccacaacctctctcccggattcaagcaattctcctgcctcag

SEQ ID NO: 525 - DNA, 1904 bp, Homo sapiens
gctagaactggacacctcgggggtttcctgctttatggcgaaggacggagttttgctcttgttgcccaagctggagtgcaatggtgcgatcttcgcttactgcaacctctgcttcctgggttcaagtgattcccctgcctcagcctcccgagtagcagggattacagatggagcctcgctctgtcacccaggctggagtgcagtggcacaatctcgggtcactgcaacctccgccccccagcttcaagcgattctcctgtctcagcctcccgagtagctaggattacaggtgcacgccaccaggcctggctaatttttatatttttagtagagatgggattttgccttgttggccaggctggtctcaaactcctgacctcaggtgacccatccaccttggcctcccaaagtgctgggactacaggtgtgagccaccatgcctggtcccccacttgttgattttgcagaaaagatagctgtgttacaacctgtcctaaggtcaggtatgaatacttgtgcttctttcttggctccccaagccagagggcattcctatgcccaggtgagagagcacggagtgttactttggcagcacagtcagttaccagaggtaggaaaagcaaaggccaggcaggacatgaggggcccttgcactggctggttctccctgccttcaccaccctccaggtgaatgactgggtgaataatgattgactgaggaggtaatgaataatttatggacactgctggacctcagtctcctcatctgaaagatgagtggttggagaagtttaatggttttcaaatgctttttttttcagtcttcaaataagtgtttacgtagaagcaccatatctgaaacaggtgacagtggaccagtctgaatgaaatgagggttggcaggcctgagctccaaaaccttctgattgcccaagccctccttgtcttgcttggattatctccacacaaatggagaaactggacaaggtggtcatggaggtccctgaaagctcaaagactttctcattccaggattccccatgttcatatgccagcatggcatgggggtgctctgtagtcaagcagggtcctttggggggcttagggatggagccaggaaatggctctgggactcagcgggtgtccagagtctcatcagcagggtttctttactttcactgagtggctggtgcctgcacactgagttttgcaggcttactctcacagagtgagcttcctgcaggccccccactgcaacccctttccttcctggagctgtgtgctgactggtgcgtgagcaccccaggccctctccccatgctgctgatggtcagctttctctgcacgctcgtggttgccacagtcaacgctgataaaattgctgatgcagattgcctgcccagctgcgagtgctggcacgggaccagcagcccagacggtcactggaagtggttgggctgattattggcatcatctccattgtcctactcggttcttaaaggcatatggacttgcctcactcctacagcaaatgacggcatgggcaaagaggggcaacagacccaccctgaagacactcctcatctggttgacttggcagggttaagggaaaaagatgtgatgactaggagctgagagcttagtggttctgccagagctgcagagtctttgttggcctcagggtgggacctctcacatctctgtcagcttttcacggacaccaacctgttatgattcatttcacctgtcctgagcactagcaagaaaaattcgctgtagcttgtgatgtattattctggatttctcaactcattcatttgttcattcattcactataccattactgtctattataaggggggcacaatggtaggtgctgggaataaaaacgatgtttaacgttt

SEQ ID NO: 526 - DNA, 464 bp, Homo sapiens
tctatctttgttgagttttggtattgattttatgtgtcagtacctgagaaggagagaagtccttgagttgtttcgtaaatgtggctcaagtgagatgctgaacagtgccagccatgtggactctgccacagtgaaggaggaaggcagcactgagaagtgaaggaatatttgggaggatcagaagcttggtcctgattttgccatcaacaggaacttgatgacttcaagggagtccccaaaccctgggtttctgttttctcaactctaacatgaggggctagatgcatctggtttagttagtctccatgatggtttagttcgtctccatgatcctgtgaatttcagatgttgaaaatcttcggaaaagccctgaaagatgaacagtggtctcaaatagtcaagaccccctgctgggaggagcttctatcctgctctgtggaagaaatgggcatgccagatgcctg

SEQ ID NO: 527 - DNA, 442 bp, Homo sapiens
gtgggtctgtctgttgccctgtgctgcgcggtgcactctctccccctcggatctccttgtggagggtgggttgctcctgctgcccctcccatcacccatctctctgagctgcattatttttagggttataggattttctgggtgtctgatgtcatcagcaacccctactgttcgccagaactttcatgggcacgagcattcacacacacacacactcctcctcaatttctaacgctgaaaccatggtttttttttttttttttgagacagagtctcgctctgtcacccaggctggagtgcagtggtgtgatctcggctcactgcaacctccacctcccgggttcaagtgattctcctgcctcagcctcccgagtagctgggactacagcttacgcagcccagtcccatgtcccgccatccctcaccattgtcgagggtgacc

SEQ ID NO: 528 - DNA, 373 bp, Homo sapiens
gtgcctgcattttccccgaattgtttaaccctcatgcttcagaattaggctgaggcttgcggggtgggtcatgttgacctgggtgaacagagatccctttaagaagaacttctccatgttccagaggcgcgttcttactgcagatggcgacactgaggcccagagagacatcatgaccagcctcaggtcccacatgcagcctgctgctctgtagcctaaatcagatcactgtcccagctttcaggtcaaggctctggttgtgacacctgggcctggactgcgggtgaaaagttttgatgcaaaaacacagaccgtccattgtcctatgggctaagtggactcccttctgctaaccagagatgcttgtgctggc

SEQ ID NO: 529 - DNA, 2958 bp, Homo sapiens
agccaattggggtctttgaggcgaatgcgaggctggggccggttgcctaccggccgcttctcgccgaggcagtccagacttttcccccggcggtgcccgctccaagacagcatctgtcaacgctcctcttctcccctcctcctcctgccgggccgggctccgccggctgcggccgagaggacgcgggacccggcgcggtgagcccatcagctgtcaggcgagcggcgaagcggctggagggcggcgagagacacacaaagaacgcggtgggcggcggcggcgaaaggggacggcaactcctccccgcgcccgccggtgccaccgccggccgtgcttgttccgaggccgcgcagacaatgcggccgggctcgtccccgcgtgccccagagtgcggagcgcccgcgctcccccgaccccaacttgaccgtctcccggctcgcccagccccctcccggggtaggggcgccccctccctccggtggccggcgaaggaagtcggtccgcggccgcagatcccggcaacttgcgaaccgggaaaagtttgcggcgcctccgcggggcggcgcgacgcggcccgcccctcgcgtccgcggtcatcgcgggtgactttctcgactcgtcgtcagccggggccgcagcgcggccggtggggactgcggggcgggccggagtccgtccgagggctcccgcacctcgggctgcggatttcaggtactccactgggcattttctcttcatggagcttatagcaacaaaagtgttttacaaaacaccagacatgttggcatcatctcttagttgggccatgtggccagggaacccttcatgaaaccacctctgcagtcctggagagttgctgtagaagaaggaaaagagaggaagacaacacaacacaggaggggataagtacctctggacacaatggaagtagtagttgttgagcagagggaaagggataggagaaggatgtggactgcagtgctgcagtgccaggtaataactttgatcatgtacctccttggctcaggtgctgtctcttctactctcctccttacttgtactaccttatttagcacttaattatatactttcttgactcactttgagacacactgattatgtggtctgcctcaaagacagaatcctagttttggattttagcattactgatctatagccttgcaggggcttaaggatggcagctgtctctctcccttgggatctagcttttgcaaatattgaagggaagagatttctttgatcttataggaatagatccacagttcctctccagatttgcttttatagagaagtgtgtgtcaccaaaacaatggagatacggtcagagaggcccctacccccagaattttaatataattttactttctggggcatttattcttgacaaatactttctctcctatcagctcacttgttcctcacaaaaaccctataagatattaatattattaaacagacccctatgaagcacctcaagtctttctctcttcccacttccattcttgcacaccttttgctagactagtctctgcgttcatcacatcaggtttctaaaataaaagtcccctaataactttctatttgttctctcatcatattgaaccttttttgcctggcttataaggtggccttaaaaccccattttcctctaaacattgtctctgtagttcaggaatatggcaggctcaacactatgcttgagcccatattgcttccctcattagtgatgcctcctctcagaccacccagattctactcattcttcaatttccagcttctccttggagccttcccagatcattagcttcttaaaaatcccagctttctctgaattctgatggtagcccccgttatttggacaattatgtcctggtcttaaagtcctaatgggaaaaaaaagtacatgatggacttcatgtagagaagaaagcactggactgagttttaagacagctgctaaggagctgtgtgagccaaaccaggttactttacctctctggatctatatttgctgatctgttaagtggagacaattgggtcagataatcttggtggtctttgcttattctgaggttcttggacaacttggcctagttcacgtgggatgggattgaagatcttactgagttcttggatggaaatgtcagtaatgggcacttagtgccttcaggacttgttctatactatcccagaaatttctgatgctaaacttggcaatttttaaatgtcatattccttttctccaaactctttaaccacaagaattcagggaaggttatggggggtgacttagttatctggataatacatattgtggacaatatagcattatccttgggaatgatttcatattgttgaataaataggatcaacttcttgataaaccttagtcccaagcatttcatcttcattggatagtgttacatagtaatatatttatgttttcttttaatcatttcataacttggaaaatactaacatagtcaaaactctagggtaggtgatacatgagtttctgtagtaatctggttggagacatgttgtaattctgtatatatatgtacatttatcccatgcatgttatgcctaaactaagacggatacccctgaattaagaggtgctgttatacattgaccaggcttaagaatatctctttaaagtgtgtcgacatttaattgacctttggaagttcattctgttaatcatactcaaagtgctaaagctatggttgactgctctggtgtttttatattcattcgtgctttagcatataaattcttcagcataattgctacttatttagcaagagtttcctttatttgaaaatgtgagttgtgcttgtatttttgtgtctttctttctttctttctttttttaaactttgcttcaggctgggtagtggtagaggtttgaattaaaatgttttcctgtcagta

SEQ ID NO: 530 - DNA, 3828 bp, Homo sapiens
ggcggcgcggggaagaggaggagccaggaggctcggccgctccattcactcagcagcccaagcccggccaggcagcgcgcgctgctccttgggggcgccctcgcagctggggtgagggcgggtccgagggagcgtccctctcggagacaccctcctcttcaacccaacacgcgctctcagctggccggtgtggcacaaccctccccccacctccccttcttggccttcgccagtgtgggagcctcgtctcactggagagtccgttcagaatccttgtgggggcggggaggggaagagcaccggtgcgaaccccggggtgccccctcgcccgacttggacttctccgactaaagaggtgggaggagttccctgcagcctgcggggccaagaagaaagtgctaagctgaggagccgcagtcggaggaccccagggacccgacaggaagtctccgtacgaccccaacggatccacatgcccggaagcccaggcgacactaagccagcgctggggaactgacgtactcctgcagtcgcagggcgctccatgcctctctgtcctcttctttgttgtgggtaacgttctctgcgggagacctgaggttttccaagggggacatgccagctacactggccttggcgccctgagctaagcaccaggactcacagcctagcacgaaggcaggtagcaccttcacccgccgcggacgataggcgctctcctgtacctcctttagctcgcgaggcccgcccttcgcgaggtcccagagaaaagcaggctgtggaaaactgggcgcccccttctttcacccaccttcttacccctgtcagcgccgagatctgtagcagaggttcctggtctgaaccaccgattggcaaagaaagctgcagattaaacttctcgttttacagagaaggaaactgaggcccagacagccgaaggagaggcagtctatggagcgcagcggtaaagagcaaggggttggtggccccagaatggaacctcagctctgccaggtaaccaacagctgtgtgaccctagacgagttccgcagtctctctgagcctcagtttccttactggtcaaacgggataatgggatactagcgcccacctcatagagttgttctgaggattagataggagagcagtgtgggcctttgactcaatcaactttacagtttttgttactactactgtttaaggacaggaaacaagttagtggcaacgccgagctgaaacccgggtctctcaacgtccagttggaggttttacccaccacccctctacctcttcagagctaatgggatgcagaggcgaggacagcccctggaaaaccatgtggcgttgatacactggcaaagcgcaggcatcccggcctcgaaggtgcataattattgcaatatgaaaaaatcgaggctgggtaggagcagggcagtgaggatttctcaacccttactttcaccccggcgctgtccactgcatctgacagagcgcggagctgggctgctacagccgcaaccccagggaccagtgcgcacgcctgggccgccctccgggagtcacccagcggccgcggacaactgaataaacaccccaaagcgctgcggtcggtcaagggcggggacagccacactgcgcgcggggcccgcaggccgtaataaagagtggctcgacctcgctgctgcctgtcgcgggagaggaacaagctttcgactagcgcctctccccggggcccgcgccccgagccccacgcgcaagacagcccaacagctgttcctcccctccccgccgactccaactcttcggaatctgcccactcggggctgcagggcaagtgtttaggatggttcccagccccgcgctggcggtgaaaatttcaacgtcattccttcaattaaaaaaaggggggggcaagggaggggctttgtgataactactcccagcttcttctgatcatttcaaaattaagtcgattttttttaaccagtccccacttactgtcctaactctcctcgctgaccctatctgggagcccggaaccgttaggtactgccgaatgcggtgcaaaatttccccctctcccccagttcgcagtgcctggagccgctggggttactcgtctgttctgatgccaccgcgagatggtccccgagctccccgagagtcctcagtgaaaggattccgcggcactgcctctattattataccgtaaatctttttaaattctggaactaattatatagaggatatgtctcaatttgttctgcattaatgccacagtggggatggaggccaggccgtggccagagcagatacgtaggcccatgaaattgatgaactgagagttgcttccagtcctgagcgcaccatctggaattccagtctgaggttacaattagaactcctgaccccagattcaactttgcaaacaacaggggaaaaaaatggggaaaagaaaaaccacgagagagggaaaaaaaattattctgcacctgtaaaaaaaaaaaaaaaaaaaaaaaaaaaaaaaaagtcacacaatcttaaaatctttccgtcttagacaattctttccaagtatttcttttgtgttttttaacctataaaagataatggaatgttttatagactggattttatctcatcccctttccctctcccaactgccctcagtttaatagttgtcagttttacctcagtgttgaatttaattatataggaacaaaatattcctcagtaaatttgcttgctaaatattctgtcacatttacttcccctttgagaaatggcttaattatagaaatctacctgcatctaggaattttttttcccttttcttttttgaccgccattccagcttaatcgtaagcagagattttatttgtgcagtaattttatttgtgttctaaattcgtttagccaatttcttccttctttctttagtaacaccctgctttattttcctctcactttgaccccctgaagaaaacgaaggaccaagcagtactggagaatctgttaaatttattagcataaatgcttagacaaaacgagatataaatcattcagatgtattaagccataaagtatcccaatgaagtcagtcccttgccagggtcctggtgtataaatgttcatataaaacaaggtatcagtattatctttcaaactgaatatatgttgtaaaaatatccaaggttgagttaggaatatggggggagggtgcagcagggcaggaaggggatattctttagaccagtttgttaacatagtggtggctcagaaagtatggtggaaaggaaaaatttcaaccgtttacatttggagtcttcttagataatatgtttttaaataacggtatgcaggatatatttgagagcaaaggaataagagaaaaaaaagatgactagagggagaaaggcattgatttctgtagaatgcatttgtcccccaaagatcagtttagcttcacaaaaatccacccagaggaggcactggctcttcacacagataacggattatccagtagagaagagctacctgggccttcgtctggcaactgggatatgcagccgctggtcagcagagggatgtgtattcattagcggtggaagacgaggaaagcgcccgggagtgaggaagaggaatggacagaattcctggcagaagcttaccaagacaaaaatcagacacaatgtttaagcagcaattgctcgtgaagttcataaccatggctctctgtaaatcttggcaaattgggacattctttgctttttggaaatgattgttttcaagactttttttaaaaaatcaagttgtccaccagaaaaa

SEQ ID NO: 531 - DNA, 317 bp, Homo sapiens
tgtggtttcactgctgttcaagggctctgttttgactgcaagaagagacactacgtagaagaataagtacataaaataagctgcattcatactaagtgagcatcaacaagcacctcttgatctctaagacagcaaaccaaaatcattacatgcaataaaatggaagcaaaatccttttatagaagacaagcaccgtatttctcaaccaaatgcaagcttacacaccaaatgttttgatttcaaaagaaacaatattttaatgtcctaggttgaagagttttgtgggattattattctgtatcttcaaagtaagtgag

SEQ ID NO: 532 - DNA, 537 bp, Homo sapiens
catccgctcattacagctggtgagctttctgttaacagtgctgcaagaacaaaggtggaggcattgaagcaacttgtgcttctctcctcattgcaacccacccttgtggcaggaaaagtcttcttgatcattcaaaccacttgaagacagcattcttcttcaggaattgaactgaatgtgctgccatcctaggcaaaaactcccaactgactgatttgcaaaggatttgtagctgataaagatggtgcttgggacacacattctccttcctttctggaggaaatctaaatgcctggagctgagcaggtgtttcatgtcgagaaagagaagaatatctggggatagggcattaaatgatgagaggaccaggataaggaaaccagaggctggcctgaatcactacaatcctggtcttgtagaaatccttgactcacctcttcattccaaattagcaaaatgagcaacatgtaattttttttatctacaggatttgggtttgttctgacttgtctaattacactcttcaattcaccaaaa

SEQ ID NO: 533 - DNA, 821 bp, Homo sapiens
ggttctgtggaaaatctgatgtgccaagaagtgttccataccattctgagaactctggatacctgctcagacagctctgtttcagctaaacagtaacatctgggagggaagcttaatgtggaatcaaggatgaagtttaacacaggaatgagaagtagagcacatagctgctaagataaggctggagtctcagctcattgcaacctttgcctgccaggttcaagtgattctcctgcctcagcttcccaagtaactgggactacagaatgtaatcatcgcaaggccaggagatgcgtttggtctgtgctgcatctcaagcaggacaatggctggaacatagtagggtctccaaaaatgtttgttgaacgttgctgatggcggcatcctggagtaggaaaaagactgaagagtggaaaaagaaatcctgacatgaattctgggcaaaggcaagcagtagctgacttggaaaatgattacactatagatggcagcacaccactacctacgatccgatcaccagcctgggtttgtaagtcagagctgttggtcaggagatggcagctaatgagtaatcagtccaaactgaatggcaaattaatgtcttcattaagtgaacaaaccagcttcctccataaacaaggtcagagtatttataacccagtgtatttcataaaagcaaaaacgcatctccatttacataactttactatggagctcatgatttatctgcacaaagcatatgcaaaatctcacttgtataccgtctttaataaggacccatgccattctgatgtaattattaataaagtcacacttgataa

SEQ ID NO: 534 - DNA, 553 bp, Homo sapiens
actttgcaaatactggggctacttttcacactggccaagtcagtttatgacaaaaacatgaggcaattagccaattccactgatcctgtgaaggctgcccaatttgagccacctggacgtcaaatgattgccatcagaaagagacaacttgaagaaaccaacaatgactatgaaacagctgacggcggctacatgactctgaaccccagggcacctactgacgatgataaaaacatctacctgactcttcctcccaacgaccatgtcaacaggctgtattgattggggtgtagactgaactatccggggtctgtttcttttcggtgatgaaagtcttgagaaggtagtaatggataagatgtgaaggagaggagagatggagatttggagtgtaggcggaaatccgaacgccagaagatctgaatggaatgttctggattgaagaaagtgggaaatggcctcaattcacaaagtcacagcctgatagaaaccagtgtgactttactgcccagtgaacccatctcgtcctccagcctttaggaggtaggttgga

SEQ ID NO: 535 - DNA, 5356 bp, Homo sapiens
ggggaaaggctctttgacctggaggagacgctgggcagacaccgccggatcctgcaggctctgcggggtctctccaagcagctggcccaggctgagagacaatggaagaagcagctggggcccccaggccaagccaggcctgacggaggctgggccctggatgcttcctgccagattccatccaccccagggaggggtggccacctctccatgtcactcaataaggactctgccaaggtcggtgccctgctccatggacagtggactctgctccaggccctgcaagagatgagggatgcagctgtccgcatggctgcagaagcccaggtctcctacctgcctgtgggcattgagcatcatttcttagagctggaccacatcctgggcctcctgcaggaggagcttcggggcccggcggtgaggggaaagtagtgggcagcatggggtccccaaccttgacgtctgggctcagccacccttcttccagcacttcagcagccccaagccctcctgcctttgccctcccctcccaggactgctggcaagcacatctgtgcctgcgtcagtgtctgtgtgtccgtgcatacgtgccaccacacatctcatcttttctctgtcctctctcctctctgaagagtcccacagactcagcagcagcagggccctggacacccctcgatccaatatccaatgaccagaggggaaacagggtgggctgtgtccaagatcactgagtccagtggtagtcagcgcttccccatgccctgtcccatcctcgttccctcgccctcaccctgctcaccctgtctttggctctttacttctctcttctcttctcttgaaccctgggccccttgatgatcccaggccccaggccttcccagctgttcccacagatgcagccatgggagctggggtgggggaggcagctttgtacactgccccctctccaagttccctggatgagagccaggacgccccaagcctggggaaaggaaacggagcatgcacatggcctagattccaggtcccccactccttctgggtaagaagctaagctaggaccttagactttcccctttcagaaggcagcagccaaggccccccgcccacctggccagcccccaagggcctcctcgtgcctgcagcctggcatcttcctgttctacctcctcattcagactgtaggcttcttcggctacgtgcacttcaggtgggccaccccgtgagcaggatttcccacagcactggcatctcttggttctcagctataaccattggatttaggagaggggacacttcagctcagaggggacctgccgagtccccaaatcacaaagagcacagtgcgggatagggcccattctctcaccaagcactactgaccacctgctcggcccccagccccatctgggtcctgctctcacggagctcactcacacaggtctaactgaccctgtgtcgtcaatgccatgatgtcaggaagctgaggggctacgagagtgcaggagaacacacttgaccccccttggttagggaatcaacctggaagggacatttgatatggtcattaaggtgactaggagttttccaccctgacaagataggtaaaggcatagaggcagagggaacagcatgagaaaaggcagggaggcatgagaaaaacataatattttagagaaaaagtggcaagttcagtaatgttggagcaaagggcaggacgagtttgtgaaattgggcaaagagatctgaaaaagtgagaggaggtcactagttttgcttggtgtgtgtttgctgaatgaacgtgcaccgtttagagatgtggggtgtgctaaaggcctcagcaatgagactgacaatctttgttggtggaatttcaagacaagaagagtccgtgtgggctgggatggtcctggaggaggagtaaaatgagctaagctttaaaaagcacaaggtagaaatgctcacaggcttcagcacatgcacaggagtgcagtggtggcaatcagcctggagccactaggacagaccttacatgcccagggggaaagcgtggaccatatgcagcgggccaaaggagccacagaaagtccaagaacagcggaggttgtggtgcagtgagtgtagcaaggcaagcatgagagtcctggtttttcaaaagcccataaaggagagacgcaagtaacctgtaaccttctctctggcagcaggcaggagctgaacaagagccttcaggagtgtctgtccacaggcagccttcctctgggtcctgcaccacacacccccagggccctggggattctgaggaggcagcctctccctgccagcatgcctgcctgacccacctcagagcctgctttgcatcactgggaagcaggcagtgtcttgggtgggggcttggtcagtatcctctccgtctgggtgcccagctcccacgcacacctgagctttcggcatgctcccacctcgttaaaggtgatttccctctccccatgctgtgatatgctggtcttctttccagcctcaccctaatctctgtgaaggcttccaccccttctgagtacctggctgggagtgcgctccaagcaggcaaggaggccaaggcctggcttaacctccaaaagaccggataccccacgggctttgaaccctcgactatggagggaaagagagccatgactgtatataattctgtcctcaaactcacccataacagagagcagtgtctcccagtgtccctcctggcccagctcagccagcatcactgagcagctctctccctccccactcctagctgctccaggggcagcaggggaggcgcgtgacagagcaaccctgagaggccaactcgtggaaccataactgggattcccgctcgcgccctcaggtctccctcccttttccagcgtcaagctctctgggcagctgctgggttcagtgacttgggtgggtggggagaatggggggcacccaaggctgggtttttaccccttgctgctacctggatctcccagctgaaatcctagttattagtggcccaggagaggagaaagttggaagaggctatggaacagggttccgggagtgtatgagctcaacccctctcccgggagagcgaccccaccaccgcaggccctaatcctctgtcagcagtgcccagcggagctcggcgttgaaggaggcacgtgggggaggcgggagtggggagcgggcacgtggtccagccttctcagccccgtgctgccccccgcccccagtgaggaggggtttggggaggtgggggcgggcccgggcgggggcgggcggcgggcggtgccaagcgtggggcgcgggcccgcggcgggagctgtccgcgaaacctagtgctgaagtaggcgcggacgtgcccggtgcctggcgcgtggtagcaggcgcccggtgccccggccggcgaagaccatggcgttcatggtgaagaccatggtgggcggccagctgaagaacctcactgggagcctgggaggcggcgaggataagggagatggggacaagtcggcagccgaagctcagggcatgagccgggaggagtacgaggagtatcagaagcaactcgtggaagagaagatggagcgggatgcacagttcacacagaggaaggcagagcgggccacactgcggagccacttccgagacaaataccggctacccaagaacgagacagatgagagccagatccagatggcaggtggagacgtggagctgccccgggagctggccaagatgatcgaggaggacacagaggaggaggaggagaaggcctcagtccttgggcagctggccagccttcctggcttgaacctgggctcactcaaggacaaggcccaggccacactgggggatctcaagcaatcagctgagaagtgtcacgtcatgtgaccacttccccggggttacccactgggctgggcccccatgagggctaagagtgtgtcaacttccagggacccatactccatttggggctttgtttcccttgccccatcctagttccaagacctttcccatccatgccccaagcctatcttctggtttcttcctctccgctgggagtaaagtccccatcttcactctacccttcaggaccctccccaccagctcagcctgtggaggcctcccaagattgtaggaataggcccatccctctctggccatggccccaagttcctgcacacaggagcacccacagagagacacacacaggacacaaaacccctggcacgttcagagacagaagccacagatacatcccggcacagacagacacacacgaggccagctcccttgcgtgtccagcccctccagacaccaccactcagaaactctgagagagagcatgggcagacaccctcagcagacaggaggcctgagttccagtctccacctttattgttcttgaaagcccctgctctctctgagccttatttcatcatctgtaaaatgggaatgtcctgaatgacttctaaggctctttctggcttgaactgtcagagccaagcccacatccctccttgggcagggcagcagctgctgccacagcctccagcggctgccactgtgggctctgggagccggagcgatgctgtgtgagaggcagagtgccaaggatgaagctggcactgaacagtaagcggctccaggcctcctctgggcccagggcccagccaatttctgttctgttcctgtagaacgctctctggattccatagctggaatctcctctcttagctcagtgaaaaataaaaatcccaaatggtgtgcctaccttcccacttcttactggcttccaggagtcttggagttcatagccccccgagcctgccttaaaggggtgtcctccaccccccacctacagcttcacaggaggggagaaggcatccagtgctaggagtagaagtgtctccagctctgttctcttggggccctgggtgaaggtggggtctggggcttatgaaataggtctgggctttgaggaggatggagcagcctcattatgtggggaagatggggcctctggggcgtcactgagaccacaggtggggccggggctggaccgcagctgtcttgggtgcctgtgcctacacccctcctcaccctagagacggaagatgtgcaaaaagaaagaaggaagggcaactgcattccagccccacactgtgatgactttgagcctgtcctttccctccttgagcctgtcttgcttgtcccctgtaaaatgaacagtccccctctcccccaaatagtaataatacatgtttcaaagggtgaccatttataaagcatatgacaaaccatatcaataaatgtaactcattctttt

SEQ ID NO: 536 - DNA, 1540 bp, Homo sapiens
actcccaacctccaggccccatggccacttcctccctcctgcgaggacagctggcaactggggtgcagtaccctccctgccccccgcccccttctttgggccacacgctgtgagaaggggtctagatcctcgagggggggatggctgccctgtgccggctctgcaggcacatgatagccgactgccactgctggggcgaggagggggggcctctttccacccgacagataccgacacccaatatagaaaccgagaagagccaggcaggaaaacacaagctctcacccgtctggaggctccgcggcttggcgcccagatatgccaggttcacgttggccttgcggccgtcgatgatggggttcgggtctttgcaagccctctcagctgccgcccggtcggccatggtcacctggtggagcagagacacatcaggggctgccgtggggggaaccaggggcgaaaggggcagacggctccgccctggcaccggatgctgccacccctctcttcccttcctctgagggtgcctgtgacccagggtccttgagccaaagctcctctgaaccctacctggggctctcccacaaagatgcctcctggattccagctcctcccgtcaaagttcaaggcctgggaaatgtggccttcaaggacaaaaataatcccctgcggggatagggcaaaaatgaaccccgaagggagcttggggggccgcctggacttgcccaccagtgagggccgagactttcctctgagaaggagtttgcgacgctatgcttggaaggcaaccgtcaggtgctaagcagaaccatgcttgggccttccacaccagtcaaggtactctcacagcaaagccccaccgaaggggcccacaggttggattcgaggtacgtgaagtcccaagagatgacatgaagccccaaatggatgccctggctccccagcaccagagggaaacgccccctcaccgaagacagtggcaagtgccatgcttcaagtaacacagggagcggcctccagtgcacctgttttagcagccagtcctggaggcagaaagatttacaagggagtggaaaggctggcaaacacaggacacatggagatgcccaaagtcagtgggggtcagggttcaacctggaaatgcagtcttctcagctgaggaaggcagtgagtcctggccaggaagccggtccaagcccctgcctcgtccccagttcacctcgtgaaagctgatgaatgaccaatgcttgcagaggggtctggagtaatggcggcaccgtattaaggggcgatcaggctgtatcttgacactgggattcataagaggaggaagaaacctatcatgctgacgggtagtgaagaagagaaatgaaagacaaaagacacaagagaaggccaggtgcagtggttcactcctgtaatcccagctacctgggaggctgagacaggagaatcgcctgaacccgggaggcagagggcgcactgagctgagatcacgccactgcagtgcagcctggacgacagggcgagactcagtctc

SEQ ID NO: 537 - DNA, 3300 bp, Homo sapiens
aaaggtgccgccccggtctctccgtcccgccccgagcacgcccctcactccgcaccggccaatggcaccgccccgtccgccccgctctgggaacgccgctccagcagatgtgacatagactggaagtgatggacccagacaacaatcagaaccaaagcaccagatgagccacctcagccacgtgagccatgccagccaccctacctgtgaccccatctgtggccccagttatcatggagtagagaaagaaagagcaagagcaggcaggagggcaagacgacagcaagagaacaagaaagaaacctgaagaaaagaagttttagtgaagatggaaaggcttaaaacataccatggagaatgacctcagccttctgtgtggaggatttgcacttggagataaggaaagagagggacttcagagagttaagcagttcagtttcctttgcatttcttacatctgagcaggtgaccggagtgaacactctggaagccacagtggagtcctctgcttggggcctctttctggaaaccagatcaattcactgaaaaacaatttgcaaatgactagttcattgagaagcaagtgaccaaaactctaagtcaccgaatgacctgctcattgatttattgaagattttattccaaggtctacttccctctgcatttgtggctgccatttcatatgtgaatgggtgggcagtttgctgtcatgccctttttgtgcatctctatcctgaccctgtatgtggtgctgccttttcccaggccccctgcccctgccctggcctctgtctgcaaagcagttgcagcaacctccctcttgctgttgaagatactcatctgatgtctattgtgaattggctggagcccttctacaggtttgttagcgtccctctgcatccaggctgatggtgcctgccatgcttctacatgctgttctctgccacccacctgagcccagctagagtcagtggggaagtggaggagccacatcaaaacagtgtgtccacctcagtcaccctccagtgtgcattgacgaccaggcagccattagacccaaatgcagccccacagcatagaggcaaatggaaaggccacatatcctcttttcattctccttccatgtgaggccctgcagagcctggcatctgtcttcatcatcgtggcatcctcagactctttcttcttcctggagcgagctgtgctctctgaagccactgcctgtgtgggaagtaccccagcatttcttcgctgttgccaggcatcccttcctgtcctaccacttcaaatgcatcttttcatgtgtccttcctgagcacctctagcagctgcatgttcctgtttcagcctctgcctttccacagctcctccaagattcctctattgcagagcacagcaccaccttgcaggaaacctcccagaggactgtgaggaccatgaagcaaggggctgcatcttattctccttggtgtctggcccagcagtgggcccaggccagatgccattaagaacattcatgattcatgagaggagatcaaaatatcaacataaacaggagtttgaaagaagttgatttcaacccttgtggatgactatgagagattcaaggcttcagtggagaatgcacctacagatatggtggaaacagcaaaagaaatagaatcagaagtggagcctgaagattaaactgaattgctgcaatctcatgataaaacttgaacagatgaggagttgcttcttacagggttaggaactgtcagagtgtggctcaactgagaaacaactttctgagtagaggtggggaaagatgggctaagaggcttctgaggtcatgtgttcaccatcactgaggcactgtgatgtgttaggtgggtctgaaccctctggcttcagagagagtgcctgtggggcaccaggtaatccgagactgcagctcagagattactccagcaaagggtcaggtatccacactgcctctgctacctgcccgttggtcactcactcattgttctgatgataagatcgacagatcacaagaaggactgtggcttgaagttccagagcagagatgcacattactgtctaccgctgaagtgaactgctgcccctctggagtctggatatcatcagaatgaaaaagcgagtgtcatgggcaaagcgaggagtccagcaggatggacgctgtgtggtttctcagctggagcgcagcaggagcaagcgtggaaacatccttcttttctcttctcccctcccctccccaagtgcaaatggaacctgtgaaatatggcttgattttgaggcttctaattcttcattgcactcccagacccttcttttatctctggtggcagccctgagaataaatctcttggtcacattcttcaatcagtttctcccagagaaaaggttaggctgcaaggatgataggaaccagacttcaaatgggtttccaggagctgagggaaggaaaggtttttcctacagtttctccagccaagggattaagaaaaggatggggtcatagagcaacagcagtagaaggtggcattccaagactttctccaggactccacctaaggtcagtttctcgtcactcatacctgtttgtcttttgcctggccaccatcaatgtagagttaagaaccaggaggcaggaacatgctccccaagtcacagtctgcctcccacatactgcagtttgattacagcatcctgcctctccacaggaggaaagtggtgtcattctccagaaccaggtgtggattgtgatcagacctagaattggctaggtaaaaagcttaagagagagattccatgtcctgcaacactgtccacaattcaaatctgtattcaaaataaaactaaaagcagagaaaatccacagcagacctaccactctccaggcagatagtgccctctccacaatctgcagccatcaactgcctctgctggacgctgcccagagagagacctgctgctgcagagcagctctgtgtcagccactgcggccttagagagagctgcaggaaatgggacttctcacgtgctctccacagtggaaccacaggtcagcagctgaatggagcctctaccctctggatgcctttcttgtcacttagtattcttttttttctcattctggtactttatctgctggaaactttcaaatgtattactaatgtccttccaaacagactccacatgggaattttcatgatatcttggctatatttacacaaagattagcttgcaggaaacacaaaataagtatgcataaataaatgagtggctcagcacacc

SEQ ID NO: 538 - DNA, 1795 bp, Homo sapiens
acaagaaccggcagcggcggcagcagcagcagcagcagcagcagcagcagcagcaactggatttgctttttcaccagaggatccagatttccctgtggcctcgcaaacaaaaaagaaggaagacggagcagcacagtcatccctttgtgaaaaaggcattcagagacggggtttcaccgtgttagccaggatggtctcgatctcctgacctcgcgatccgcccgcctcggcctcccaaagtgctgggattacaggcgtgagccaccgcgcccggccttagctggtttttcaaaagtcatggcgtgtaattgtccgaacagtgaacttcggagatccaccggaggggcgaggccacagctcgaccgcgagcacctgagcatcctgcaccgcctgcgacggccgtcagggggcgcgatgccgcctcacagaacctcaagcggcgcccgggttccggcacagacggcctgcggctccagggggcggagccgagccgtctcctcaggacctacgcaggaggcgccgtcatccctacagggacacctgagagggcccagcctcctcctcctcaggacccactcgggagacgccgctggctctctaggaacacctggggaccgtggccagggacgacccagcctccttctcctcagctcctcaggaacgactggggaagctgtggcttcatggtccccgaggctgcccgaggaaaggtatttcaggacagccaggagggggcgcacatccgccgcgaaactgtgagcaagagcgtctgtgctgaaccatggcgccaccagagggcgcgcgatcccgccccaaccaacttcccgctgaagtgccagaagcagcgaggagcttcaacttcctcagggcagcacgggggtcgtgttaatttggtgttcttcattgatgatgattattccccaccttctaagagacaaagaccaacgagccaccacagccaccagtcccagaacctgccaatgctggggaacggaaaatgagggagttcaactctggccctcacaatccagtggaggagacgaaactcatctgcctctgtccctctgggcacgcctcatgccaggtgcatctgtggacaggggccatgctcctgggcttccaaagttggagaaagctgccaggctcaggtctgaaggccagaattctacagtaagtcctactgagtcaaggtgggagcagggtcggtagcttccgaggctctgcgggagaatccgtttcctggccgtagaggtggcctgcactccgcagcttgtgctgcccgtctcgaatgactggagtttcctgcttctgtcactacacctcccaccctctccatcacctgctctgctcttacaaggatccgaagaaatggaatcatcgtatcgctgatctacgtaaacaaactgaagaattgtctgaaagaaaatatgacatgaacttatgaattcaacaggtgaagatttacaacttgataaatcaactttgtcagctcgagctgtaaaagccaaaggtccggtgatgatcccatacccttttttccagtctcatgttgaagatttttatgtagaaggccttcccaaaggaattttttttttttttttttttttgagatggagttttcactcttatcgcccaggctggggtgcaatggcgcaaccttgctggtcactgcaacctctgcctcctgggttcaagaaattctcctgccttagcctcccaagtcactgggattacaggtgcccaccaccataccaggctaatttttgtatttttagtggagatgcggtttcaccat

SEQ ID NO: 539 - DNA, 548 bp, Homo sapiens
ctggcggggctgcggcggctaggagagtgatgccatggagcacagtggtggataaggaagacatggtctggccgtaacaattttgaaatctaatgaagcagattaaaaagtcaatggaagcatttgagaaaaaaacacctttcaaagtgaaactgtattatgttactggaacatttgttaaaaatctattaacctctaagaagccaagaacagaaattcagcaataaaaggtaaacgtactctcagaaaccacctctggcctgaaaaggggccgactgaaacatatacctatttgaagatccctggcacacagatacagcagaagaagcccaaatggtttttgtggagcctttcggatttttttatataaaagagtcctgttctgttgtccaggctggagttcagtggcgagatcttggctcactgcaacctccgcctcccaggtttaagcgattctcatgcctcagccttctaagtagctgggactaaagacagagtctttctgtgttgcccaagctggagtgcagtggtgctcgtctcactgcaac

SEQ ID NO: 540 - DNA, 2666 bp, Homo sapiens
ttttttttttttttttttgagacggagtctcgctctgtcaccaggctggagtgcagtggcgcgatcttggctcactgcaagttccgcctcccgggttcacgccattctcctgcctcagcctcccgagtagctgggactacaggcgcccgccaccatgcccgactaatttttttgtatttttagtagagacgaggtttcaccggattagcgaggatggtctcaatctcctgaccttgtgatccacccgcctcagcctcccaaagtgctgggattatgggcttgagccaccgcgcccagctagacttttttctaatagagtcccccataaattttattaccatagatacgctgtgtatgtactgtttctgtgctttgtacatgaaaagagtaaaatgtttttgtttttgttttggagacagtctcactctgttacctgggctggagtgcaatggcatgatctcagctcactgcaatctctgcctcctgggttcaagcgattctcttgcttcagcctcctgagtagctgggattacaggcggccaccaccacccctggctaatttttgtatttttagtagaggtttcaccacgttgatcaggctggtctcaaactcctgacctcgtggtctgcctgccttggcctcccaaagtgctgggattacaggcgtgagccaccatgcccaaccaattttttttttttaaatccttggtagtgattgacccccattgagaatgcatgctctaatattttttaaaagggaagaagacctagtgatagacctttgcattggcaggcatgtctttatgtttatacagtgaagtagtattttttctgtcagggtcaatagaaagtagacgaaattcattttcagccaatctttcaccagttgtgctttgttccttaccccaccacaggcaacagacaaagcatttcctgctgtctttcaaggtcttaacagattctttcttgattataaatgtattactaagtagaatcatttgggttctttctataaaaatcagtgaaaatcctctagatgaatgaattaaagttgtaggcataacactgataaacctctgctctcatactgaagtaggctgcttgcaggaactgacaactattggttggctttaaatgtaatgtagatgccaaagttttagtgtacagtgttacttaaattaccaaattacctttgtacaaatattcctcagatgctgtctacaggtgccatataaaataggttgataagtatttgcaaattctggtaaattgccttgctatgatttttcatgctcagtattagtcctctagtatcaatacgaagtttttctattccccagcctactaaggcctacaggttaaaataccaggaataaaaaggttttcagtggacttgatttaagtggaatctggatgatgtgacaagtacctttgtctttggagtaatgagtttataattggcttttgtccaaaaactcttaagtggattaatatctgaacaatcttagacataattatatgaaactggatcagaaaggctttctgactcctttctcttcacttttttctcccagcttaactagaggcaattaacagtcatttcaaatctaattatttttattttccagtgtacttatcatcctttcatctttatgctaggagtatagtctcagttcttaatgagttgatgggatgaagatatagatagatagatagatagatagatagatagatatttttttttttttttttttttttttttttttttttgagacagagtctcgctctgtcgcccaggcgggagtgcagtggcacaatctcggctcactgcaagctccgccttgggggttcacaccattctcctgtctcagcctcctagctgggattacaggcgcccaccaaccaagcccggctaaggtatttttaaatgtactcaatcactgtcattttagtaaccttgaatcagaacctcagttgttaaaggcttaactgcttgtggcaactactatagtgctctagtggggacagtggttaaaatctgcagaatcccttgctttgtcatcttatccagaaggactgatagcttgttaaactgtggtatgattagaatgttggtggttgtgtagtgcatttggggtgctacaacgttaatcaaatataattgagctgttctgtttccagtcagtgtaaccatttaaaaataccttggcaaaacaagctaggagctagttcatgctaatattcttaaggacaaaaatagtttacagcttttttttttttaatctgaaatcctgaaggctatgcttaaaagttagagataaacctgttggaaataagtgattcatttatagactgaagcctctatgacttcaaaaagatactcaacagtctctggcatttgaagaacaaaatattttctctgtaaatacacctcatttccattctagttaggagcaatggcgcccaggacggcacacagaatggagaaaactggatagctggtaactcatttagctcttggcactctaaaaaacctcaaatacagccatccaagccagtaattctattgctgcgttatttctgtgtttaactgtgaaacttgcttcttgtctgtacccttgaaatggaataaaatttcatgagactccttgttaatgtagagaaaa

SEQ ID NO: 541 - DNA, 329 bp, Homo sapiens
ctggaattccatggctgaggtgcaacaggtcccacagcctctccagcctctgtgggaagaaggatcatctgatgcctatgtaatagagttgctgaaggagtggaagcagctttgacattatcagtggaacccaccagtgcagactgcttcaccaagggcacctgaggcagcagatctgaggattagggacgtagggagctgaagcctggctggagaggtggtgcgcacaagaacccccacattccccgacaggagcctgaaaaagcaagacgccatgttgggaggacacggaagcagttctagggagaggagcacatggcaagaagcca

SEQ ID NO: 542 - DNA, 555 bp, Homo sapiens
ctcgactcgtagccgcgggctgcgcggggagtcgccgctgccgccgccgccgccgccgccgccgccgccgccaagcgcccgtcggacggggaggaggagcaggagctggaggaggagccgccgccgccagcttcctgcctgacacagctcacttcaagaagtgcacaatgtcagaacgtggaattaagtgggcttgtgaatattgtacgtatgaaaactggccatctgcaatcaagtgtactatgtgtcgtgcccaaagacctagtggaacaattattacagaagatccatttaaaagtggttcaagtgatgttggtagagattgggatccttccagcaccgaaggaggaagtagtcctttgatatgtccagactctagtgcaagaccaagggtgaaatcttcgtatagcatggaaaatgcaaataagtggtcatgccacatgtgtacatatttgaactggccaagagcaatcagatgtacccagtgcttatcccaacgtaggaccaggagtcctacagaatctcctcagtcctcaggatctggctcaagaccag

SEQ ID NO: 543 - DNA, 132 bp, Homo sapiens
actgcccctagaggcgttgcagctgtggctgccgtgtcacatctgtgtcattaggtggcagagattagagaggctatgtctacgctcagcgttctgccccgtgaacgtttgaatgtttgatagtctcacact

SEQ ID NO: 544 - DNA, 2643 bp, Homo sapiens
aacactcaccaggaagttgatgtcggccgggcgcactaggcggtagctgcacgtcgcgcaatcctggctgcattcggcccgcacggtcgccaggagcccggggccgagcaacagcagccaagtgcaaagtgtcaggaaccgcgccatggactgcgaggagagagggacgcgtgcttcgagcctgcctgggcgcagaacggggtccctcggcaggaccctcgccgcgacagcctcagcaggggatcgtcgagcaaaagcccgcaggaatgctcctttctggggccccgccctcccggccgacagcttttaggtagacgtggaggcgactcagatcgcctcgcggttcccgggatggcgcggtcgcccccaacgcgaggctgcctggggcacccggctcttttcctgggcgtccgcggcccagggcaagattccggagagaacgccgcagaccaggggcgagagagcgggagccgggggaggcaggacattgactggggtcacaaagaagaaccagggaacgctgttggggaacccatgcaatgaaatgtgaagggaaagagggcgggcagacgtccccaaacccgctcagcaaagacaagcttcgggcaaattcactcacgttgacgctgttcggatggagcaggccaattggaaaagccgggttcagacacgactctagagggaagagaagaaggaagctgaactgacacgaaacaaaagaagtccgttgttttggattgagttccatacttggctggcccagaggttgatctcaccaccattcagatatccaagaagaagccacctgttggatttaagaaaacccagtcaccaataatgtggaatccatttcgtggagacaagctacttttagtcaaaaattgtaaggcacggtttgtcaagatggccgatacacaacagctccagtctacgcatcccagcatgagcgatgcagaagacgggtgatttctgcatttccaactgaggtaccgggttcatctcactgaagcttgtcggacagtgggctcaggacagtgggtgaagcccactgagcatgagccgaagcagggcgaggcatcgcctcacccaggaagtgcaagggatcagagaattccctttcctagccaaggaaagctgtgacagatggcacctggaaaattaggtcactcccaccttaatattgcgcttttccagtggtcttagcaaacaacacaccaggagtttatatcccgcgcctggcccagagggtcccacacccacagagtctagctcattgctagcagagcagcctgagatcgaactgcaaggcagcagcaaggctgggagaggagcacccaccattgctgaggcttgagtaggtaaacaaagcggctaggaaacttgaactgggtggagcccactgcagctcaaggaggcctgcctgcctctgtagactccacctctgcagccagggcacagctgaacaaaaggcagcagaaacctctgcagacttaaatgtccctgtctgacagtttggaagagagtagtggttctcccagcacgcagctggagatctgagaatggacaaactgcctcctcaagtgggtccctgacccccaagtagcctagctgggaggcattccccagtaggggcagaatgacacctcacatggccgggtacccctctgagacgaagcttccaggggaaagatcaggcagcaacatttgctgttcagcaatattcgctgttctgcagcttctgctgctgatacctaggcaaacagcgtctggagtggacctccagcaaactccaacagacctgcagatgaggatcctgactgttagaaggaaaactaacaaacagcaaggacatccacaccaaaaccccatctgtacgtcaccatcatcaaagaacaaaatgataaaaccacaaaaatggggaaaaaacagagcagagaagctgaaaattctaaaaatcagagtgcctctccccctccaaaggaatgcagctcctcgtcaacaatggaacaaagctggatggagagtgactttgatgagttgagagaagaaggcttcagacgatcaaacttctccgagctaaagaaggaagatcgaacccatcccaaagaagctaaaaaactttaaaaaagattagacaaatggctaactagaatatccagtgtagagaagtccttaaatgatctgttggagctgaaaaccatggcatgagaactacgcgatgcatgcacaaacttcagtagccctgcaagagctcctgagggaagcactaaacatggaaaggaacaactggtatcagccactgcaaaaacatgccaaattgtaaagaccatcaaggctaggaagaaactgcatcaactaatgagcaaaataaccagctaacatcataatgacacaatcgaattcacacataacaatattaaccttaaatgtaaatgggctaaattctccaattaaaagacacagattggcaaattggataaacagtcaagacccatcagtgtgctgtattcaggagacccatctcacgtgcagagacacacataggctcaaaataaagggaaggaggaagatctaccaagcaaatggaaaacaaaaaaaggcaggggttgcaatcctagcctctgacaaaacagactttaaacc

SEQ ID NO: 545 - DNA, 2839 bp, Homo sapiens
agatcagcagcaacacctagccaacccacagcttacttacagcagacatgtgaatcaatctagccaagactaaaagaatcactaaaccaatatgtcatcctatgaataatagtaaacgtttgtcttaaactatcatattataggaaaaaaacctgatatatgaaattaccctgtgagtttatattaaagatacacttaccttctccaacaagagttgtaacaatttttttcttattgcaaacaatgctatggggatacttatagtagcatttctgctcaacgtaatattttattgtagcactgtttgcaataagaaaataattggaaactgcagaaacgatcactaatgaggtatgggttaaaaatcttttaagttgaaagcaacaaatgtgacaattaaaaggcataaattagacatatattttacattatcacaacttgtattactaaatgataaaaatgagttgcaaaataatatatagaactttatattttataaatatgcacatgaaaaaatgtttgtaagtatgcacaaactgttaacagttattacttcagaggagtgaaaaataggttgaaaatgagaatgactttcatttttagtatacttaagtacattttcaattttcaattatatgcagtgattttgtcctttaaaaaataggatggacttttttaaatataaggaagacattttctgtgaaacaataaattactcagtatatacttaatgtgcatgaagtatgaggtaggaatacatccactgacattcttgcatttgcataccacttccccaaatatgaactcacttctctgactttgctagggctgaggaatcatcattacaatatctgtaaaactggatttattaagtgcatccatattgtttatgagtcatagaaaatatgttcattttcctatccatgttaaaggctgcttggaggattgacggagcattgcttagaaaatgttctggaattcagatgaagctgtgttagtataaatcattactggttaccatatactcacacatacttaggggataaagatcagaaattacttaaatgtactttgtcttcttcaatctttccgtagcagcacatgggtcaaaatctcctgaaagttgagcaggggagctgtagaagaattcctccttttctcgcagatgaaatcttatgatatagcaggggttacctggccaagaaggtaagtctgtcatccagcagtgcttgcagagggactaaaatgaattaggatgttcagagttgtatgttaggtgctgcagaaaggaagaaaagatctcatccataaaggggtctttgaccctggggaatggcagttggcaattacgctgcttctcagttccatcctgtgttgccccaggtttacttcatggtcacccaaactttctttgccatgtcttttgtaagacttctacttattactatgtatcatcatcttttggtaaatataaattctggctaggagaactaggacagacaggggagctgtctgcacactgtgattaggcatgcatcaattcagagctccatgctgctagctcctgtattctgctgagctcccagggaggaaataggaaaagggaggagaactcacctgtccaattacaacctactctgcagtacaaagtactgcaaattccacacagtggatctctgtgattgaaggagcacttgtaaaatctgagacatcctagtttttgatttggtatccaaaacaaatctgaacttttaattaaatattgttctttttccttcttgtttccaaatgaatagttacaccagcaaacttattggctgaaaagttgtttcctacatttgcactttgaagtgcatcagacagtggtgtgtttggatgtgggtcttgttgagtttggttagtgagttattattggttgggattgcagtggtcctgccaatggaagagaagtaggtgtgccgagtactgtcatgttcacctccgcctttcacagaggcatatttagccctcagttggtaagtgaactttttgacaaaggtttaagaggtcgtagagtctgtgtaaaagacaaaagtccaaaagtgaagcagaaggaatccagcttcttatttatgtctggcatgggaagcttctggatttgatagtgggtgcaccgaaatttgcatcccaagtcatagcctttgctctgccctaccttctggtatgttgtttttcaagttacttaacctctcagggctgcaacttacttatttgaaaaatgaattctagaatcacagagttggatacaatcttaagggccaattagtcaaactttctttccagaggtattctgcatgatctgaaatgtgtctctgaactatagcttcctgaaatttcattattcttgtaggaacacagaggagaacaaagaaaattcaaggaactaaattccttctccacctcaaccaccagcattgatactccatcacttatgtactgcatcaagccgtcctcagaggtgaggaaggtgctgtcaagactagaagcatgtgtccctctctccattgcaagatgggacatagagaggagaaaagtggcagacagaagtcttaggtatgtctttatcagcagcatgaaaatggactaatacagggaccaatgattgcatctacctcatggactttttatgagaattgactgatttaataaatgtaaaagacttagaacactgcctcatctattgtaaacagtcaataaatattagtatcaattttcattgaatcctaatcagtataactataatgttacattcatgaataagacaaaggctgggacaaaataaatgagacacttcactcag

SEQ ID NO: 546 - DNA, 1836 bp, Homo sapiens
gttgattcctagaggtggaatccattaaactgacaaagccccagtcccggggtcctaatagtcgggactattaggtcatcctgggtactcaggcctctagactctagactgagctgccttggtcactcggggacagttggcagagtattcgtggtcagggaggtgacccgtggtcagcaggatcaggccacccagggacaaagggtgcttctgcgccaggccctggagaaggacagagcggtggggactcggggtcggccgcagataggggagtcaccacctgccggcaatcagccatgactgcctttgcactgtccatgctctcagcccaccacctcctccccctgccattgcagtggctaacactggagacgaagaccaagacaccaccgcctttctccagtaccactcaaatcagcacaggcaaggacaaaggcctcaatccacaactgctgaagatggaccctggccacatgggatggtcagacacgcctgcccagctatctgcaggcgaagaggctcagaagaggtttaggggcctgaaggacatcttgcttccatgtccatatgagcaggctatttctgctccatgagtcaattttgccatataaaatacttaatttcagccattccagggtgctgtaggatgcacagcttcccatcagcccacctgaactccagccatgccattttaataccaggaataaggtcacctgctttcctgccccttaggaggccagagccgtggaagcaaaatggcacttctgtttacctgttatattatttttttgtcatccttatatgcttggaaaatgcaattatatgaaaaaagtttagtaattacagacataacagcagaaagtcctcggaaccaagcttactctcatggccgattctgctccacctgggactctgctgtgctgcgggcatcctgtggtcagaatcgcagaggggccatcagggagggccttcccagaggatggacctcacgtgactgctgcgtgggcaagtggcactggccactctgcctggagagaggagtaaatgcagggctggccaggcgacctgcacactctgctactggccttgtccatctttagcctctaatttgaaaatgaggctcacacagaccaagagtatctttgagggttagtacagaccacagaaatgccctgggcctttcactctctccttttgcaaattcccatgtgtggaaatgccgtttggataatgagggagcctgaaggaggtggacacatgagcagccccgacaggcctggctccatcctctgaaaatggggccccgtgcccggcgtgtggccttactggttcagtcttctttacagtggtaggttttgagtgcccagatgcccagtgcctcctacctggaacagcacaggatctggcagacccctggaagaatcacatgcacacttaaatattcagggagttcccacccagcagagctcgcctctgtggctaccttggtcttgctgctgatatctgccagaaaaggcctggacttggagacaagcctgggatttacactcagtccttccccatctggctggttccatttccttggctctcactgctggaagtctgtgctcctgaacatcaagtcagagggggcatctgaatgcagggcagggagcctcagatgggaagaagtcagaggaaccagaatgtgtcagaaaatgccaagtcatgtgcctgagctcaaaagtcagctgggccacaggctggctgtgtgatcttgggcaagttcaaccagcttctttatacctcttttcttgcctcaaaatgataagagaaaccacttcactaatacactga

SEQ ID NO: 547 - DNA, 277 bp, Homo sapiens
ccagctactcgggaggctgaggcaggagaatcacttgaacccgggaggcagaggttgccgtgagctgagatcgtgccactgcactccagcctgggagacagagcgagaccttgtctcaaacaaaaaacaaaaaaccctaaaacaaaacaaaacaaaataaaacaaaaacaacctctgagataatcaagtgagagctatacaaatctccaagttatgagggaggaaagccaggagtgagactgaaggcagagggcttggctgctctgaatgaggttaa

SEQ ID NO: 548 - DNA, 973 bp, Homo sapiens
agaaggcaaagggagcagacagctggcaagctctgtcccaatatgcttccctgaaagaggcgaggaaatttcagaagatgcaatgcctgaatggctcactttgcaggaaaacagaagaaccaaggcaggactgtactgccgcaatctcggctcactgcagcctccctgcctgattctcctgcctcagcctgccgagtgcctgggattgcaggcgcccaccgccacgcctgactggtttttgtattttttggtggagacggggtttcgcggtgttggctgggctggtctcagctcctgacctcgagtgatctgcccgcctcggcctcccgaggtgccgggattgcagacgggagtctcgcttactcagtgctcaatgttgcccaggttggagtgcagtggcgtgatctcggctcgctaaaacctccacctcccagccacctgccctggcctcccaaagtgctgagattgcagcctctgcccggctgccaccccgtctaggaagtgaggagcatctctgcctggccgcctattgtctgggatgtgaggagcccctctgcccggtgcccagtctgggaagtgaggagcgcctcttcccggccgccatcccgtctaggaagtgaggaacatctctgcctggccgcccatcatctgggatgcgaggagcccctctgcctggctgcccagtctgggaagtgaggagcgcctcttcccgggccatcatcccgtctaggaagtgaggaacgtctctgcctggccacccatcatctgggatgtggggagcgcctctgcccggccgccctgtctgggagatgaggagcatctctacccagccaccacccagtctgggaagtgaggagcgcctctgcccggccgccaccccgtctgggaggtgaggagcgtctctacccggccgccaccccatctgggaggtgaggagcgtctctacctggccgccaccccgtctgggaggtga

SEQ ID NO: 549 - DNA, 2002 bp, Homo sapiens
gctgaatagctgagaggcgcacccgggcggccagctgggctcggagtgcagcggggttaggatggacgaggacgtgttgcaccctgaagagcctcatcatcggtgagagtggggtgggcaagtccagcctgctcttgaggttcacagatgatacctttgatccagaacttgcagcaacaatagacaatgcaggaatcacatgaacctgtccatccacagataaagtggtaaagaaactgccgtattagatacatgatggtatactcttcagccataaagcttcgggaaaccctgtcatccgcaaccacgtggagaaacctgtccatccacagatgaagggatcaggaagctctggtatatatactgaagggaaatgctttttggctaccaaaataatgaaattttgttgtttggagcaacacagatgaacctgtccatccacaaatgaagacatcaagaaactctagtatgtacacaaggcaaaacacttcagctatcaaaatcatgacattatgtcacttggagcaacacagttgacccgccaaggcagcctcttcctccatagatggatgaacgctgtggccgctgctcctgcctgggccatgccctgatgctgccaacaccactgctcctctatttataagtcttagtagagttgctgacccagcaataactgaacagctgatatgtacctcacactaagccaggcgcttcatatgtatctaacttgaaaaatgctgagctagttaccttaacaccattaacttttacttaaaagtttgtttttcttttttaatcccagtgagctccaaacaagttttaggaggctccccaaaaccagtgaagactttaactaaaagtagaatttcaaagtattagaaaccaaaccccaaaattaaatgtgaagatcagtgtctgtactgagctggcccatctggtggacacaggatttgcgttatcgactgcaatgttacccaggattcacgatttctagcatctgtcagggttaagaaaattggattgagtaccaaatacagcagagcaaacccggctttgaggcaagggccccatcaagtagtcatgcagtacttttgttagggttctgggtgcaaatcttcctcgtccctcccaccttctcctggcctccttgtaaacccaaaccgccaggtacctcaattttcttcaagaccaggctgttcttaatgttggtaaattggtcaaggaaatgggtgagccactgcttgctctgcacatcgtcctcagagtgctcggtcttcaggcagtacagcagctgcatggctttggcctgcaggagtaagtggcccattcctaggctgtccccaaagatgtgtcctctgaagaagctggtcaggtagagggggtgtccactatggttatagatggggaaggagatgctgcccaggtcgagcgttttgtccacctgccaggtgtacaggagtgggttgggggcaccacgcagagcatcttgtacctcgcgcacacctgctggtactggagctggcttgcgtttccctgtgccacacgcagatcctgcactgtactgtccagtcaactgacttcagcaaagatgtctgggttcagcagcgagttgctgtgtgaggccaccagaatggaggtgatatcggcctcagtgctcatcctggaggtggagaagtggtcagagtcctctgtggtgaaatggccctacaccaaagtgggagacattcagaatcgaggcgaaattggcctcagtgctcctcttggaggcagagaagcagtaggagtcggtggtgaaatggccctgtgtgaatgtggaagaccagcagattggaggtggaattggcctcagtgcttgtcctggaggtggagaagcggtcagagtccttggtggtgaagtggccctgcacaaaacgttgctcccccttggccggtgaaagaataaaagaaagctggccacttgcatttccgtttcagtttatagaatacatgttttggaaatagt

SEQ ID NO: 550 - DNA, 6358 bp, Homo sapiens
gtggatccctagatgggagccggggatgggccgggtgcctggtgggtggcagtcggggctgacggcggcggcactttgccgcctcaggccctggacaccttcaccccgccgcctgcccaggcgggccggccctgcccgtccaccggccgccgagagtccccggccttgggtccccggggccgctgactggcctcggtcacctcccggggaaggctcccgcgcctccatctgcccccgcaggaagggaccctcttctcgcccgcgaggcttctccgggtgggatcgtcctggcccccagccctaagggatccgccccctccgagcatccgccgcccctcggagaccactccagctcggacggacccactccagcccccgctgcacgcggaagcgctcatcctccccgcctgccccgttccctcccccttctcctgtgggacaaccagggaccgcagctccccgctccccaggtgtgggggctccgacacgaacgcctctgctcgcagggcggtgagcgcagatcccacgggtccctcggtcgggggtcgaggctgcttccgtttccatcccggacccgacaatgggcgggaaaaagaaggctttacacgactacgcggcggagttcaccgacctggtggtgaagcacctgattgagcacagtgactctggggacacgtctgtggtggagaccctttactgcagggcctgcgagctgcccgtgcgcgtgcggagggaccgcatcctggaacacctgtcctcgggcaggcagcacggcctgcggacgcccattctcatgtaaatgtcagtgccaacgctggtgtttcaggagtcatcccagcgggctgcgggctattttaggattctctgccctgcaaacgtttccaaagtacgtggacaggccgcctgatgacactacgtttacgggatctgctagtggcttgcctacttagggagtaaaccctgtgaagtctcgcagttttgttaaagtgtgcgtggccacctgaatgctgccttatcacaagccagatacatactggtctgtagggtaactccccactgttgatcctctgagatgattgtggactgggtgctgtgagtcctgccactttgtttaagtgaatgtgtcttttgtccagctcagccgcctcggatctcgctgccaccagccttactgcacacccgtgccacccgcccttgccccgtcagcctcagcctcagctcattctctcaggcagtcccagcattggcacggtacctcctcccgctgtgggccacacgtctctgctccctgtcaaccctcctgccatcagcaccaccaccagcgacttgtctgcccgggaggatgcaacaccatctgcctccaccggccacctttcagtgtttcctgctttccaagtaaagataccagcagtgccctcagagcagaccagccagagtttttctgaagcctcccacagggtgctccccggaggaggcccgagatgctctcgtgactttggagccggggtggctggccaccttggcctgggcatctttggggtgggcttcgggagcccggcactgctgcagagtgtggtggatgagaacagctgctgcttgctgtacgtggtggaggaccagctgtgtgatgtggagcaagccttcagagctgagcatttgggccaacaccagagtggttcgggaacaggatgcagacattgtcctcaacgaccagcggcactttgatccggttttccagttcttgcacaagcaagtttgtgtcagccacgccctggggaggatccactggatcaccgccgtcactgcctgttcccggcggcctctccggcttccctaaagagagcaggtgggactttctacaacgctgctgtgcacgacgtggatgccgtatgcatgttgctgggggaagccactccggacactgtgttttctctgggacatgtcttctgcccagatatggccgccttaaaagatgcagatgctgttgtgatcagcatgaagtttccctgtgaggccgtggttagcgtggacatcagccagcactgcacagacagctgcgaccaggacgtcagccagcactgcacagacagctgcgaccagagactggaggtgacccttgcccttttccacccttcgccagtccactgtgaaaagctgggttgattgtgcgggttagatagaggtcatcagccgggttgattgtgtgggttagacagaggtcatcagccaggttgattgtgtgggttagatagagatcatcagcctggtagattgtgtgggttagatagaggtcatcagccaggttgattgtgcgggttagatagagatcatcagccgggttgattctacaggttagatagaggtcgtcagccgggttgattgtgcgggttagatagagatcatcagccgggttgattgtgcgggttagatagaggtcatcagctgggttgattgtgtgggttagatagagatcatcagctgggttgattgtgtgggttagatagaggtcgtcagctgggttgattgtgcgggttagatagaggtcatcagccgggttgattctacaggttagatagaggtcatcagctgggttgattgtgcgggttagagatcatcagccgggttgattgtgcgggttagatagaggtcatcagccgggttgattgtgcgggttagatagagatcatcagctgggttgattctgcaggttagatagaggtcatcagctgggttgactatgtgggttagatagaggtcgtcagccgggttgattgtgtgggttagacagaggtcatcagctgggttgattctgcgggttagatagaggtcatcagctgggttgattgtgtgggttagatagagatcatcagctgggttgattgtgtgggttagatagaggtcatcagctgggttgattgtgtgggttagatagaggtcatcagctgggttgattgtgtgggttagatagaggtcatcagctgggttgattgtgtgggttagatagaggtcatcagctgggttgattgtatgggttagatagaggtcatcagctgggttgattgtacgggttagatagaggtcgtcagccgggttgattccgcaggttagatagaggtcgttagctgggtgtgtgggtcccaaggcgtgctgcagatggagaatcagaattccttgggcatcaccgggcggggcatgtccctgtcccttcgctcccagacccaggctagccgctaccaggactcctatcgagagctcttcagacactttgtcagaacccttaaaggtgggtgacgttttcaggaggaacctgggatgtcctgatgctcaatgggtagatgccttccaggctgcagtcagtgcagatgatatgccaatttcaggtggaaaattgcattccagataccgggttcagatttgaaattgtccatctcagtgatcatttacgttgcgtgtacttgagggagattctgagagatgctcctttggggttctgtgcgtgtaccatgttgcctgacacgtcctgagaaatcttcttaaactctgagtttataaaataactacttctgaactcctgagatctagtggataccatgtatcctggaagataggacactttctaccctctgtcagtcctgggggtgactgggaaccagagaggttgagcagaattcctggacctgggtggggcttgtccaagaggggcaggtgggcctctctaggatcagtgtcccacccagaggccagtggccccttcacatgccccaacaagaggaagactgtctggctccgcagtgttgggttttgtcctgaatctgtgcaaatgtgcagggaaataacctcctgaaatcaccaaagagcagttcctcagggccttccgggtgaccgtggccgtggagcagtcgtggtgaaaccggtcagctgtggacctgccctgcgaatcggcagaggcctccgtggtgaagacagaagctccgtgaaccaactcgaggctggagccaagatcctgcctgatatccagttgcctgtttcacttgttactgttactgggagagggagacaaaacctcatggcaatcttgtcctcactggagactcagaaggggaagcattgggaaaccatgtatgtttcatttctggtttaaccaggcttttcaggatgggacttcagaccaaggacacaagttgggcttgcttaggtgttttgtgttgtgcgcaggcctcagagatgctcttccggtcagagttcccttggcagggccttggaggcctctggttggctctctcaggaagagggcaggtcagggattgggcggtgtaaattgactcagaaacctgcggtttcagcttttctgtggcaaacagggccgagggctggtgaagctgttaaggctaaatgtcgcatgcatgaggcgggctgcaggcctccttaggccttttttggggtaattacaccagtatttaaaaacatttttttttgtttgttttgagatggagtcttgccctgtcacccaggctggagtgcaatggtgcgatctcggctcactgcaacctccgtctcccaggttcaagcgattcttctgcctcagccttctgagtagctgggattacacgcgtgtgccaccacgctcggctaatttttgtatttttagtagagatgggatttcaccatgttggccaggctggtctcgaactactgacctcgtgatccacctgccatggcctcccaaagtgctgggattacaggcgtgagccaccatgctcggcctaaaaaacaattttcttgaagaatccgattttgtgcatagtaatgacacagcaccattcctgagaaataggaaatatatgtgtgtggtatgaaaagcccatattctgttcttgtcacctgaatctaggcttcctctttggatgtgaacgcgggaatgaacagtggctgttttccacccaaaggggcgtggagaccttttggaaacgggctttctcctttccattttgcagccgggggcgggtggaaaccttccttcgaagggtagtgccttggggagcagcagacctgctctgagtccagcttagctttccaaaattctgtgtggaacttactggagatgtttttatatatttgaaaataatggcctgtatttctcacgctatacttaaaaaaaataactaaccttttaaacaaagatattcaaactcacccttgtgctgaaagcactcacatttctgtgttcattcctgaaagggcgttttagagtccccgtttctacgttctatgtggcaccctcttgccgagggaacatccagaatccctccacttcctgtctagtttgaggcctcaacaccttcatgatccagagtcctgcggctatgagggggtgggcccaccaccgcccagccctccttggtggacgtggggacaggtaggagcctagggaaaggggtgggcgggctctggtgtgacggcgtgagcgctagccaggaagatggggccagggcttggcatggcacctcacctgtgggggaactcggcggagcttcctggcggcatctccccctcttgccttggtcctttctatctttgttttaggccaatttctaaaaagactgaggcctccttcaaggttgaacagatttctagagccttgtttttgctgtgacaagtccctagtccctgttcacaactctgaaaccaagaaacctgagaaccaagagaactgaaatgaagcccgttggtctcagcctggcttgagccaacatgaggctctctgctgccttttgttttcttaggttttgctgagaaacgggagtgcgttctgtgtcggtgtttgtgacgccctgagaccctgcttggcctagctaaagtccagaaggcctgggccccacagggcttggatgagggctcatgggcctgtacttcaggaggcctgagaggcccggtcagtcccatgaggctactcggcttggcccgcaggtcctccgaggcacagggcagagggacaccccagggacccatcagactcacgacacagagaaactcaagtggggtgccagggccggccacagaggccacgggcttcctgcctgtgaggagccgccctgtttgtctgagccctttggagatttaggttgagtcatgagaaccggtcattggaacatacactttattatgttacaaaaacaaaaatccccactgaaacacagctaaaaaaataacacattttcccaagattacattaccaaaaacagttgttatgtcattggagggcgtccattaatactgctcggagaagcacgatcttacacgaaaaacacggatgggatttcgttttcaccttaaagcattaaagtgctttaactggtaa

SEQ ID NO: 551 - DNA, 657 bp, Homo sapiens
ggtggagaggagaaaactctgtgctaaatattactcctggaaaagtgcatttgcttcggagaaatctttatcatgggtctctaagaggaaggaacaatagcatcttctatgtgccgaggtagcgcaataatgaactctgttcaagtggatcaaaagccatcaaggtcaaaattaggcacaggctgtacaggaagcgtgattctggcatctgtttggtttctgggaaggcctcaggaaacttaaagtcatggaagaaggggaagggagagcaggcacgtcttacatgaccaaagcaggaagaagagagagaagtgtggaggtgctatacacttttaaacagccagatcttgtgagaactctgtcagaagaacagcactagggaaatggtgctaaaccattcttggggactccatccctgtgatacaatcacctcccaccaggccccacctccaacactgagaattacaactcaacatgagatttggatggggacacagatccaaaccatatcaaattttcacacctttcagtaaagctttatattttttaaggatatttaagtacttggaagtagaagtagagagtaaggggaatattgtacagccatcacagcctttgtctactaaagaagtcagtttcatgtgacaaatgttcatt

SEQ ID NO: 552 - DNA, 3287 bp, Homo sapiens
gtttcaggcagctggaataaagagagacatcgggggaaagccgcgagaaggccagcgtccctggctgggagcagagctagccgagtagggcgcccggctgtcaaactggccggcgcagtgcacgctgggccgccccggagcggtcgcagagcccgtcgggagtcgtagtccgggacgggcccgcggcattgtccgcgacgcagctcgggatccgggtcggggtgtcggccgggttgctgccgggcaccgtcgagcgttagccacccagcattgagctgccagcggctgttctccctaagcaccctcgctcacgtcgcctcgcctcgcctcgcctgaccggccgcagccttggataccagccttaaatcgagccgactacggcccagccccgcccgcggcgaggtgcgcggggttcggtgccagccgctcgcccctggcggggccagcctcttgatgcaccggggacgggcgcccccatccgactcttcgaggggcggcagggccccatctgtgtctttcgctctcgagcccccagctagagttggcttcagcggaatacctactgtgcgggattattcaacaagccgattgatcacattcttcagctctagcagtgcaaaggcttcactgaaaaagaacattacaaattttttttgaaagaaatttgggggaatccactgaagacctacatttcccggaaggttaacagcccccttctcagttttcctgctgctcctatcagtgacaaatcagcgtattagaacatgcatgctggctgatcattctgatcaagtcaacaagcttcacaacttactcaatgaggtcgtccgtgagaacttcactgttttacggggacaggagctacttctttgctgaactgcatcacggtttcaactgctgaggttttcttcaagcttttgcattgtttggaatgtgaagggcatggccgagacacactttgaggttcccactgcattgttacacctcccccctcacttcagggccaggtaacaccaagaaggacgccatgagagcgaaggccgttgggtcaccgccctttgctctcgcgctgcgcgtctccctgccatcaaccgccgcaactggcgctgggagcggttgagggcggccggcctcgcgctggaacctcgcccgcctcaaggctcctgcggcggcacacggggcaggccaggacccgccctaggagggccccgctggagatgtggaaatggagggacgcggcacctgggcgcttcctggggccagacaacgccccctcattggaacctccatgaccctgcctctgagaaaccagcgcgtccgcaacgatcactcctaattttcggattcctatcatctgtctccacgtgataacactgaagagccttcacattgatgcaggcccagggcctcaagtgcagagactgagagctctgcaggacacagcatggagccgccattcctctactgggtggaggagcatgtgtcctctgaacaggggatccaagccctgagatgttctttctcagctgtcagtgcggcccaggactttctgtggggatgctcagacagcgggccggaggacttttagccaccacctcccatggccagtcttcacaaattacccttggctaatttgactgtctctcctcctggggtctaggacttcaaacatgtacagaagcgattgcagaattaagacaagacacttccacaatatattttttgtatcactggctcagaaaaagactcattcaaatcctgtatcaaagccacgtgtgagaatcttgagaaagcatcagctgactgacttgacaagggaggaagcaaccaaaaattctgcgcttcttcagtatctgagtatgatattttgcttcaacatccctcttagatgaagttattgattgaaaatcatttaagtttgccccatggtaaaagatcaagtcctcagaaagatctccaaagtgtttacggtttgttttgttttggtaagtttaccatgattttgcttgaattgctctccgttgatcttctcagctaagatggaggtagagagttgcacagtggaagagggctgcatgtaagaaggcagttctgtctcagaggacaaaaggcctgggagcacccagacagacagtcactgcatggaggtcactcccctcccagtggccactgtggagacatttcacagaaatgcttgctggaccattcaggttcagagttgggacaaaaccgagaactcatggggatattggacaggagttaggaaatgaccttctcacacaactggggcagtgggggagaaccctgggcttgagacttgcaatccaccacttgcccctgcccctgcccctgcagtgtggccgctgttaccttttcctgcaactctgccttcttgagtccaaatgtcttcgaaaggggcaaatgctcgtaagtgccgacagggtgtgtttcagtgaatgtttgcagtgtgcaccggtctggctgaaggcctcttcccttccccaacaccctcccatcgtgcaaaattaccctgcccagcagggagtgacttgtgtgtctcagaagattttgttgctgtgctctgagttctcactcctcatctcctttgaccagtttcttctaatactccccttgttcacaacacagaacatgagtgctctttcctatcattttgacactaataaacggacagtgattctcagtgtggaaatgagaatgaagttttttttaaagacaggctacaataattcccatgcagagaaccacatgcgatgacactggattccagacagcaagaacgtatggtgaagatgaggccaacagtgagctgagagaggccagccagggtgtgtttcagtgaagatgagaaacaatcagataacacctgtttcctccaggaaagaaaatgtggccagggaaaagagatgggaggaaggccggtcattgcctattccactgtgcacagtttgaatttggagccatgaaaagtattgcttggttaaattaaaatcattcaaaagataaaacataaatatttaacaccagcacaatatgctgggaaacaaaatgaaaggatttctggtctcggtgctgtaggtcacatagccactctttcctggattgaggctttccagcaaaggggctgggacgtaaggctggcctgctggtgtggacagagattccagcaacatgcatgacctgggggtacaaggattgcttcctaaacaatgataagcacacagccacctaatagtctggatcggctgagaccatcctgatttcaaaca

SEQ ID NO: 553 - DNA, 536 bp, Homo sapiens
aaactcatttttaatggcttgtgcggcatcagttgtgcccctgagctgtaatgaagggctctgcaagtcaccacaagcgagtcagaaatgaatctcacggagaggaaaatgctggaacgttaataggttttaatccaagcctctggaatggatcattctactctcaacctccatgagatgcactttttaagctcccacatatgagtgaaaaaagcgattttgtctttctctgcctagcttattttactttttttttttcttagagggcttccatagattctacctggcttgctggaggcttaagctttcttctttccagaactggaaactcagttcttcccagcattagctttgcttctgtgctaagcataaatcattggaatttcataagctttctttctcttagcactcatacactttgtaaatcaatgatttgcaaagtaaaaagggctcccttcagtaaatatttgcaaggcaggtctgtcttcccctgctttccgagcagaggcaaagactccctctaatcctggcgttca

SEQ ID NO: 554 - DNA, 106 bp, Homo sapiens
ctttcagcgcctgcaggttccgggagctcccagccgaggacgtcggatgtcatcgtccttgctgctttgccaccccattcccgtcaataaagtggtttgaacccaa

SEQ ID NO: 555 - DNA, 1279 bp, Homo sapiens
gggactggcgggactgcgcggcggcgactacagacgtgtcgggggtccggggcctgtcgcggttgccaagcgctcggcgcttggcgctggcgctggccaaggcgtggccaacagtgttgcaaacaggaacccgaggtgttcacttcactgttgaaggaacgagagggcatctgctaaagtttcagattccatttctgctcagtatccagtagtggatcatgaatttgatgcagtggtggtaggcgctggaggggcaggctttgcgagctgcatttggcctttccgaggcagagtttgatacagcatgtgttaccaagctgtttcctaccaggtcacacactgttgcagcgcaggttggaatcaatgctgctctggggaacatggaggaggacaactggaggtggcatttctatgacaccgtgaagggctccgactggctgggggaccaggatgccatccactacgtgacggagcaggcccccactgccatggtcgaggtagaaaattatggcatgccgtttagcagaactgaagatgggaagatttatcagcgtgcatttggcggacacagcctcaagtttggaaagggcaggcaggcccatcggtgctgctgtgtggctgatcggaccggccactcaatattgcacaccttatatgggaggtctctgcgatatgataccagctgttttgtggagtattttgccttggatctcctgatggagaatggggagtgccgtggtgtcttcgcactgtgcatacaggacgggtccatccatcgcataagagcaaagaatactattgttgccacagggtaggaatctaatttctactttatttcctttgtaaaaatgaataaatttcatttagagtctctttattttaaggaaaatagaggcattgtagaatagcagttcagacacaggccttgatataaccacgtgagggtgatggcctttcccagccatggttcctcacctgtaaagggtgaggacagcagcacctgcctcggggtgagaaagcatggccctcattagtcggtagtggctgccgtcaggttcacagcgtacctctcccgattttagatgaggaaactgtggcccgaagagtcacatggggttttctggcaaaatccctcttgttttagtgggttctatgtttatactgattcctgggatagataagtctgtcttctccacataatgaaaataaaaaactttaattttatacagtggcagttactttagccactttaaaagttaagaagtgtcagtacagccaa

SEQ ID NO: 556 - DNA, 326 bp, Homo sapiens
ctgaatccccagagtagcccttcctggtgcccaactggcctggggacaaacagcgtccactacatctaggactgccggctaagtggacacacttcttgacctcctaccaggaactttgggcccttaaagaccttcacccgtgtgaagaaaggcctgcactgaggagctgtccaggatctaagagggggagatttggggtcagcatggcctttcctctgaagtcaccttttcctggcccccaccctgtacccactaaagcagtgccatctcctgggagaaaaggagaacatatacatagaataaagactatgaagatctgcaccaaa

SEQ ID NO: 557 - DNA, 713 bp, Homo sapiens
gcatggaaggaaggactgtgtctgtgagggatgatcatcctctcatgtgatccttggagatgccaggaagccccttgacacatgtggcatgggctccttcagaggcttttggatccgtcgtgaatgtggcatgggcatgcaaagaaagacagaggctgcaagggataaacttcatcttgggagatccctggagatggcagggaacccatggacacatgtggcatgggctcctttgggtgccggtggatcccttcatacggtagtgttggtgtaaaaggcaaacccgtgtcatgagggatggtcatcatcttgtgtgatccttggagatggcaggaagccctggacatacatggtgtgggggctcctccagaggctgttgggatcctcctggatgtggtgtgggcatggaaggaaggccagtggagacaatggatgatcttgttcttagcagatcactggatgtggcagggagtcctaggacatgtgtggtgtgggcttcttcaggtgctggtggtgttggcatgaggaaaggaggtatcttcgagggacaatcttcttcttgtgcgatccttggagatgccatgaggcccctggacacatgtggtgtgggctcctttggaggctgttgtatcccttctgaatgtggcgtgggcatagaaggaaggccagtggccacgagggacaatcttggtcttgggagatcctggaaatga

SEQ ID NO: 558 - DNA, 2055 bp, Homo sapiens
gacgccatcagcactgccactctgcccctgccccatcccctaccctgttgtgctggcccatgtgggctttggtgccagctctgctcagccatggaccctcgacttctctgaacctcagtctcctcttgcagcaaacgggctcatcacagccaggcctggcattgagccatggttgctaggactgtccacctagagggcccagccaggccttttgggtcatgcctctgcccctcaaggctgatggagatggcgttttcagggaggatggatggggtaacgtgaggaaactgaggctcgggagtacagagcctgccccacctgctgcatgaccttgggtcaaccctgcccctctctgaggcctttagcaggtagagaatgggccagagcagctccgagtgccctgcagctctgctcttggattgctccaagcctcattccctccacattcctgactcctgtgtggctatgggccaagcagtctttccttgagcctctgacatccgattctgtgtcatggggttatcagccctgccttcttggtcctgggctgggagtggaggctccatcctggcctggatggggtggcaaagaggtaggtgcccccatccctcacccctgcctctgccaccagtgtcgggactcttctgcctggtgtgggcctgggcctggggggaactgatggagaggctagagggggcgtcctgcagggagaggcctcaaggaaggcaaggccagcacccaccctcaaagggcctctgtctcacccaggagactccatcctcccagcaaggtcagccaataactgtggggatggagtggagccgtgagtgggggcagaggcctagactcccaccccacagggcggtcccgggcaagggctctccatctgcaaagtgcagctctggcccctgctctaggctgctatggctctgggaagccctcctcctgccccttctgggccgctttctctggggtcccccttgccatgtgctatgtgcccaggccgtttctcagggctgcccgctgtgccctactgtgacctcagccactagaacaaacccgagagacctggagggagctcaccagacaggtcagggctgatgatgttcaagcgcatgaagacagtcctatggacttcctggaggagaaagagagagcagtatgtggcacctttgggaggcggcttccaggtttactccctggctccgtgaccccagcccaccctagagccttggctttgaatcccatctccaccgcttcgtagctggatgcctctgggtctcctgttctttgagattacactggtgaccatactacatggatgtgcgggtggttagattcctgggtgggagggtggatggatggatggacggacgggccccaagtccaggtggcagctgtctaactggagcaggaactcggagacggatggggacactctgacctgcatgggtaggctgtctccctcctgactctgggagtctcatctcctctggagtcatggtgggaagaaaggcggagaggaagttccaggagctgggaggcccgaggggtgacaggcatgccaggcagaggcaggcagatcacaggaggccagaagttcgagacctgcctagccaacatagtgaaacccgactctactaaaattataaaaattagccaggtgtggtggcagacacccatagtcccagctactgggaaggctgaggcacaagaatcgcttgaacctgagaggaggaggctgcagtgagccgagatcacatcattgcactccagccttggtgacagagcgagacctcgtctctaaaacaagaaaaagaaggccagttgcagtggctcacgcctgtaatccccgcactttgggaggctgagtctggagacagcgaagaggttgaggtgttctcgtaaatcagtggtgaaaattcaaatcatctttgggaaagtgggttggcaacatgtattgaaacttcattcattttgacccagtaattccactaatgtggaaatctatcctgagaaaataatcctatataaagaaatgtttcatgcacaatg

SEQ ID NO: 559 - DNA, 442 bp, Homo sapiens
tggggagtggaggggccttgctttgcttcttcttgactgactggtactctttttattatgtatgtatttatttattcatttagcgatcctcctacctcagcctccagagtagctgggacacaggtatgcgccaccacactcggcgaattttttaattttttgtagagatggggtcttcttctattgcctagggctaatgttggactcctgggctcaagcgatcctcttgccttggcctcccagcatgttgggattacaggcatgaactaccgcacccggcccgtactctgtcttcacctcctctgggaagccttcctcagtctctggctctcaggtcgcccgtgcatacctgtcctgaaactgctttcccacctgtgttcccagggcagagagtggatgcccatggatggtttgtcaaaggaataaattagccttttttgga

SEQ ID NO: 560 - DNA, 552 bp, Homo sapiens
attccctgatgccatgaacttacacgtttcacacacgggaccagacgcttgctttagttgacgcatgaagaccggtccggtcttttgcggagaaaagtggttaaaagctgacttgtgggccgagaaactgtggcaccctaatgagctagggctagacgcttcgaccaccacgccaagtgattctgaagatctctaattctgtcaaggcgagagcgctccaacacgtgttcatcggctgttgctttttaaagagaagggtctcactttgtcacccaagctgaagtacagtggcatcatctcggcttactcaacctcctgggatcaagtgatcctcccacctcagcccccaaagtagctgggactacaggtcaggcatggtggctcacacctgtaatcccagcatgttgggaggccaagatgggagactcacttgagcccagaagttccagaccagccttggcaatatagtgagatgccatttctattttaaaaaatattttaaaaataaaatatttttctattcacctttcatcaatacaaacccagaagaga

SEQ ID NO: 561 - DNA, 2653 bp, Homo sapiens
gaaaactttgggcttggcattaggagagcctcggctgaaatccgaggttttgaacgcgattttttccgacagaagctgggcgctttctttcatgtaatgctgcagctgagcctgggacaggtctttgaaagctactccagaagggtatttctccaccgccgggaccaccagtttattcctttcggctaaatacgtttttggctgcgggtgcaaaggggaactgaggaagtaggaggccaccgggtggatgttcacgccggctgccgggtggcatgggccgtcacctcggttcaggtagcacaaggcgcccatggcgtggaatgaagagtggttgaccacacgcggccttaccagcttgtactgctgcagcggcagcgcgtcgcgggccaggtcgcccttgagactcagtgcgcagttgagcaggtcgctgcagctgaatgcgggagccgagggcaccgccgcgggcgccgccggggcctccagactggccttccgcggctcggagcccgtcactcctgccttggggctcgtgtcgtaggccacaggcacgaaggggatcatgcaggggatcgacgagttgagatgcagagagtgcttgggttcccccttggcatcaccagccgaacctgcctgcccagcccaatggactcctgccagcccatcgcagagttcttggcgcaccaatgactcggggacaatcactacttatttctatcaatagaaagtgttgtgtcaataacgcagccaagatctcgccaatcgttaacttccaagaggagaagggctcggggttgcccgctcccggaatcccggagtctccgcggcccgaaccgagtctggaccatttagaagacgccggcaggtaactggcctccccaaacgccccgaaaattaaaagccttaggaggcttgttctgtgtttgtggttttgtaaaggcaatgcccgcggcaataggcctgggaaagtcgcactttcatccacaaagttgaggagttgcaaggaataattgggtgtcacaccacaagcaaccttgactcgatcggaccccacccaggatacacacagacgcgcgcgcgcgcacgcttccgagtttccattgagagtctggaaagagcatttctttcttaagtacctgcgctcagctagagctctcccggagcattttaaatactgaatgccgagcggagaagggaaacagagtgtattaatccccactccggttgccggtgtctgcaagcctcctctaagcagcgcaggcggcagcctggatgtctgtgcgcatcaaggagacttgccggcgccagagttgtgtccacaggtgcacttgtgcctcccaaagagcgcgcgtagagaccatttcccctgcaacgccccccagccgaacacccgccgggtgtggcacctcggccgaaactcctggggcggcgcggtggagcgtgtggaggtttccgggaagacgcctacggctgcggctccgactgtgcgggctcccgccgcccaggcaagagcgtccaggagcgcgctggaagctgcggcgcgcaccttccccggcgcagtctcttgccagccggcgatcacgcagagctgaaccccgcagctaggcgcgcaggaagggctgcacagagtttgaagacacggcagctgtaagctggcgtgaggaggccaaaggagcgcgcagagctgcaagcaaagggcggtggggcctggaccctgaagtgagtggccgaccgcagcagctcaaggtgccatctgcctggcaagctacccgggtccctccgccccactctaactttccgcgaaaatcagttccgcctctgccccaagagccaagaggggtggaaaggaagagagcttgggctgggaacgcgcctgatgtctaacagaaaggcagtggcagctggcgaaaaatccccctcctgctgcactcctccgccaccgggctaggttgaaaggaaaaagccaagaagcgcgaagcagcccggctctggaaggctttggagagtccagctgacttgtacacaattcgcggcctctggagccttacctgccttcttgactgaatgccaccagttcgttttacgcttgtggctttttgttgaagtccctatcataagcaaatgcagtttctggctatggttactgcaattcgaaataaaaggcctgtgaggtgtgtccctccagactgagaggctatgactcagggttggactttatggaaaaaaagaagtttataaaacaagtaacccagtttctccaacctttactgtggagcaacagcgtcaagcaacaaaacccagcaaagttttgcttgtcacttacaagggtgttactgaaatctggaaggcgaacaattagaagatagcccaaacatgctctattgctctacactgaaatacttgcctccaataatagaaaaaacctgttttcgtgcaattgattgattagcgttctgcagcagtccctggacaattttaaagacattttgtgtttgtggccaaaattagaaacaagcagacacacacacaaaacaaccatattcaagacacggttcgactgtttccttgacactacccacgaagtttaaagcattttttatgttattttcaaactttcttaagtgatcccatgaaataaaagtcgataatagaaatt

SEQ ID NO: 562 - DNA, 544 bp, Homo sapiens
gtagctccctgggcgcttcgaagatccagcggcttgctgtgagtccgggaggcaaaattgtacccatttcaaagatgtgatgactaaagtctcgagagggccaaggctcgcccaaggttgctctgtggtgacagctttacctccttgctatgtattctcagatattgcaaacggacgagagaaaagtggagaatgaatcctggagaaaacaaggtcgttcgacgatttcgacacgtcgcatccctgagagtctctcgtgtcctgatcaactcgagaactggaggcggtgacattttagatgctgcagtgaaagccacagagccacggaaggccgagactccaccatgtttgtgatcttcacattcagcaaactcactcgcactctgcctcatcttatctctagaatgtattttaccacactgtgtcccttctttagtgggaatgtctttggccaaaaataatgaatagttctgacctgacttgctaatacccagtgataaaaggatggaatttgttgggaataaaagaaaactaagcttacaaa

SEQ ID NO: 563 - DNA, 6251 bp, Homo sapiens
aatacagctcgtttaaaacaagctggagtctccattccgttttccgcgttgcttctcacaactcactgttagaatccagaagtaagagaacccggggaagcgtaaggaagatgaataggacaaagattctaagaaggtgggaaggaagaaggctgcagtctatttcaagtctggtgaatttcaatcactgtagcctttattgttattttagagccacctagaccaaaagagaaggagctcaaattgctggtgaaagaagactgcagctgagttctattatcaaagcaaagtgctgtactgtacttgaaataactctagcaaatactgtgcttcctgcacagaacctgttggattactcacacaaatgtcaaagaacaggttgacattttagcaagttatcagcctggcccatataaaaaaagacatttctagtttttacactttgcagggttcagagagcagttgaatgttatttttagtctatgatccaaagcagctaatgacagagtctaccttagaagataaacaggcttctgatttataacacaaggctaatggtagatattgtgtgatgtgtccagttaaattaacgaaatagctttgcaacagtgtggagtaaagacttaggcttaaaacagagaatttgaggattgagataagtccagagaagcagcaggatggagtgcagatgcaagagaaaggctatgtcaatgccatattataaatatagctcatagacagcatatcctagtgtgtgtctgaagaggcctgtgcccttgaggaaaggggagattatgaccttgtcccccagtgtcatttgcataaattcttagagaccttggggcagtgagtaggagactggttgagatgattactataggaaaattgaataacttaaagtatggatatcttactgttacaggaaatgcttaggaggtgaggtactctgaatttagaatatgatggcctaagggattcggagtcaagaagcaggacatgggatgaagatacatccactgtcaagctggtcattacgacagggagaaatagccctccacagagtgagactagtgagacttgcaagaattgaatgatggtcccgttggacgaaactctttagggtgagtttgcttgtctgggaaagacagaactcagagccctaattgagatgaactgcaagatgggttcagcaggagaaagtggctggaaagggggagggaccaggagccaaatgggtgactatctgccaggtggtctcctgagggcacgcatcttccctggtggtgtgactagaaagagggagtccaaagcacagtcccttctcctccacttggcacacatcaacactttcctcttttcctgtgagccaaggtagaaggtctggtccagaatggacgatatgggtggaggggtgagtcagtattgtttttcatgttggtggttggactcagtttaaaagatggatgtcttagggtagtaggtagcatagttttcctagctttgttgtcacaggtgatagaagctggaccataagttagggtcacagctcccttgattctccttcttctttgttctccttcctctttcacaactctctctcctaggtacttttagtcaggctgcagatggaattctgggcgtttgctccagagagaattttcctaggtagcttttgcgttaaacagacttcattatacattttgctttgcatggggcctctctctcctgacacagatacatgggccccttgtagcccacagcccccagtgtcacacattagtggcacaggcttggttttgacattggttcaaggtacccagtgaagagcactttctgtaagaacagttcaatggcaggacccataatggttatgagcacggaggcctccagtgcaggagcatccgcagtggttgctgatccccagaagggagacgtactctctttctttttgtgtttccaaaggcaaaggcatactcttaggaggcagacagaaagatgtacagttaagaagtggggtttttaggttctgttaacagctggtttattaccttttttggaactttctcaccctttctgcagtgaaataggctatttctctatgtaggagtacacctgtggggaaaaaaatgtgtggaaacctagctattccccaaaaaggagcacaaaaagaaggacatctgagattgctgaatacttttcagatgacaaagaacttagaatgttgagaggggacttacagggaatgggctgataaaagacttgagtgtcatctagtatttacccctttctcctccaacttgagttagctaaatacacacacacacacacacacacacacacacacacacacgaatatacctgcttataataaacgctctaatcaacaaatctactggatcataagctctgccaaggtagcgcctgtggtgttccctttttatccttagcctgtagcaccaggcctggcacatagattcttggtaaatatctactgagtgaatgaattgttgaacagctcgtaatgaagaactgattctgagaatctgtggaatacttcaaaagagaatgaatacaatgcatatattaaaagaggaggcagtctgcagccactgccacctccgccaccgccagctgtgcgggtgagcatccccaggcagcacgttggaagttgttttcaaccatatccagcccttgccaaatacatcctgtttgtcacacatccaaagtgaggtccctccagctataaggtgggcaccatggcagagaagtttttgactgtctctactgcagggaccccttgcagaggaaaaagtatgtgcagaagggtgaccaccactgctgcctgaaatgctttgacaggttctgtgccaacacctgcgtggaatgctgcaagcccatccatgtggactccaaggaggtgcactataaaaactgctcctggcatgacccctgcttccactgtgccaagtgccttcaccccttgccaatgagacctttgtggccaaggacaacaagatcctgtgcaacaagtttgccactcaggaggactctcccaagtgtaaggggtgcttcaaggcctttgtggcaggagatcaaaaatggagtacaaggggaccatctcgcacaaagaccgcttcacctgtagcaactgcaagcaagtcatggggactggaagcttcttctctaaagggaaggacttctactgtgtgacttgccatgagaccaagtttgctaagcattgtgtgaagtgcaacaaggccatcgcatcttggggagtcacttactaggatgagccctggcatgccgagggctttgtatgtgttacctgctctaagaagctggctgtgcagcatttcaccactgtggaggaccagtaatactgtgtggattgctacaagaactttgtggccaagaagtgtgctggatgcaagcaccccatcactgggtttggtaaaggctccagtgtggtggcctatgaaggacaatcctggcacgactgctgcttccactgcaaaaaatgctctgtgaatctggccaacaagcactttgttttccacgaggagcaagtatattgccctgactgtgccaaaaagttgtaaactgacaggggctcctgccctgtaaaatggaatttgaattttgctctttgtgtccttactctctgccctataccatcaatggggaagagtggtctttcccctctttaaaggtctcctgtcttttctcccgttttacagtattactcaaataagggcacacagtgatcatattaggatttagcaaaaagcaaccctgcagcaaagtgaatttctgtccagctgcaactgaaaaacgaaaatttaagtagattgactcttctgcatgtttctcacagagcagaaaagtgctagtcatttagccacttagtgatgtaagcaagaagcatatgagataaagcccccactgagatgcctcttgcggctcagctgggacctaccgtgtagtcacgcgacatgcaagagttgtagtggctgcttcaactcgctgctcaccctcttctgtgagcaggaaaagaacttactgacgtgcatgatttaacttcctcatcaaaactctgaccttccttctgttattttgtgctttcaaatgactaatatgcacttccagaaaattaacatttgaacttagctgtaattctaaactgacctttccccatactaatgtttgatttccccatgtggcatgttttctgagtgttcctaccttaaagcatggaacatgcaggtgatttgggaagtgtaggcagatctgagaaaacgagcctgtttcagaggaacattgtcacagcaaatacttctggaaacttaacaaaaccaaccctgatgtcctttttattgtttttaattaggaatatttttgttttaattgatagcaaaatagtttataggtttggaaacatccatgaaaatattctatttattttattttattattattattattttttgagacggagccttgctctgtcgcccaggctgcagtgcagtggcgcattctcagctcactgcaaccttcgcctcccaggttcaagcaatactcctgtctcagcctcctgagtagctgggactacaggcatgcgccaccacacccagttaatttttgaatttttagtagagatggggtttcaacatattggtcaggctggtcttgaactcctgacctcaggtgatccacccacctaggcctcccaaaatgttggcattacaggcgtgagccgccatgcctggcctgcatgaaaatattctagccctttcagatgttcctgtagtgttgaaattcatcctatggaagtaactgcaaaactctatagggggagttgagcaggtgccaggactgtcatcaacatggatatgacagtacagagcagtggtgagttgaatcccttgtaacgcagttgtctgctctttgtccatgtgttaatgagggctgcaaagtccctcctatagcgattcctaggaattttcctcaagaggaaatgcggatttccacctaccacttacctgaaatacaggatcacctacttactgtattctacattattttatgatataatgagacaatatcaaaagtaaacatgtaatgactatgtgtactaacattcttgtaggagtggttagagaagctgatgtctcatttctacattctgtcattagctgttatcgtctaatgtttcagtgtatccttatggaaataaagcagcatatgaatttaaaaaaagaggaggattagtccaggaactacagaatgattaacttacttttatactgtaaaaaagttagtatccccatgatgtttctccaaaatagtttgaaaataattagaagaattataaattatagtgtgtctctcctctcttaccaaggactaagggctaaagtatcgacatacctcattttactgtgctttgcagatatggcatgttttacaaatggaaggtttgtgggaaccctgagttgagtaaatctattggcgttgttttcccaacagcatgtgctcactttgttagctttttcttaagcaataagatgtttttaaattaaggtaagtacatttcaagagacataatactattgtacacttaaactatggtatagtgtaaacataactgttatatgcactgggaaaccagaaaattcctttattgcagtggtctggaactgaatctcagatatctctgaggtatgcctgtatattaaaaagtggtaagatttttttttttacagtaaccaagtgttttatgcttttgttttgtttgatgagaataacttctagcactatgaaacaaatagctatttaattcaacaatcagtttaataaactttttgtaatcccagctagcaaaataaagtcacctcttaggaaatgagccaaagaggaaggtaaactattttagaaacgtagtttaaaatgtatatgtagtgacagagcgagactctgtctcaaaaaaaaaagtatatgtagttaaaaaatctaaaagcatccatattttttcaaaatggcattcaatgatgttcaagtaaactatttcctttactcaggagatgagtttctcacacctgcacaatgacatcctgtggctattatcagacatatcggagaccttggaccttgtgttgatttatgtagaggattccctttccagaggatatgctggataagtacagcaaattgactgcaacgctctataaaacagatctttcatatatctgtaa

SEQ ID NO: 564 - DNA, 664 bp, Homo sapiens
ggaagcagaggatgttgcgcgtgcggaagccggtgctgtcgtccacgccgcggtagaaaagcggatgggcatatgcgtcagggatgttcaggatctggcccgtggtcgccacgtgtcccgcgatgccctgatcggccgggatgcggatctcatagctctgccggagcagagatggagtcgagaggaagaagttagtgacccggccacagaggggactgttaaacctcgggccgctccccagcgccgccggcggactcccggacacccctagggccacatactccctccacaccctctcacctcatcatccaccacgcccccgtcgaacaccttggccaccagctcattctgatccagcaggaacacagagcagctgtggagggaggggtttggtcctctggggcctgacaaccccctctgatcgccctcacgtcccataaggaggcaaaggccggatttccgaggcctgggaggagtgctccaaggcccacccaactgtcaacacagttccatgctggtaggttctgcagctcagacctaggactcctggatctccaccctaccccagcagacctcaggcccgggctctgacacctacctagtcccaggctctctagtgtccacctcctgcaggagctccaggccctgaaacccagcctgtttg

SEQ ID NO: 565 - DNA, 552 bp, Homo sapiens
agtgctgcagctgaggttcgggttcggcccgcgcccggcgtgaacaaagcggctgccaaggcctgggactgaggggactgagccgccggctccacgccgcccccaggcccagaagaaacaccgactgcgggccgggcacagcacccggccggggaaaggacgccccgagttacgcgcaaacttcctttgaatggcgcccaggtgcccggaaagatgcgtacacgtggaccagttttcacttttcagtgccgaaatccatgaagatttaaggcactgatgcaaaacactgaatattccaatgtttgcaactttgaaggttttacacacgaaccgtgggaggtgtggatacatcttggccatcactttgaacaagcctcagaattgctaaaactagtatcagtagaagcactgatgagaatttctgccaagtttgaaaaagaatattccatcctcctctgaacactgaagattctgatcaagtcttctccttctattacttttatttcattcttccttgactaaaacttagcgctctgtggatttgagataaga

SEQ ID NO: 566 - DNA, 869 bp, Homo sapiens
tataagaggaggaagagagacctgagctagcatgctcagccccctcaccccctgtgctaccttgggactctgcagagtcctcgacagtaagaaggctctcacctgttatgcccctggaccttggacttctcagcctccataactggtgcctgtgcagcagtattcactgtgataggaagtgagaagcagtctgagtgttcattgctgagggaatcaagggcaaaatatcatggatgcactcatggacaaataagcagcagtttgaagcaacaacctagatggatgtacagccatcaagaggatcttaaagtgtggtctttagtggaaaaaaaggaggcagaactccataggctgccctctggcttccagtgcagtttggttataggaggcaccagcaggaggttggagggtgagaagagacaagttggggcatttctcccccctgccaagttcagctcttgtctgacagcccacttttcacaactccagacctcactaggctgtggtcaccctgacctctcccctggacccttcttagtcctaggggtgttaacagcttcctgctattgctgatgctaaggttacatttgaacatatttatctgctaaagcaaaataattcccatcattctatagcagaagcaatgtatgggagactgagtaattacatataagctcacatcactatctcttccaccactgtcatccatcatgactgatctgggagatgaaacagcacagatctaaaggacgtggtaagaatcgagatcaccagagatcagtagatacttgcatacttgcaggattaacactgtctggattccaacgatcagctgagtatgttcaagataaagctatagtacatatttt

SEQ ID NO: 567 - DNA, 513 bp, Homo sapiens
gtggctctccatgcctacctgtggtctcttggacacccttgcagaagatgacttcctgggaactcttctgggagtgaatgttatcagcaaattcccaaaacaacaccccttagacaaaaagcctcctcacctatgcattgcctagaccacccactaaagatggtgaccatggaggaagacttgtgttgggcccaatggccctcggccagtgtccgtctgccaggtgccagcccccggtgcgctgaagctcaggccattcctgatgccctggcctcctgcactgagctgtgtgagctcttctgcccaggcaggccccctggcattgaccggcatagacagtgagcctggaggaagacttgccctggtcccactgtccctgggccagtgtccatcagccaggtgcccagaccccagtgcgctgaagctcagccctccctggcactctggtctcctgcactgagctgtgtgagctcttccgcccatgagggccccctggccttgagcagcataggt

SEQ ID NO: 568 - DNA, 459 bp, Homo sapiens
cggggaaggcgccggtgggaggcaaggcacggatggactttacctgcgcacgcgtcgcagccatctccgcgcacagtggtggccaccgcgactggtgctgaagtgttggcgcgtgccgggcgctccgctgggacccgggttgctggccctgagtctcagctttctcatctgtacggttgggacaagtacagtaaccctcgcccgtcaagacgggccagggctgtggcgagggtccacgccttagagcaggcaggagtagggctgattggagccattgtacagtgtcgggaacataccaggacactgagaatagtgtcatgtcataaggacccagagcagatggaccctgctgtgatgcacaaagaggaccacgcaagatatgataaagatctacatcactgaattttggttccatttttgtatctcagcttccaggaaataaaaaagaattctaacatt

SEQ ID NO: 569 - DNA, 538 bp, Homo sapiens
gagggagaagtgacgatggtgatcgttgctgccgcggccgatatggaacccaagcagtggcgaagggaatcgcaaggctcttccctgaccattttctactgtccctgcgcgaggtggacgcaaaggtgttaaatgaggttgaatatattgaccagaaaagaaaatattatagtcctttgttgaagaagagttttctcatactggaaagaaaaaaaataaaagaaagaaacttcaaaaacttcatgctgctttctgaagtactccagccaaagaaaataattcaggtatcaagttggactagctcagatgactacaaaatggttcaagcgattctcctgcctcagcctcctgagtatctgggactacagatatgagccaccacgcccggctaatttttgtatttttagtagagacggggtttcacgccatgttgggcaggatggtctcaatctcttgaacttgtgatctgcctgcctcagcctcccaaagtgctgggattccaggtgtgagctgactagtgtctttataagaagagatg

SEQ ID NO: 570 - DNA, 922 bp, Homo sapiens
tgggagcaggaaacccaaaagagccggccctggaaccaggtggaggggaggcagcccggccatgacccagagcaggacacctgctccacttcaccttttgccatgagtaaaagctccctgaggcctcccaagaagttgatgccctgtgcttcctgtacagctgcggaaccggatggctttccgtggctttgctacagccactcctggaagtgctgcctgactgaatcctcagggcaccccggcaggatggacgtggtgtaccccctactttacagatggggaaactgaggcttgagagctaaagcagcccacccagctcccagagatgaggaggccgactctggcaggagtcactgtcggtgcatgggcatttcttcctgttacagcctgcggccccttccaggccgggaggccttctgcgcaggtgccctgacgtgatggtatgacccattctgggaggccgagagcacctcaaagaactcagcaggaagcacagtttcaattcagaagttctggaaggcgaggcaggacagggcaccctccctgcatggcccgatgacctgcactcctgtttcatctccccgtgtggcacctggggcagcttggagcctaccaaggtctcaacaaggaaccagtaaataccaaaaaaaggacatcacgtcccctacagctaactgcaaatggtgaccatcccagcccttgtttgataacacaagcaaagcaatggcttcttcaaggacaccgagaggaacctcacctctttctaaaacctccaacacagggccaggcgcggtggctcatgcgtgtaatcccagcactttgggaggccgaggcaggtggatcacgaggtcaggagatcgagaccatcctggctaacacggtgaaaccccgtctctactaaaaataaaaaaaattagccggg

SEQ ID NO: 571 - DNA, 555 bp, Homo sapiens
aaggaggaagacctgaggagatacagggcagaaaaaggaataacatcactattggaaaatcttagatcagtgcttgagatattttgccaacactgaaattgatggaccagctggcaccacccagattgacaaaatggctcatctgatcttgtgccccctcaacccaggaactgactcaacagaagagcacagctttgactccgtatgatttcatttccaacacaaccaatcagcactcctgaccactggcccccaacccaccaaattatccttaaaaactccaatccctgaatgctcggcaagactgatttgagtaataatatttcagtctcctgcacagccgactctgtgtggataactctttctctattgcagctctcctgtcttgataaattggctctgtctaggcagcaggcaaggtgaacccactgggcagttactgtagcctccacctaatagaattctaatttagtgcctcgtagaaagaatgaagtccttcagtgatcagcatgggaatcattttgcttagcttatctcacctaggaaccatgctcc

SEQ ID NO: 572 - DNA, 562 bp, Homo sapiens
aatccgcgagactccgtggggtaggaccctccgagccaggtgcggcatataatctcgtggtgcgccgttttttaagcccgtggggaaagcgcagtgttctggtgggagtgacccgattttccaggtgccgtccgtcacccctttctttgactaggaaagggaactccctgacccttgctcttcccgagtgaggcaatgcctcgccctgcttcggctcgcgcagggtgcgcgcacccactgacctgcgcccactgtctggcactccctagtgagatgaacccggtacctcagatggaaatgcagaaatcaaccatcttctgtgtcgctcacgctgggagctgtagaccggagctgttcctatttggccatcttggctccttcctcatccttattcaattcttgaacggttccacacaaaaataactgaagatgggcctccagtcttacgacgccacaaagtgccctgacaccactgaacacgaaaactcattgcagagttttattgcatgaaagatgtttgtgatgtttgcaattggatgactcaagtctttgtcatggagac

SEQ ID NO: 573 - DNA, 583 bp, Homo sapiens
tttcctacgctaaaaaccactgagtggagtatttagtacacaggaagtcggccagagaaacatttctcatatttgaaggccggaaagagggacatttctgacaccggaagtcagtgagaggactctttcccacacaggaagtcagctagagagccgtctcccctctctggagccgagagaggccggtttcccccaccactctcagggtaaagaaggaaatgagaaattgcaagacagagtatttcttaggcaatggctgagaatggcaactcaccacatgcctttgaataagacgtgattattattaacccatattctatcaaagaagaaactgaggctcagagaggcaacttacttgccaaaggtcactctgctggtagcccacctgggaggaattttccagagatcactgtctgatgaccctgtcttggaattggagccatgcaagttacactgaccacgtttgggttgggatattgaggaggttatggttaaaagcatacgatgggagatcatattgtacttgcgagtgagacccggctggaggaatgttttaattcttcggaaataccaagtggtctct

SEQ ID NO: 574 - DNA, 2506 bp, Homo sapiens
gttctgggcccagatccccataagtcagcgatgaggggggccgagcaggggctgcccgttagacggccgcagagtcccagcccccagccctgctcacctttcttacctctctggccccgtcggcatttgagcctgggaccccagacgaaaggatacgcttccttttagaacccctgccaatctgaggacggggccaccccacagacgccgtggctcagcaagcagaccaatggccgaggagtctggcaaggggcgcttggcagatgagagtggaggttgtaaatcaccctccatgcaatggttcatcataaaggatatggagcaaaattagaggaggcacgagaaggaaagccggtgatgaacaaggaaagtgcctggttgaagctagcttgcaatcccaaagtcagaaggttgcctgggaagccatgaaacaaagccaaatcaaggcaaagcagacacatggagattttgagactgagaagaggaaaactgaggacattcatgtgagatggtttcaagtttcccttagaaggagaagttatcttcagaaggtcaggttggtgaggtgggagttcaaaaacaacaaagtatgtagctaccattgtgaggaagaccatggaaaatggacgaatcagaatgaaaggctttctgaacaagagggagtttccctgcacaagctccctcctgcctgctgccatgtgagacctgcgttttgccttccaccatgactgtgaggcctcttccccggccatgtggaactcccagagacagaagcagataatgcaagtgtcatctacatctggcaaaagccaaaggtttggaagatggaaaaaggaatccaggcaaaaaggagcccaagattgaagtgaatgaccaggtgcaccagttcaaatgcaatcaggagggacaggggtagagggagaagcctagagcagcgcttctcaaactgactattcaagtcacctggagatcttggtgaaatgcagactctggtgcagtaggtcctggcgggaacttgaaattctgcattttgaccaaggtccaaggtgaatgtccagtgctgttgtccttggcctgcagcaggaggagcagggatctaagacttggagagcaaatgtcaagctcagaagaaagactggaagtttggggacaaaacccaaatatggctaaagaaagcctgtaggatgaagttggaagttccagagccttctcttcacataatgggacatgcaagggggaaaccaaatcaaaagtgtagaatgcgtcgctggatgtctttgacatgttattgttctgatagaatatcagcggggagctactgaggacctcctcactaccctcccttggaagagtttgtctgcaatggagccaacacagtggaaagcagagctgagaaatggacaaacaactcctgatgcctcatttgagcacctggatttagccatgtctgaagctattatatccttgaacttttgaatcatgtaggttaccataattccttttttgttaaagctaatttgagttgggtttctatcacttgcaatcaacaattgaccaggtgcttagtacataatgaatgagtgaatgaacaaattcaattctgtaagtatttatcatctccttacacggcaggcactgttttaagtcccaaagaaagaggcagaggagcgacagagatgacttcctcccttgaaaacgaagcatgtggcctgacaacctaaaattggggtcaatccatccaattatggtgactgcttagaaatatcccttttcctcccaacgttttcctttccttctcccataaacataataatgtctcctgccagtactaaggcatggcccatggacccactaacacctatgctcacgttagctcttgaggccgagtggcttggttctatctggttatcagatgcaaacttcatcacagcagggatttgggctagacattagaggaatagtgtggtaccagatggtgtttctgaagaaggttgtcctatttttgcagtttaaggatttgataataaatctgcctggcagccctcagatgtgatttggccttgaaatcgtctctgttaatccttgatgctgtgtgtatctgtcaaggtccaaccagaaaaaacagaacctgctctaagtatctgaacaaagggaaatttaatgtaaggagctgattgcacagatgaaggaaggggctgggaggcaaacaagagggaactgtgaggtaacccagggatttgccacagtaggaagacatgaccactactaggatagagaggtaaaaaataaaaaaataaaaaaagagatggtgttacttgtattcaggaggtggagtcatccagaggaggctgaagccatggcaggtctgtgtggcagaagctgctgccagggaagacataccatggctccaagaaaagctgccagagacagaaagtgtgggggagaaagattcttccttttccctgcctcccacctctcaaactcaccgcagagcttccccttggcc

SEQ ID NO: 575 - DNA, 1776 bp, Homo sapiens
aatttagtagagttctctgtatagtctctaatcttagaaaaatgttggaagggtaatttttaagtgtagtggtttgaagaacaaaccagaagcgcacaaacctttgtgtattttagaatatatttgtcttcattctgcggagctcttgtgttgtaaaggtgcagaactacgtaaaaatagtgttgggcagacttacatagtacatctgaaatcagatactggtttattcgaccatatttctaagggcatttttccagtaaaattgttttattttttgagtagccttcctatagtggtacatgttacatcagttgcgcatatcttgattttacagaatctgtcttaagtaccaattttggtttttcaaatcaatgtttctgaaatttttgaacactgaaagtggttttaaatgaatattctgaatctagttctttagaatcctctttgaattgtgaaatgcaaaataattgttagcagtttaacctgaaagatctttttacatgataaatgggggaggagaaagactgaaatgaaaatgttgaagaccctgatttgaaattgagtgtaaaggtctagatactgtaagttttagagtagctttagagacaaagctagtatcccacttggtgagatcaagtaacttgtggtttaaaatttaaagtaaccagtggccattttaacttcactaatttctcttggaggagctaatttttaattgctcatgattgtaaaacatacttccggatggtaagggagatgttaagatgatttgtcttgaagaatggtaaactttttctttgtttattgcctgtcataaaaagagggaaagtaaaaaaaaaaaggttcataatcttaaatcagtccaaaaatttgaattttctgtatttctgtttaattcaatgcgttaatctttagcattggtcaatacagccaaaagatgaggaaaacaaagactgatagatactaagataagaaataactgcaaccataaatgtatacaggttatgtgtccatgagccatctcttcagtttgcccatagatttttgtctgtggaatattttcttgtttcatcacactgaatcgttggccaagaaatgcttgaaaatcaaaacattaatatcatctttcttcttttttttaaaggtgacttaagagattaaaattaatttggttgctgttggttctgaacaaataatgagttcttttatttgaggtatgccattttgaagactgagacgttggagttttatcctagaggataaaggaaatctttgggaaagtcagtattttatatagcaaaaatatgaacctcaaactgaatcctctaaaggccccatacaatgaagtagacattggtggaaacatttacacccagtcagcttgaagagtttcaaatggaccctaccactgagaaatcaagatggcagtctactatggggaattgaggaaaaatggattaatacaagagtcctgtgataatatacaaccaagacagggttcttttaacatggattccatgcagtgaatgaagacataggtttcttacccaacacaaatggacagtggatttgactttctaaagactttttttgtggacattttgacatttggagaagaaagatggcacactaacccagataatagtttttatgcctggaattttttgcagtttgatttgtatgcgtatgacctcttgaaatgttaatttttaataaaatttgtaacacttaaaaatttctcagtttgggtttttttttttaagtggaagtttaatt

SEQ ID NO: 576 - DNA, 454 bp, Homo sapiens
cgctccctggaggcccctccagagagggacccggggccccgccccgcagctggagaaggggtgaatgcctttcctacctaacgcctggtccgcggccctgcttgttgcgtctccaagaccacgtgtctgctgcattttaaaaatagttgtgaacatctgactttctccttttactttggagtttgctgaaatgtaacctcagaataagtggggtatgactgccctctcctttgagggaaaagaaaaagtattttcaggccaggcacggtggctcatgcttataatcccagcactttgggaggctgagaatacatcaataaaagaagaacaattcaagagaaacaggaaattcacagaagaggaaaccggaattgtcataaacaaatgaaaaatgctcaacttccctagtaattatgagaattcaaatcaaaataaagacttcatttcacactta

SEQ ID NO: 577 - DNA, 3651 bp, Homo sapiens
cgcctccttaggaacgggaaggagccccggcccagtgcactgacgtagttagcctaagatcacgtagctggttggtcacagaatcatgactttaattcatgtcttctgactctgacctggcacgctttgtacctcaccaaagacagtgatgaaattgcaaaagggcagagtggagaagactggaatgttcagccaaggcatttgaacttttaatgctgcaagtcaagacttcctgaagatttttgagcagatgagtgaagtgataagaaaatgcatcttcagcagtgacagcatcaacgaggaggagactggccgggaggctattacccgcatcaaaaccagtgaacattaaaaaaaattttttttttagagagagggtcttgctcttttgcccaggctggagtgcagtggcttgaccatagttctctataaccttgaattcctgcgttcaagcgatcttccttcctcagcttccggagtagctgggactacagatgcgtgccaccatgccaggccaatttttaattttgttttgtaaagatggggtttctgtgttgcccaggttggtctcaaattcctggcctcaagccatcctcccgcctcagcctcccaaagtgctgcaatttacgggcattagccaccgcacctggtccaaaaccggtgaagatttgttaaggtgttggcaatatgggtatacctagattatccttcatctgctaaaaacatgctctaatctctccccagcccaaaacaaacaagaaacctctcttccccttccagctcctaccacgtgtctttgctcctctgtatggcaaaactcaagtgttcaaaattccttatcttcaattcctcttctcccattcccaagtacactacagtcaggcattcacaccaccaaaactgctctcgctgaggccaccagtgctgtattcaaaggataatctttgttttatcagctgtatttgatccagcaactcaagtttttcctgtctagaacacctttcaccggtcttcttgcttctccatagtgctggtcgtaaccctcaaaaggtcccccagttcactcaggataaaagtcaagtccttaaaatagactacagggtgctacagcatctggttcctatggcttttctgatctcatttcatactgtctttgctcactccactgggccaatcaagacccacctggggggttttcctttgttgttttgcctgcctaggaaacttcccaggtatatgagtttgctagagttgccctaacaaataccacagaccaggtggcctgaacaaaactagtttattttctcgaagttctggaggctagaagtccaagatcaaggtgggattctgaggcctctctccttggcttgccgatgacagccctcttacttcctcttccctctgatgtctcttcctattcttctaacaccagtcagattggagtgtggggctacctttaacagcctcattttaacttaatcactgctttaaagatcttatctccaaatacagtatagttatattctgaagcactaaaggttgggacttcaacatgtaaattttggagggacacaatttagcacataatacccaggtacccacaagatatgttccctcactttatttgaggctttgctaatcccagtgaagtccctcctcactaccttatttaaaattaaaacctccaccaccttccttcctttatttctctcctgctttatttctgcttagccgatacatacattacaaatatgtaaatactgtaatttacatatttgttttgtttattgtctgctgtgtttccttccacttgcatgtaaattctgtgaagatttgctcattgatgtattcgaagacataaaacagtgcaaagtgtttagcaagcatttaataaatgtttgttgaatgaatgaatgaatgaatgaatacctgaggacagaaggaaagagacaactggaaaggaagagactgcagttgctgtagacagagggggttgattacgagagcaagattccagagtatctggaggaaaaggggcagctctgccttccatgttgaaagtagagcgtaggaggtattcctagagagtaagttattttgaaaagtagagaaaatagatgagcgaactcaaaccaattgaccattatctactcaacaaaataggagataaaattgcccacctaaaagggattatactagttggtatgaggaaggtgtcagaaaattaacataagatgaaaaatgattgttaactacctgtttgaaattagtgtatatattttagtgggcctggtcttcatggttttgtaattttttcaaaaaatgatcatggcatgaacaaggctattaatctgaactaatgaattaggagtctacttgccacctgtaaatactgtggaagttttatttattcatttaacattcagggattccacatgaccacctgcaaataatgagaataaagatatgaacaaaatagatgtggttcccgcccttctgaaggttaacacctatctagttagggagacagacattaacaatcacacatatattattaaaactgagataagtgctatgatgaaaaaggcgcgggcagaagagcacagtggtggaaaatgccagtaaggagagtcaagctttatacttgggaacaaaacacaaattttccattttggaaaaaaagcctgagtcgaagtgtgctgactgggaaaataaattaaggagagaaaagagagtctacctgctttaggacagcatggagcttcacagtgactttgtgggaactctggaacctgggtgcctcagggaaatgtaagaaagtggggaccgggcatgagagctggcccgtgaggctgggccaggaaaagaagctggtgctcaggtaccctgagccagggttgcccaaaacaaccaagattctacaactgagtgtggcccaaaaaatcagcaaaataggtctgagatttagaaacagtgagttcaatcccttaacagagagagactgcatctgttgaaatgatatttgattgtgaataacaaaaacgttgccatatagtgggtgaagcaagaagtgggttttttttttttactgacaccacagctctacagtgatgttttatttaaacttatgctccttctgtttctccatgcttcatgggtgactttgttccttttgcctgtcgtctcactgttttgggatggcaactccagtatcatttctttattataggtaggacaaagaggaatgacaaaaggcatgtaaccacctgaatttgcccctatcaaagagctctccaggaagcaccaccaaggaattttcactgacatttcccaggccagaccatgctgctgctaagcaaaatgaggattctgctagtgaggatgaaaggaagaatgtgtaatcagttttcttgaagtataatacatgtacaataaactgaacctattggaaatatacatttggatgagttttgacagatgtatataccacagtcaagatacagaacattcccatcactccaagagattctttgtgtccctttgtggtcaatccctcctacacgaggcccctaggtaaccgctgatctgttttccatcacaatagattagtctgcatattctagcatctttaataaatgcagtcatacagta

SEQ ID NO: 578 - DNA, 3676 bp, Homo sapiens
tatgtggcagttcctcactagggaatttggtctccagggccacttttgaccttaatccatgttggagccatcaatcaaagaattgcttgcatctaataatggtgtaatgccaatactaagccctggaacgaagataggattcatttctcatggattattgagcactctggggtaacctggccctgatctgatgacgctaagatttaaaaacccagatgcatgtgactagaactatcttttctcccatgatgcactgctttcaacactgcatgactgtaaaaacatgtgccacgctgattatatatagagatggtctaaatcagctgcatcccatttggtacccaggcaaggatttttccatacctatctttttgctggtggtaatgatgagttttgtcacttgctataacattctctgtccgtcttttttcttttatgtaaatacttttgtgacttcattgtaaccagcattttgtaatactcttaacagcagaggggattaaatcatgattcacttctgaacagtacaatcagcagtaggaaaacgaggagggagggagagggaaattgtccaccacttcccaatgataatgcctggctcggaccccagattcacatcatacttgaagttcataaattctgggcactgctcagcttgaggaggcaggcattgctccttcatatttcagggtgagacaaatgctctgttgaagccatgccactacaggatacattcacctctgcttgctttcctccctaagccagagtgtagttaaacatttatatgtcccaggccaggagatcaaattaagaggaggttagctactttccctggctcttaaaaacatttgagtccaagtatggttctctggcttgagggtggccatttgttgcctcactgtttttattaggacatctggagattagaggtgttaattggaagtaacttttctatatttggtttctctccacacattatgagaccttttagacccagttggatggctgtatcctagtatgaaattcagcttctaagtaggaagaactatgatagaggaacaagattgctctttgacttggtgatagtagggcaatagggagtgtcagtagggtagtttcaggtggggaggatgacaaaccactgataacaataaaaatgggtatttctcaacactcaagccaatttcccatttgataacaagtaggttctgatctattttccccaaattaatattttccctggaagattctgacctgtctgatcaaataaaggcattcctctgagagtatacctagcccacttgtggccaaattatacttgactgttatgtactcaaaacaagctttcctgttaatctctttctcttacctctattatgaggacaagacgtggaagaattaggtcaccggggcatctgccattgcatatgtttaagtggtataaagaagccaggattcctagaatggtctgtcttttgccatttctgggacaatgagaaaatccatctggagtgtttatgcccctctgaatagccaagtcatgggcttgtttgctttcagtcactgccttcagaaaaagacaattttacaatgacttacttctaataatcactgaaacagcctcatgaggacatgcaaaactgctgtctatcttcagacctggcccattgtcaaatggcagacttgcagagcaaataagggacctggcctagttcacaaggcagtcagaagtgatccaaagttcaggctccccctcccttttatcactccaccctgcctctactcctccgcctcctattcttccggcctttccatctggaaaccatgagcctcatggattccaggcacaaattctcagatttcagatgtttgggaaatttctcagcttgggtcattcttcaagagtaagaaattgaatttgtgagaaaaaaaaacagctgagactgtttcacagaagagaaaataaataaggtgtggtgcgtatccatcctcttcccaactcagctccaaaaccacacacaatgtctaacttcaaaaagagtatttagatcccccctgggaaggaacagaatggaaaaacaatctccactcataaaaacacttttctgccttctacagtataaacacaactggcatcagataatacaatgtaattgattttatgtgtgtaattggggaacagaagggtctctagagggtagacctaagagtaatggaatggagtgaaaagtaaaatttagactaaattgttgggaggaaactgttaacattgtgaaccacttgaccctagtgttgcatcttcacaaaaaagagcaatgtgccgtcttctgtctttggaaaatgggacaagcttgctcctgatactaggttttagaagcatacagacttggttttagtactggctttgttctttactaactctgaacaattaaatgagcagatggtctacagggcttagtacagtgcctgacacatagtaagcacttagaaatggtagcttctgactgttgtgctggagtcctgttagagattcagtagatggagccaccttcatgttgcccctcactgagctgctctgctcacctctagatgctccccatggctgtttcatagccctctgtaccacatccccatgtactttttcatatcaacggtaagtacctcaaattaccgtatgtatttacttgttcataaggttgatgtctgtaactctttgaaggttgtattagtcgtttgctcctatattactaatgatgacaaagtcgcctgacagagtagatgttcaaatttatggacttaaactgactgacatcttgataatgcccatatccagaggtactccagatattatatcttcatgcagaaaactgaaagatacctttagctacatctaccccagaatgagtgtccaaagcaggtggcaccaccaaaaggcaccttcttttcccatgaaaagagggaagagagttgagaagcctcactcccatccctgctctgccactgacaagttgtgtggcatttggcacatcatgttctctctctacatgcgcctaaaatgacgggtagggtcagagacattggaggatctctcttttctcttccacctctaacacggtaagatcttagcaaagtaaaaaggacagtgataacagaaaaattgttcctctaagagtcccaagtcatcttttttctctccgtgtgtgttagcatttgtgtgtgtctgtgggtgtgtatgcatgtgtgtggaagctatacaaggaaagctgaatccatatgtagacttcatggagactagtactgctccaaatgtgcacaagccatgtgatatggtttgcctctgtgtccccacccaaatctcatgttgaaatgtaatccccaatgctggaggtgggacctggtgggaagattggatcatgggggagttttctcatgatttaacaacatccgccctttgttgtcatgatagtgagttcttgtgagatctggttgtttaaaaatatgtgacacctccccccaccttccttctgctctggccatgtaaagtgctcactccccctttgccttccaccatgattgtaagtttcctgaagcctccctagaagctgagcagatgccagcatcatgcttgctgtgcagcctgcagaactgtgagccaattaaacctctttatgaatta

SEQ ID NO: 579 - DNA, 698 bp, Homo sapiens
gtctgggaacggctggtttcgcggtcagacgccgagggccctcgaagtccctagcaacggctgcggagggagattccacctaggtccgtgcaggttacaaatggcaaccagaacagggactccaagcacgcccaactagcagcatccaaacatgggacttcaaggacgtgaatgaagaaggtctgctggagcagaggaactgaaattgacaaggcgaaaggggaccctgggaagagtctgccggcagcagatataagtctgtaaaatcggatggaccaccaattggagaatgagagcctcccagcccagccttacattctttcaattaatacataaacagaaagggggatatgcagggagccaaaggcctgtgggacgtgaccaactcagcattctgctggaggctatatgatcaaacagcaaactgtttatcatgaatacaggatgtgagcaaactcaggactgctcctgccaacataaggtttgctggaggcaatcactccctggcaccgaggttatctactgcgacatctagagaatgcagtcttgcaagcctactctgaactgagcagccgaccccttcttccacccccccaccctcctatctcttttgcctaataaatacggagggctgtgtaaagctcagggcccttgtccactagaggtaaggtgctccctgaccccttctcccaaatata

SEQ ID NO: 580 - DNA, 2493 bp, Homo sapiens
agaagagaaactcatgtcagccccagccctggggctacctgacctgatgaagccatttacactgtatgtggcagagtgaaaagatggaagttgggagttttaatccagacggtggggccctggccaagaccagtagcctacctctccaaacagctagatggagtttctaaaggttggcccccatgtttgaggaccttggcagcaactgccctgctagcacaagaagcagataaactaactcttgggcaaaacctgaacataagcaccccccatgctgtggtgactttaatgcataccaaaggacatcattggctaacaaatggtagactaactaagtaccaaagcttgctccgtgaaaatccctgcataaccattgaagtttgcaacaccttgaactccaccaccttactcccagtgtcagagagcccagtcgaacgtaactatgtagaggtgttggacacagtttattctagcaggcctgacctccaagaccatccttggacatcagtagactgggagctgtacatggacaggagcagcttcgtcaacccacaaggagagaggtgtgcaggatatgcagtggtaaccctggatgctgtcactgaagccaaatcattgccccaggatacttcagcccaaaaggtcaaactcattgctttaatttgggccttagagctaagtgaaggtaagactgtaaatatttatactgactctcggtatgccttcttaaccctccaagtgcatggggcattatataaagaaaaaggcccattgaaatctgggggaaaagacataaagtaccagcaagagatcctgcagttagtagaggcagtatggaagccccaaaaggtggcagtcatgcattgcagaggacaccagcgagcttccacctcgattgccttggggaactcccaagctgactcagaggcttgaaaagtagcatccacccccttctgggcatcaatcacagcccccctattccctcaggcacctgaccttgtacctacttattctaaagaagagaaggactttctctaggcagagggaggacaggtgatagaagagggatggatctggttatcggacaggagaatagccataccacaactgctaggagccgcagtcatattggctatgcatgagaccacgcacataggccaagagccacttgaaaagttgttgggccagttcttctacatctcacatctgtaagcctttgccaaaacagtggtgcagcagtgtgtcacctgctagcagcacaatgctaggcaaggtccaactgtcccgcccagcatacaagcttatggagcagccccctttgaagatctccaagtagacttcaccaagatgtccaaatgtggaggtaacaggtatttgctagttctagtgtgtacatactctaggtgggtggaggcctatccaacacgaactgggaaagcttgtgaagtaacctgtgtgcttctccgagatctcaaccctacgtttggactgcccttacgaatcagctcagacaatgggctggtgtttgtagctagttggtacagaagacagcaaaggtgatcgggtatggatcacggattggaacatagcctccttgcagccacggtggagaggaccccagaccatcgtcttgaccactcccacagccataaaggtagaaggaatcccagcctggattcaccacagccatgtaaaacctaaagcatctgagacctgggaggtgagaccaagcttggacaacccatgcaagatgactttgaagaagatgacaagccctgctccagtcacacctggaagctgactggtccgtgcatggctgaagcatgaggaaactcatcgtgggactcattttcctaaaattttggacttgtacagtaaggacttcaactgaccttcctcagactgaggtagggcaaaaagttaaaacagactttctgtttaaaagggacttgtgtgtataatgctacccagtacaagatatgcagcccaagaagtgaccagcttgatgtgtgctataacccattggaactagtttatccctgttggaaaacagagtatgtaactctaggaattgatggaactggactggaagacctgggtagtgaagatgacagtgagaactcccactagtgagtgagattctcaaaggggggaatgagaagtgaggccatttctcttactgtctcctgtctctgaagaggaggaggaagtaaaagttgaaaaacaacaggaatgaagtcattggcaagaccagccggtgccactgatgaccaggcctgaggttaaaagatcaaccccccactctaaccacatgtgctctcaatctatcatgaccctttcatgtggacccccttagagttgtaagcccttaaaagggccaggaactctgtcttcagggagctcggttcttgagacatgagtctgccaaagctcccagctgttgagatgcgagtctgccaaagctcctggccgaataaagccaaatccttcctt

SEQ ID NO: 581 - DNA, 599 bp, Homo sapiens
ttaatttgctcacattcattataatccattatttaatacatttttcttccatttgatcatattacttgctgataggaaggactgagttcattttcagcgtgtctggcttttccatttctgtggcctgggaaggtgggtggctacatcatcatccatggtctctgaaatatcctgtgttaccaaggcctgcttgttccaccaaactgctccataggcagttgtgacacccagaaagatgctgatatggtttggctgtgtccccacccaaatctcatcttgaattgtagttcccataatccccaggtgtctgggaggggcccagtgggaggtaattgagacatgggggcgggttttcccatgctgttcttgtgatagtgaataagtcccaagagattctgatggttttataaacaggaatttccctgcacaggctctcttgcctgccaccatgtaagacctgcctctgctcctccttcaccttccgccatgattgtgaggccaccccagccatgtggaactggacgcctgctggccacacatcaccatgaggatgcacttgactgaatctggaagaatcccagggctgtggaagattttgg

SEQ ID NO: 582 - DNA, 858 bp, Homo sapiens
tttacccgcgggaaagccgaggcccggtgctgtattctgccgcccattttacccgcggggaagctgaggcccagtgctgtttaatatcttactcatgttcacttgatgagaaagtgacagatctgagacaaacccagttctagaggttatgacaccagccatggaagagcagagaggccaatgaggtggggaggttggaaacaaaaggccttctccaccccagcttgaccaacccaaaagctggaaggcaaggaagacctagacagaatttaagagacaccagaggatggcacatttatactgagcttgcagtttcctaaacatgaagaagatgaacggctctcagttaagcagcacgggtcagataggagcttgaaattgaatatttgagctgacacgggagagacatacttttgagattccaaatacgatttctgtggagaaaacaaaaaaggactctgtttttaattcaaaagggagaagtgaaattctacctcacttttttaaaagaagagcctggaattggcctatccgtctttttccccgttggatcacagagcagaaaggaaggtgggcgtttgtgttctgggtgttgtccacgctggacgtgccagcatctcccactgagccagatgttccagggctaaggccagtttcatttgaaggcacagccttactatatcatattaatctgatgccaagtttttggatgttatgagcaaccacctcatttattttttgtggttgtttaaccacaatgagtaagtcatgccgtgagggcccagagactgtgtcactgttgtgatgatagagtgcagggcccttcaaagggaggtctgtgggccagcagcacccaag

SEQ ID NO: 583 - DNA, 440 bp, Homo sapiens
gaaagaatcgaagcctcaagcgtcacgtctaggaatagcgctggagtcgggccaagtcattagagacgatgagtaatctggctcttccagaccttcctgagtggtagtggccacggctgaagacagagggctgcgtggaggctgaaggcagagggctgggccttgggcctgggtaaagacagctctggacatggagtggcaggagcgataagcagaactactggtgacactgtgggagagaaattctgcaaaataacagctgggcagcccgggaccccagggagttgaaatgggacctcggagacatcaggatgtcctggagaggcaccaaggccagaggtcccccagggaccgtggagggggcattaagccctgaaaacagatcatgatgcccatccccccagcacaattagaaataaaaacaacccgggacagttaaa

SEQ ID NO: 584 - DNA, 2567 bp, Homo sapiens
ctttgtaatttgtagcaacaaacctggggtcagacactccactgcctgtgcatcttgcctgtttccggatccgccgtgtcacagacattttctatgtcagtgcctatggctctacccagggtgatgctgctgatctggtctgattcccaagctggaggtaatggcgtgtgtcctgccctagtgctgctccctgatggggagcatgctcagtttcctgcattcaggtacgagcagagacttggcaggatccgccccgttcagagttgcaggaagagccctggatgcctgtcgcaaattggaataagtgggagggagccacaggctggtacagagacaaggtattgctgtgttgtccaggctggtcacagactcctggctgcaagtgatcctcctgcctcagcctcctagagtgctgggattacagacgtgagctaccacacctggcttttcattccttttaatggctaaataatgttccattctatagatacatatttttttccccattcatcagttgaaggacatttgggttgttcctagtttttggctatggtgagtaatactgctatggatattcatgtacaggtttttgtgtgaacatatgttttcatttctcttgggtacatacctgggaatggaattgctggttcaaatggaaactctttaagtttttagtaactgccagactgcttcctaaagcagctgcaccattttacattcacaccagcagtgtatgaaggatccagtttcttcacgtcgtcaccagcacttgcctgtctttgtacaccaatcaaaggtgtatgaagtcgatctcattgtgtttttcatttgtatatccctgatggctaatgatgttgcccatctcttaatgtgtttatttggtcttttgtacatcatcttgtggaaaaatgtctgttaagatggtttgcccatttaaaaatagtgttatatgtcttttattattgagtaacagttctttatatgttgtggatacaagtcctttatcagatgtgtgattttaagtatgttctctcattctgtgggtcatctacacgttcttaaaaaattttttgagacagaggctttttaaacaaatttttttgagacagagtttacctcccaagctggagtccagtggtgagatttcggctcactacaaccaccacctcctgggtccaaatgatcttcccaccccagccttctgagtagtttggactacaggtacatgccaccacacctggctaatttttgtattttttgtagagatggggtcttgctgtgttgcccaggctaatatcgaatgcttgggctcaagctatctgtctgccttgggttcccaaagtactgggactacaggcgtgagctgctacacctagcctgcatcttcactttcttgatggtatcatttgcagcacaaaacttttatctattttttttcttttgtttgtggttttggtttatatttaaataggcttcacctgacccagggttttgaagatttacttttatatcttctaagagtttcatagttttaggttttacatttaggtatatggtccattttttttgtgtattgcataggaaagggtcccaacttcattcttttgcatgtggatgtgaagttttcccagcaccatttgttgaaaaggcgattctttttctgttaaattttcttggcacctgtgttgaaatcaaatatgcagaggtcttgacacactgttactgtccagtctctacacatgctgtccttctctcccacaaagtgtaataatgtaataatgcaataacgtgcctgataaccaaatgagtggatttcagcagtccccctttgtctgaaacctttgtgatcagagggaataaacatcttagaggcatgaagcccttgctcagataaggagaagatagagaaccaaagtgccataatgtaccaagtaaaaagcatcagatgtgccagaaaataagcagtaggaattaactttgagggttatcacaggaacactatgtagagtaagcacaagcagctcagctgtggacgagctttgctgtagattttgctgcaaacctctgcaggcctgagagcttgccgtgggtccagagagcagcagatgtacttggctgtgacgtcactggatgtgtcctgatctactccttctccttctcatacatgaggttatctgaggtctcagccaagagacaaatcagcactttacccacggacagcaccaaagctcgccatcttggccgctgccccagaaccttggaaacttctgcagtgaaatggattctgattatttttattacctttgttctttttttagaattgaagtctggaatacataaagtgtgttaatattaagtgcaacttcgtgaccttttaattgaggtattactgtgtaaccatcaccagattaatatatggaacatcataagtaccctgggagactccttgtgctatttcccactcagtgctctcctcttaaagaggtcagcactgttccggttcttctattaccatatatttgttttgcctgctcatgaacttcaaataaataaaaactatggtatgt

SEQ ID NO: 585 - DNA, 2277 bp, Homo sapiens
agatgctccccggcctggctccgagtaactgcgagctggaggcgcggctgctctctcgggcggacctcagctctgcgaaccctgtggctgccggagcactgagcgccctgcccggagtcccgcggagcctggcgaggaggggtcgctgcatcccgagggccagccctgagccgggagatgaaacagctgtcatggaaatattttttaaatctcatactggtcaaacggtgtaaactttgctggaaggaaccttactcagagggccaatcacctgcttctctagagttctcaagctctcctgtgagcaccaggttgagctgcagaaagccagaaccagctcagaaactgagaaatggacatgaagatgcccaggaaacatctctacagcatccctaactgggggttgatccattcatttccagacacagagaacagagtcacattctgctgtttccatatgtaccattttagtaagacttcttggggcacaaggcaggaagttggggacaatatatttgtctgcaccaaggcagcctgagaagagagaagtgaatactcctggggttattctatattattcacttaatattctaagtgagtcctctaggggtacctgagacatggagtatgaaagtacacattcacaaaagtaccagctttaaaactagattatctctactattcaaaaacaccaaggaaaggccacacaatggagacaaagtgcatctgagatctagcaaatttccctgttggccacatactgataatgatgtattaaaatcaattctatactgtggggtacttatttgacattaataggtaccatggtggtttaacatagttgctgcccagagaaaacgccgcacactcacctacactaaaatgaagtctgagtcagctgcctcccctccgccatcccttccaaagccaatggttgaaagtcacagaagtccctctgctgccacctagtgacgacaatgtgaatacaactacacagcctcctgggaaagaagttttgaaccacgtttgcttctaaaggaagcctgtaattacctctgagtgctctattttggctacaatttaaaaacatatatattttaaaactctataaactcttatgcatatccctttttaagaatctgacctgtaatggatgtagcctcactttcaagaacctaaaagctatgcccccaattcagggagtagaacagacaggcttaagaacagtgcctaaaaatgccactaaatttatctttaaaatgcctgtggttccttagcacttgaattccgttatgcccctgggtatagtcacctggatgttaggggctgtcaaaattcagccctcagttggtgatcagtaggttttccctttaagtggtttctgaaaggattttttttaaaaatcttgaaattctcatgtctggatgatgtttccagttttgtggaagaataaaagaaaagggacatgaaattctggctccctgggggcagtggctgtgtcttattaatctctgtgcccattgtaccaacaccggtcagtcacagcatgtactcaaccaatgctgatgaatgcagaggggcgaggggctggcacgctcttgaccccttataggggctgcgtcgatggccagggttcaatgggaactttctggtacagtcttgctctgccaatctttcaaattaagtgcagcacaattggaagcctcacattctcatagacgggttgaggagggcattaggggcagaaaggctcacataaggcctgagcgtgaggtttcctgcccagcactgctgtgccattgcagcccaccttcttctcacctttccttccacaccacggcgcggcaggtgcagaaaccgtgctgggattgaggccctagaggctgactacaggtcttgggggcaaaacatctggacacacagctgaagatgagccaagtatattagtcagggttctctagagaaacagaaccaacaagatagagagatgcagagagacagagggacagacagacagatttaagtaactgacccataaaatcttggaggcttggcaagtccaaaatctgcaagatggaagtgggctggcacattggagactcaaggaagagttgcacgttgagttcaaaggccggctgctggcagaattcctttctgctcaggtgaagtcggtctctgttctattaagaccttcaactgattggatgaggtccacccatattatgaagggtcatttgctttactcaacatctactcatctaaatattaatctcattg

SEQ ID NO: 586 - DNA, 1563 bp, Homo sapiens
ggcagctaggccgaaacgcctgtatttaaagggatagtaactcggactcgttctgcaatatccccacaagggcctgactgagcgagcgagcatggacggccgcggggctttctggacagtggccattcccagagccaggcaggaaggcctcgggaggctggggctcccgttcccggtgaagcggacgccgccagcgccccagaacccaggaggaagcacacaggccccacagagagtggttggcaagagtcactcggggattaggatgccggccaaatcgcggaatttgaggctggaatccaagctcaacaggactgctgtgtgtgaagcactcaagagggcccctacaaccaacctgccaggagtcggctcctgaaaacagggtcggaaaaggggtctggcactcttcctcatgcttacgagatggctgctggaattccaggaatcacatgcaaattctagtcaggagcaaagaggaagagacacagtgaaaaggggtatacagcggcagaaggaagctcctcaaatgaactctgctagaactctagccagtagcttctccttctatcacagtggccagaactgtgacaagtgaccatccttaggggaaaaaagatgctgagaaatgtgaattttgttgccaccttacattttcaaaggagttccattcgtaagtacagaacgctcagagaagaggcagcagatctaggatatggagcagcagctcttaagggcacagtgggaaggtttcaagactgaggaggatcttggatttgggtaggggaaggcagttcacagtattgtggaggaaatgctgtgaaagagaaagtggaaggcatggaagcttaaacttttaatatgactggtgaatacaaggatgaagggcaaagggaattcagactcatggtggtcagattaagaccttcagcggctctgtctcccagccccacatacccacttccatgttctgctctttactgaagctgaaagtctgcaaccttcattctctgactcccttacattttcttaggcttcttgctagcttctgccaaaaagaggccctggcaggagattagatggcaggaggcagaggtaaggattccatgttaacaggtgctggaagttgctggtgtggcaatgagaactgggccccggtcaaggcagcactactttggtagatccagaatcaaccatgataaccgtgacagtgtcttcaacagtgcagcagtagacacaggcccctggtgctggaatccaatacagggacaggagcagcacggagtcacggaacaccgtcttgccttcatgtcactttaccatttcttctttctccctcttactctaccagctacctgtggagatgttgaaccttttatctgtcgctgtctgcttaggaacagaagaaaaggcagctgattgcttgactcagctttcagcttgatttttttcctttggcagagtgaattggggtcccaggtgttcattttccttttgtagtacctttcctcagcatgcaattaatacaaaaagaacaataaaccttaacaaagtttggcttgtatt

SEQ ID NO: 587 - DNA, 2271 bp, Homo sapiens
gcttcatgaatgcacacagtcacgtcgcagaagtgcccacccagcttctgcccattgagggtctcaagcagagagcgtgagaagttctgcagatgtatgtggcgcacagcctctacagccgccgactccgactcctcttcaggcaccaggcctggccgtggccgccttctcaccgactccaaggcagcacttccgggcgcttctctttatttttatacagttttattgagatataatttacatgctatccagcccatctatttcaagtgtaccatgcaaggggtttgtatatattcacagagttgtgtatccatcaccatcgttttagaacattcatcactccagaagaaactacgtacccatcagcagccactgcccatttccctgatctgccccgccctaggaaatccgtaatcactttcagtctatggatttgcctattctagaccattcatataaatgaagtcacacaacactgggtcttatgtgactggcttctatcaaagtttgcaaggttcatttatgttcatgggctgaccccacattggacaccgctgcatccatgtccatcacacaacacagctgccgtttcttctgcctgcttatgggaaagtcccctcttctcctccgttttcttctcttcctgccctatcacaccgtgcacttctccctttccttaaagaaccaccatcaactttaggaggagggaaaggggtggctctggcaggaaaagccagaatcccctctagccagcagagagagagaggaatggctgcatgttttctcccccagtccaaggcactgggtcttggctgggttgaaggttccaagctgctctcctgctgtgtcggtgagttctggtcaacctgcaacctcctgatatggccattgcagttcatcgagtcttcagggactccccatggcctggagtactttgccttgcttacacgggagaggagaatggatttatagagaacatcatctaaatccaacttgaccattgtgtggccacacttgctagattgctatagtctaaatctagcattgtagaaagacgggggagcttggagctgcacaaacccaggtctggaactggctccttaccttggaaggtgaatgatcctgccaggactcttagcctccctgggtctcaatttctttatctgtttcatgggaatgaggatctctgctgggtggttgggtgatgtgggggctgtgtgaaaacagcttgtcaatacaagccaaaatagaaatatttctccacagagtatgaaggtcaaatgagagaatacatttaaattaaatggaaaattaaaatggtaaaaaatgcaaagctgtattgaaagttccgagcttctctataaggagctttttgactatggaagaatcctgtactcgttccccctaaatataaaaaaaaagttgaaggaggcagaagggagagtgatgcacgatgggcaaggacttcacctgctgttgctggctttgaggatggaggaaggaggccacaaacctagaagctggagcccctagaagctagaaaaggcagggacccgattctttccttgagcctccagaagggacacagccccgccagcaccttgactttagcctggtgagatcctcttaggacttttggcaatcagaactataagacagaaatggaagccactgagtctgtagctgtttgttgcagcagcaatagaaaactaatgcagggcccaagaaatcactggtgatgagatcgggaaagtgggctcaggaggtctggatctgtgatgagatggggaaagtgggctcaagaggtctggatctgtggtgagatgggggaagtgggctcaggaggtctggatctgtgatgagatggggaaagtgggctcaggaggtctggatctgtgatgagatggggaaagtgggctcaggaggtctggatctgtgatgagatgggggaagtgggctcaggaggtctggatctgtgatgagatgggggaagtgggctcaggaggtctggatctgtgatgagatgggggaagtgggctcaggaggtctggatctgtgatgagatggggaaagtgggctcaggaggtctggatctgtgatgagatcgggaaagtgggctcaagaggtctggatctgtggtgagatgggggaagtgggctcaggaggtctggatctgtgatgagatggggaaagtgggctcaggaggtctggatctgtgatgagatgggggaagtgggctcaggaggtctggatctggggtggggatctgga

SEQ ID NO: 588 - DNA, 631 bp, Homo sapiens
gcaggaaagaaaaaagaagaaaacaaacctccatacgagaatgggtctaaaggaacttcccaaacctccatgattttgcaggaaacaagataaagagctacaggcaggaggatcacttgaggccaggagttagagaacagtccgggcaacacagtgagacaccccccactacaaaaaacaagaagacccctctttttacccctaactgagaggcgtgactagaaggcagaaagctggctgttgaggtgggagtctctctcttcaggcagaggtagggccgcttcctggggcagaggcgtgggtggtgtgtctggctctgcagttcctgatgaagacatactggggtgcccaggctaacctttggcaaaactaggagctgaactcaggagtccctgatgccagcctttctgatgcggtcccccctcccctcccccatgtgtctcgctccatagctccaggccaggagccccaactggctggtggaggatgtcttgctcctcagcagctgggatttgtaagtatttgtaggaacatggaacagatcagtggctgacaggcccaggaagcagacagtccccttcccataggtcaccagcttcacttccccttcctgcaccccatcctgatttga

SEQ ID NO: 589 - DNA, 464 bp, Homo sapiens
ctgggatccgacacagcctgcaccagctccgagagtctttccacattctgctgtctcagggcaaagccctctcaatttctcaccaggcttggagtcccattctgcccttccgcggatctgctgtcatgtgacggatcacatgagctctatattccaccaccactacccctctgcctagtaactagtgacggtactggctcctcccttgcatgggtggtcccaaatgctaggcaagggtggggccgccacccggattctcccctctggccagtcaagcactgagtaagcccagggctccccacctgcgtcctgagcctggtcccctgggaatcaccacaagtgagtgggctgtagagacccacagactggggttcttcctagctgtatgacatcagcaaaataacctctcagagcctaggtttctgcatttacaatatggagacttatataaaagtgatctgcct

SEQ ID NO: 590 - DNA, 1140 bp, Homo sapiens
ggaaatggtgctctgcatcactggaggaagcaagtgtgaaacctcagtccaccccatcactcaatcaggagaattcccattggacagctggcttgcatgtggaccctctggaatgaaaaggaagaaagagcctctcactcatgtttcccgctgtgcccacctgcagtgcattgctttaggactggacagatgaaatcagcatcttcccaaacttctctgctggaagactgtctggaatatctccccttggccctctgggggatgctgcccactccacagggctccctgaagctctgtctgattataaagcttctccctaatgggcaagatctcacacatgatagagccataaaatgtggcactcctggctggccctgctgcttgtctgataagggagatggagggactcgccagcacaggcagagggccctgggtcttaccccgcccctgtgcctcctcccgactccagctggtctcggcttccagcatgttggaaggcctgttctgcagaacccaaagcccgtgttttgcaatgatgaggattccatgttcaagaaaggctgggaaatctctcccctcctagggattcaaaacacccatgagcacagtcatggctgtgaggaggcttccactaaagaaaacctgctcgcatttccccgggacacattgctgaagcttgtcacggtggtgagagagacctgtggtctcctaggaggcgtggagcagccttcccacactctctgcacatacacatcctcgggggatctggtccaggggcagattctgacaccccaggcctcagctgaggctccagacgctgtgtctctcacaagccctcggaggacagtgatgctgcaggtccacaggccacagggatccagagtggctgctgaggagaagacagagcataaagaggttaaaccatgcctatggtcacccctatcggtgaagctgagatttgaagtggcgtttggaccccagagctgagctgattatcaccatgacattcaaccttccagaatcctgcagaccctcaatagggtgccctgccctcctgtccatgcctgggccttccaggactagcagagtggtgtaggacattcagggatgggccagggcatccttgtacgtggcccctcc

SEQ ID NO: 591 - DNA, 802 bp, Homo sapiens
gaggtcaggtccgcctcatcagctatgaagtctgtgaatcctgggagaatcaggaagtcgtcgtaggtgaggcagtcggcgctggcaaagagctgctgcgcggggagccagttatcgggcacatagtcggtgccgcccctgatcagccatgtgaagaccatgattgctttcccttcagccttccacctttgtaagtttcctgaggcctccccagaagcagaatcctgcatagtctgcagaactgattttagaatgccaagctgacattttgagtttttatgagaaaccagaaaatttggtgtgaagaccctaagtggtgtgtctgacttacagcaggcccacactgctgatttatggtgtaccagtggaagacaggagagacaaaacctgacaaccagaaaagaaaaaaaaataaattgaagaatctttctaattttctgctcagcagtggctaatgttgttgtcctcttgttgttgattacttccatccactcaatttggctgatctccagggggcctacccttctgtccactaaaacctggcagcctgttttttgttttgttttatctttaactgatgtgctttcattttgttttattctattttgattgtttttcattttgggtgagtttacagcacactaataccaaagaaaatgaataaagaaaacattagaataaaactatgttggaggagaaggggaacaacaaactctacaggaattctgatagctttctatttcctttttttgaagtttactttttgcaagtagtattctcaattgtaaatccacaaaatatt

SEQ ID NO: 592 - DNA, 780 bp, Homo sapiens
cagagagcggggttagggcttcattgccttgtgtcctctgctccgggagacttcggtgattctgccactccctccgtcgctctgtgacctgctggcattgaatgatttatagctaagactccaggacacccctgaagccgagaaatgaaatcccaagttgaccgtcaagtccaacgctcgctgcagacatctagtggacccggcgctcgcggacggaagcggacagacctagttggatccttatcccaccaatctggcccacctttgctgccatctaactccgctgaccggcccaccgttcctccactgttcgctggttgacccgggcagcggagagaggaggcggcaccaacagaaggcttctgcaaagctgagagctccttttacccatggatcaggagcagagtttgcagctacactgtcaggctgtgtttggatgttagcagttagtttagctttgcgtcttcagagcaattgttcttagctacttaaaaaaagaaaagaaaagaaaggaaaatttaaaattttcttcattgatcattcaggagcatgtttaatttccatgtatttgtacaatttcaaaagttcaccttgttgttgacttctagttttattccattgtggtcaggaaagatactcgatataatttcaattattttaaatttgttgagacttgttttgtggcctaacatatggtctattctggagaatgtttcttgtgctgatgaaagaatgtgttttttgcatctgttggatgaaatgttctgtaaatgtctcttt

SEQ ID NO: 593 - DNA, 321 bp, Homo sapiens
aatgatgccagatgtcctgtatcttgcacggttgttccacatgacagaactatctggctggcaattctactagactttgctagtctgtttatgctttcctactctccaaagaatgagactacatacactaaaaaaccaaaaagcctaaaaaaagagatgatattttaatttcaaaagcttaataatttgctgaacagaagacttttgagagtcagcagaaatcttccactttgcatggttctcttgatgtgaaatcatctatatagccccagaattggaaaagaaaaaaaataaaaaaatggaaggaaactggattcgaca

SEQ ID NO: 594 - DNA, 333 bp, Homo sapiens
ggcggagggaagctcatcagtggggccacgagctgagtgcgtcctgtcactccactcccatgtcccttgggaaggtctgagactagggccagaggcggccctaacagggctctccctgagcttcggggaggtgagttcccagagaacggggctccgcgcgaggtcagactgggcaggagatgccgtggaccccgcccttcggggaggggcccggcggatgcctcctttgccggagcttggaacagactcacggccagcgaagtgagttcaatggctgaggtgaggtaccccgcaggggacctcataacccaattcagactactctcctccgcc

SEQ ID NO: 595 - DNA, 509 bp, Homo sapiens
agggtttgctggcgtctcggttaatagcagtaacggcagccgcttgtgttcttgattctttgccaagcattcttgttatttaacacgggaaggaggtgacttcgcctgtgatggacttccagtgtgagcactggccagagtgaccaggctgaccagcaccagccctgatccagatgcagaggccaggatgtgggcccagccctgtgccaggaggctggctggaataaagggatgggcaggctggcatgggggcagccgctgcccctgcctgggtgttgctgtgtattcctgccggccaggggccactgccaggaccacgcctcccttttcatatcccgattcttaagttctgctattgtggtattctggtggagaaaaaagaaccgcgtggctgtttttgaactgcctggaacctaagaccctgaattcttttcccccccaaggggaaaatctatatggaaaacatttattttaaaatacaggatgaagtgaattaaaagatttaaatg

SEQ ID NO: 596 - DNA, 3054 bp, Homo sapiens
atcacatgaccgactttagttacttaatcaccagctgctccagaggtcaaaatgatacagcatggcccaaggtccccaccataaatcacattattagcacaaactatctggcctggtatggcccaaggcctgaggtatacaaagacacccctacttgggaggatattccaaggacttagaggttatctcccaggagcccattaaggccagttttttctttgagatgtgctgggtttggacacttcaagcctgctgagttaacccttatagcacagtccccaaatgctgagggaccaactgggcctacaataagtttgtatctttaagggttaaggtgttttacccatacctccttgccttatatctcatgataatatgaggcttttggaaggcagtgacttattgtggcttggggcatgggtttttggagtcaggctgacctactggctgtatggcttgagactttgtctcttcatctgtaaaatggggaagttaaaacttcatggtgtgtatgtgtgtatgtgtgtgtttagacagaatctcgctctgtcactcaggctagagtacagtggcgtgatcatagctcactgcagcctcggtctcctagggtcaggtgatcctcccatcttagcctcctgagtagctgggcatgtgccaccacacctggctactttttaaatttttttttttctgtagagacgaggtctttctatgctgttcaggctgaacttcatgggtttattggggatggctaatggatgacattggcggtggtccttgataccagataagccctcagtgtgaagcagctcttatttttccttgtcttgagattgctctggaatggaaattaggcttttttgaaggtgtgaccctttttgttcatttcttcagcagttactttttattttttaaatgtttgacacacagtctctgataaatgatcattcaccaatcaccgattactctccttgctctgttaagtgtgacactgtccctttgagaatctggcgacagctatgtatcccatcaccacacaccccaaaaaaaaaatttatgtctggttccaggagttaccttttatgagaagtccatctgtgaagaccctggatgttcagagaacttcctgggaaaacactgaaagaaaataaagaggccgggcccggtggctcatgcttgtaatcccagcactttgggaggctgaggtgggcagataagctgaggtcaggagttccagaccagcctggccaacgtggcgaaaccccatctactaaaaatacaaaaattagctgggcgtcgtggcgcatgcctgtagttgcagctacttgggaggctgaggcaggagaattgcttgaacccaggaggcagaggttgcagtgaaccaagatcatgctagtacactccagcctgggcaacagagtgagactccatctcaaaaataaaataaataaaacaaaataaaataaatacaatttctgtttctagcccctaagtggtagcactgggtcttgttccctgaaaaaaactaggctcagaatccactctcatttcatctcccctgatttgatctgaaaagattttgtttagagtactacatgaatatattataaaacatgggacaatcagaattgatagtaagaaggcaagtggctctatttgtacttcctctcaatagctcctaaaggtaatgctaccattttctgtttgtacatagtcttccagactttaaatttttgaacatataaatattatcatcttaaagacgtatggaaaaaaccattttgaataggttattccaaaatgtaatttaacagattgctctggaggattgtttgtttgtttgttttggagacagagtcccgcttggttgctcaggctgcagtgcagtggcacaaacacagctcactgcaacctctaactcctgcaaacacagctcactgcaacctctaactcctgcaaacacagctcactgcaacctctaactcctgcaaacacagctcactgcaacctctaactcctgcaaacacagctcactgcaacctctaactcctgggctcaagcagtcctttcacctcagcctcctgagtagctggaccatgacacctacctaactttttattttttgtaaagaggggaatcactatgttgcccaggctggtctcaaactcctgggctcaagcaatccttcctcagcctctcaaagagttgggtttacaggcgtgagccaccgcacctggctcctggagcatttctgatgtgaacatgtgctgatctaacaccactccttttaccagctgcctgttctagagcaaaccatcttttttgagcattccactttggctaggcccttaggctgttagcagttttcatcgctactggcaaagctgcagtggacgttctcctgcacatataacctcttgatgccactgtatgagtgagtctctgcaaaatgagaagtagaattgctggggtgaaaggcatacatactaacttttttgattaattccacccatgtaccctgatttgggcagaattttaatctcactgtgaaatcagagctttgttctagagcctttcttgggggttccatggatcagtgggtcagccgtcacttgtgccctggcccatcctctgtccagcttgggcagcatgcatcattcattctgattccttaatttgccatatgtgaaaacatggtaatctatacattacttgggtgctattattatatataactagctttggagtcagaattagcgtctcatcctggctctaccactttccaactgtgcgactgtggccaagtgactccccttctctgagcctcagttttcctcttctgtaaaatgggggtaaagggataagaactatagggggatctcaggggatggttaagagaaatccatgagataagcaaacacattatctagtttagtaaagctaagcaatgaagacttaacagccccatggtgaaggcttaatacatggtagctataatgattactattaatattgtgaaataaaaggttgtgatgaaccaaccatatcttctca

SEQ ID NO: 597 - DNA, 841 bp, Homo sapiens
cttaccgctatcaacgtattttctggtgttttcacagtgctgcgcttcctaatccccattccatggcaatccacatgccatgatgcccggagtcattaacaaaggagacacacaggggctcctcacgttggctttccagggttttgatgaaaatctgtttcctcgtctcatacaatgtggctgtacaggaagcatggtgatggcatctgcatggcgcctgtggaggccccagggagcttttactcatgatggaaggcacagagggagtaggcacatcacatggtccgaggaggagcaagagaaaatgggagtggggctctttgtcctgggaagagtttgctgcatcttccagtttcagtaatcaaagaagcaaagttccctgcagttcttcaaggaaccttgagaattcagaaggtcttggggtggctgcatccatcctgcagacaaatgccaatcagcagaggggccattcccagggacacatgtctggctgacttgggccttggccaggtaagacacacagcatgcatgcctgcatttctgaatgccatagacctgacaagtcataaaatagcaaccaataattttatgttagagtgctcccttcctcacagaaatctcagcatatgtgaagataggttggaatgtgtaaagaaaagctaagaaagcagatttctgataagaacagcgtgtgacttgtacagcagctctgaattacagcccgtaggatggaatgctgacagttccttcttccttacctgtgatggctagaattttatttagcacatcgtttttgagccaatctcaaaatgagaaaacttttgaggaattatgcatagtg

SEQ ID NO: 598 - DNA, 2977 bp, Homo sapiens
tggtacccgaggccgggccggagccgcaggccagccgcgattccttcgggcgatgctgggggctttccggtcggggccgcagccgcttccggagccgcgggcgaggtgcaagcggtcttctctgtcttctttatggccagtaaaattctccagaagagatttatggcagcctcactcccagtagtttctgcatttagtgagataagccacagcaattgtctgctattttaaaagcactgtgatgcttaaatattccagctgctacatcggacaggtgtctgatgatcctgagaacagtcatcaaaaagtagaacttgagcctggaatacattctctggcatagccatagtcaatcaccagtataattaatgtaaatggacactggatagcttttttgtgaattctgatgcagcacaaagagactttaattgtttccaaaaagaaaatgtctgagattaaaatctagagttttatgacttagaggaaattttatagctttactccaaaaagggtaaggcacaaaatattctgtgccaaaggatgcatatttggtatttttcctatgaatcccttagtgtaagtggcatgatgaaattttcttggtttcaacacagatgatgtgttgaggtagtgttgaggctgagaggtgggtgggatgggtcttggagaaggaaaagatttgttttgcaaggtttgtggagagctgatgcggtagtgaggctaagacgaggggtatttacttgctacttacattgagtccactaacatctgcagcactttgcttgcattatccacgcaattatcacgggaaacctataaaataagtattcctctcctcattttacaaatagggaagcagataagatttagaaaatttcccaaactcacacaattattaaatgacagaactaggactcaaacccaggttttattaattttagagacatgtttttaaccacttggacactgccaaccatggaattgttggtatgaaaaaaacgtactcttgagttatattatccatggtcttaatatcagagaagtgcagttgagtcgctattaaagaatatggtaaaattataaaatggatactatacaaaggtataaaaatattataaatacttatgtttggggtaaaaggatcaaagtagccatgctcagtggaagggtaaggaactcttagcagagattgattaattgggagataattgattaattgggagttgattgattaattgggatttattaatttgggagtaggtaggaagataggaagttgtataaaataagggagagataacttagtacctggaaaaaaagaaatggaaataggtagaagctaagagttcaattaaaaaaaaggaataaaagatattggaagggaacgatgaatgtagcatggaagatccaagatgatgggagttcaggggctaattacagctatggggaaaaagtaatgtataagctggaagccagagataagagccatgtaaatgaagaagttgggccccaataggaaagaattataaggactagaaggagcaggagccatgtggaaaaatatcatgtagtacttttaagcttgatctgtcatctgtagcaaaaccagcatgcttgagtactgaattgacctgactgaactatgttgaaatgtactgtggttttatatccatatgcacttggtctgtggagttgtgggaaaagcatcagtgagtaggaagcccaaggatttgggtcaagtattaaatatgctatttactgtctagctatgtgaccttatataagtcacttgtggtctctgagccttcatgtattcatccataagatgagttgttgtttatattaaatgggatgtggtatgttaaagagctgaatgcatagtgatacagaattactttctgtaatactattttttaaatattttaaatgaaaaattaatgaacttataaattaaaagattcaaaagggataaaaaggtatacaatgaaaagcaattctccttcccaccagtaactctgtcctactccttaggacattcaccataaacagatatcctgaattcttctagaaatattatatataaaatcttatatttcttatgtttcttttttactattttaaaggggataaactaaactttgctttttttcatataataatatattctggagatcattttctaaaagcacatgtaaacatacctcattattataaaggtttgaaaatatcaatttatttgacctgtcccctctcgatagataattagattgtatccatccctttggttattaccaacagacactaatcacttatcatgtacatatagcctgttttttagcattgttagacaaagtaggcatattcctttccatccaagaactcataacctagtaattgtagttggctgatagctcattgcccatacacaaggatctaacacaacctcttgaataaacatcccccttattcagaaatgccttttcctatttccatattgcaactttgcttacaaatttccaatctgtctttctgtttacagaagatatacaaaattccttttgtatgatctctttatatctcttgattttcttttgtgtttgctaccaaagggcctgcacatagtgagaagattgtgcatgatctgtgagctctaccacacctggaattagggatcaccaatatgagaaaaaaaattggaggtacaaataacattatcatatgtaattggcatataaattacagatgtatctatgactaaaaaccctgtggatataaaccaaatgcagataaatataataaaatatataaaaatataatcaaataatgatagtgctattcaaatacttcaaatttgcacagtgatttatttcttaaaatatgttaacacatgtgagccaatacactgaggtcactggataaataaacagattcttgcaagtgctttggaaatgaaacttttttttatcattttaatttt

SEQ ID NO: 599 - DNA, 693 bp, Homo sapiens
aaattatacagccatgtttatgaagtctacatttcccttgtcttggatatatatatatatggagatatatatacaattcaagcagttttaattaagggtaatcattgggtttttctgaaaccggaaaagtcacgagtctctctcttttttcactttcacatctccagcaaggatggttgcaatttccccttgcataaaggcccaggggacattggagcccacaagagggcatttttccccactgggacaatagacctctccactagctccctgctgtttgatgctttgtctggagcaagggaagcagaacttgtgcgaagggacggacgggcactgcacaaaatgggtgtcctccagccgctcgtggcagagggtgcagcacagcggggcactggttgccagagaggagtccgggaggctggcagggtgcactggctccagtcctcctgtgttgcctgctccctggccccccacctctctggggcccagccttctttggttcatagaggacggagagggcggactgttgctattcctcctggtagtggagtgaacctggttggcatcttttgaggcatgactgccccctgcattgtctgctactaagatcagggctgccatgggggactgggcatgcggggcaggtcacacaggtagcacgactgccgccgggacgcggccgccaccgccacc

SEQ ID NO: 600 - DNA, 262 bp, Homo sapiens
ttgatcccacccccatggcgcccagcaaggttttgagcaccttttggattaatgccagaagaaatccttcaaaagtcaaagctccattccactctctggcttctgtggaggaagggctgaactgtgcctagttattttgaggtttgggacaaaccaaagaattgagcatagtggtgaatcgttttgaaatgagagacctagccaaggatatgttcacttagtaagaggtcacatcttctgcaaaataaaaaaatcaatcaaa

SEQ ID NO: 601 - DNA, 425 bp, Homo sapiens
attttgcccagctttctgtctggggcgcacggagcaatcggaagaggggaccgagcgcccaccccaggactccctcggccagtaccctccctgggaccttgcccaagttcaaagcggaggccagtgagcaggcggcaagggggcggcaagggggcgcccgggccatcccgaacccgttccccgccttctgcgccatcgccctccgggaccgggactcgccccggttgccctcgccccctgggccggcctcccgtgatgaaaatacgagttctccgatcgcgttggaccggagcgggccacgtccgagctgcttgcagagggaaaccatcggaaataatgaatagccgctccatgcaaattattcagacagtttagcgtcggtagccgcgagaaatatataaagaacacgagtcaaatgacattaa

SEQ ID NO: 602 - DNA, 390 bp, Homo sapiens
cagatatttttgaaaagagcattcagatgtaaaatgctgtattgaccctggagcgtgacattaatagagtgagaaacatgttgttgggcagattcagtaaatatcttagagtttctctcatgtgcaccatctgtggacctgcatcggaatcatctggagtggtcatttcaagtgcagcttcctgggacccagaagcagactatgggggtggggcccaggaccctgcattctgacaaacccctcactcccacccaaggtgattcttaggaacactaaagttgggaaccagtgtggagaaaataatgctaggtgcattctaggatctaaagggtaaaacattacacttgggtaaagaggttttgtgtacttattataaaacaactgtagcct

SEQ ID NO: 603 - DNA, 1282 bp, Homo sapiens
gagggcgtcaccagcgtgtcggcgcctgcggttttcttcgggctgtccccaggcgtcgtgcccgcgtccgtcacgcgcggtggcttgcaggggcgcaccgcgacagccttaaaggaaaacctgttagggacaagggctgctgtgggcagcgagggttatagactcatgtgtgttctgaattctggtgggggtagtgatggacgctgacccagttcacagaattatctgactggcgaagtaaaggtacttgaattgcaggaaaaaaggtcaaggtgaactgaagaaaataagtctttccccaaaggaggtagaagatggggaagatgagatgtcagaagctaaggacaatggcagtagagatgaggttcttgtccctcataagaattgcaggaagaataccactgtcccgggaaagaaaggggaggaaaagtctctggctcctgtgtttgctgagaagttaatatcaccaagcaggaggggagccaagctcaaggaccgtgagagccaccaggagaatgaagacaggaacagtgagttggaccaggatgaggaagataaagaatccttctgtagggggttcccgatgagtggctgtgagttagagacaagctgctgtgtgtgccattctacagcacttggggagaggttctgttaaaaatccatccctctgaaaactgccttggcaattcccggctgattcttcgggatgggcctcattgatggggagtctcagtggatgtttgacttttgctttctacctgaccctagtcagagattttttctttttccttttttttttttttttttttctgagacagagtcttgctctgtcacccaggttggagtgcattggtgtggtcttggctcactgcagcctctgcctcctgagtagctgggactacaggcgcacaccaccacactggctaatttttgtatttttagtagagatggggtttcgccatgttggccaggccatcttgaactcctgacctgaagtgaccttcccaccttggccccccaaagtgctgggattacaggcatgagccaccatgcctagcccagaaattttctctttgaatactatacattgatgagttctgtctttatgcttatgatccacgcaggtaggtcgtctcagatttaattttcagtggtttttttctgtcttgatggagtctgtgtaacatttaaaatattgctaccaaagcagtaattcttactatagttattaaaatgcaagaacaatatatttaaaattatttcataataaagttaaaatgag

SEQ ID NO: 604 - DNA, 634 bp, Homo sapiens
cgggagctgttgggggctccttccctcgcagcagtgaccactccaaggaccacggcctggacatgagcggcagcggtgagctgggagctgctggcctggagtctagatgaatataggcagcagccaaaggccacagtcacgacaaacctacacactctcaccactgtcatctcatattgtcctaaaatttccagccagtgcaaaaaaacatgaaaaagaaaaaatacagccattggaaaagaggaaaagtaattgttattagctgatgatgtgaatgtcttcctgaaaaccttaagagaaccaactggaaaacaaccagaaatgagagcatggagttaggcaaccgccgatctgctttctgtcacttgggcgagtttttcccgtcctgggatttcatatctctggaatcctgcagtacgtagccctctgtctggcttcctcgctccgtgtaatgttcttgagattcatccatgcagctgtgtatacctgcagtgattgtttctcttgttgaattgctgagaagggttccatcgtatgccttttccagtttatttgttcatctgttgttagacatttgagttatttccagcttgggactcttatgaacaaaactgctataaacatgcatattcaa

SEQ ID NO: 605 - DNA, 4769 bp, Homo sapiens
agctttcttcccgccaggccccctccacccgatcgccgcgcgctctccgaaccaaaaggcgacctcacgaaatgcccctttgagctcaaaggctagttacccccaggggcccttccactctcggggacaggcgaaacctctttgtctctgcctcggcctgcggcccccagcccagcctccgcgctttccctccgccagtccttgtcaatcaaacctggtgccaaacgcggcagctgaagttttcagggacacatttgcttctccccttgaagaaccagttacaaagcgtgatgtcctctctggggtcccatcagaacaaagaaacaggtctaaagaccctcattccagagagcatcctgccccatatccagaatgaaatccatgctcagagatgccaagaagaatctagacagacaggcctttctaggctgtacaagaagcatgatgccagcatctgcttctggtgacaacctcaagaagtttacaattggccgcgtgcggtggctcatgcctgtaatgccagcacttcgggaggcggagacagatggatcatttgaggtcaggagttcgagaccaggctggccaacatggtgaaaccccatctctactaaaaatacaaaaattagctgggcatggtggcatgtgtctggaatccctgctactcaggaggctgaggcaagaggatcacttggaacttgggaggcagaggttgctgtgagctgagatcacaccactgtactccagcctgggcaacagagtgatactctatctcaaaaaaaaaagaaagaaagaaagaaaagaaaaagaagcttacaatcatggtggaaggcgaagaggaggagcaggcatatcacatggccaaaaagggagcaagagaaaggtgagaaagacactagactctttttaaaaccagctctcacatgagctaatggaataagaactcactcattaccacaaggacagaacccagccattcatgagggacctgccaccatgacccaaaaacctcctacttgacccaacctccaacactggggataacatttcaacatgagatttgaagaggacaaatactcaaactatatcacttgttgtccatttttaatctttctctaacataccctaacttcttcttgaaaatgcttaattttctctgttttgagatgtaaatttgctatcctgtttttcttaaaacttggtaagatcttcagccatgaaggacagacaaactgtaacctttccatttacaaagctgcatttgaattcaactgtccttttaaactaaggagttttactggtctcgtggctaaaattttaaagatgtaggccaggtgcagtggctcatgcctgtaatcctatcacttttggagaccaaggcggggatggatcacctgaggtcaggagttcaagaccagcctggccaacatgatgaaactccatctctactaaaaatacaaaaattagtcaggcatggtggcacacacctgtaatcccagctactcgggaggctgaggcaagagaatggcttgaacccgggcgacggaagttgcagtgaggcgagattgcaccattgcactccagcctgggcaataagagtgaaactctgtctcaaaaaaagaaaaaatgatataaagtatttatttgtgtttatattttatggatacgtgtctatgtttatagattgcctgtatggtaccaacttgacataaataaattagtactcataaattaagtaaataagcccaaacgcttttcaagttcacagggcattagtaatctgtggtaaatgaagatagtttaaaatttggggtaaaataaaatagaaacattttctgaatttaatttagatatttttctgggtctatttgttagacaggtttacactatctctgctatttttttaaggacctaaaactgaatggacatagaaaattgaggaaagaaataaaaccgtaacaattataagaggttataaaaggttcatggaacctttttatgttttttcttgtgcagtcaaaaccaattgcaggctggatgcagtagctcacacttgtaatcccagcactttgggaggctgagatgggcagatcacttgagctcaggagtttgagaccatcctgggcaacatagtgaaactctctcactaccaaagtacaaaaggaattagctgggcatgatggtacacacttgtagtcccagctacttgggggactgagatgggaaaattgcttgagcccgggagtcaaaggttgcagtaagccaagattgcaccactacactccagcctgggtgacaaagtgagaccctgtctcaaaaaaaaacaaaaaaaggaaaagaaaacaattgcaattggattgatctgtttataaggctttattaaaattagctttagcatttataatacactggcacaaagttagaatttggatttctcttttgaacaagatttttgtatacattaataagaaatagtaaaagatttttgtttaccttttgagtaaactgcaaaaaatattagtaataagaggagagaatttccctaatgctgtttttattatgtcttttgattgtttggaaaactgaatctcccctctgtcaaagagtaaaatttttgctttttgaaatttttgaattatcagtttggctaaatgaataactattatcttacagtgacctgtaatcttattttgatcaagtgttttaaacctttgatatttgacaaacttcccaaaatcaaatgtaaaattctaacttaaatgttttcgacctcaagctaacttttgggcattaaagcccttggaagtccaaatagggcccctggaagtccaaaagaaacatattaggctaatttggtatattaaaatcatacaggaagctgatcaaataaaaaatgttgtttaattttctttgagttgtatttgtataaatctgttattaatatgcatcccaaaattgtatcatattgctaaaatgttgatagatcttgttatatgttattggtaataattgttatcctgttaaattattgtataccacagaaataatgaaatttctttgtcaattgcatcagtaatcatggctcttctaagtcttttgtcattcacagatgattattgttttacttggattcttttcaaaagtggtttgtaattggctacagcctaaaatctgcttgttcaaaaaaaaaaaaaaaaaatccatggaaagggccctgacagcacacacacttaaacacagttttctgataactttggaattcacaccgttggactagttaaaaacttctaaaataattttttaaaatctaataaattaatgaagattgctaatccaacatcaagcagaataagttaattacatggggctgaactgataaaatgccaaaataatattttcataacctttttttggtttgagacattgctgatactttttatgttttgttttccagagtcaagaaaattgtttttttcttttgagctgtacatagcttacagtaattagataaattacacttttgtgagaacaattgaaacactaacctttctctctacctgatgtctccagaatttggaaagtatttgtgagtattcttcacttttggcaatatagttatttgtacaaattcgataggaatctgttttcttttgtaacagaacacagttggatacactgattattttgccaaggctttcattggaatggcataattttttaatgaccagactgctttgaggatttgaagttgactttatagagcctataaaaagcctgttggaaaaattagcctgataccttgtctacacagtttccttacaaggttcctgaccttgcggtagtaaagaatgtcactctctggcaggcccaggagcctcaggatattttgggaaccttgacaagagaggagtgtatccaatttatacaggaattacaagtgcagtctgattgtgaatccttgtcttggcttcttagccttgagagtttttaaaagttgaatgtgaaattccttatgaaaaagttccaacaaagccaaactttaaaagagcctatatgtggtcaatcactatttttgctgtactttatgcaaataatcaggccaaatataataaaactaaaacttattttgcaaataaattggtcctgttatgatttgcctttaatagaaaagggggactggagagagaagaattatgtttcagaagaaaatgatagcatacctgttgttagattctagctttgtccattgtttttaagttgtaattatttgcctacatttgaactaaatcttgaattctttcctggctacaagtctccaagctaacatttaaatttttttctcctatgtttctgacttggaataagtagaagttaaaactatgcttttcttgaagccctgcagactggagcaagacaacttgaataaactatgggaaaaatcactacagcaacttatatataaacagcttttatgctttgttgatgtatggaatactcagaaagttcactgcaacacctgatttaaactacaaccaggagactctgtcagattaacactacaatctgaagaactacagagactctcaaaaaactagtgtatagtctacagtagatattaacctttgtttttcttctgttttcatagaaacaccttttattaaaaatctgtttgccgcttcatatatagagtcctagtccatctgtaatgccaccccctggaatgagacatagctgtttaactgaactgatctattctcgggactaagagactg

SEQ ID NO: 606 - DNA, 584 bp, Homo sapiens
tattattgtattttacagatcattcattcaggacatgctgcatctggggttggcatcatttcccttttgaatgacagaatgtgcataaaagtctcttgcccacgctgaactcacacgtgcccggcaggaaggagctctcacgaagtgccagctggatgtgagcttgctctggcagcagcagtgctgtccttgtttctgagctgccacctattcactggagttagaaaccttgtgggaaaatggtgcctatttttgacaactggatgtcttcgtggccgaggtccctatgaccttcctctcaaaagaatacgtgtagttttagttctcagacatctgggtcttgctctgttgcccaggctagagtgcagtaatgtgatcatggctcactgaagcctcagcctccgcctcctgggctcaagtgagcctcctacctcagcctcccgagtaactgggaccacagcatgttcttttaaacttcctaaagaagcccatgataactgggaacacgggcccttcactgaggcaggagaatcacatgagccacacatgatatccactggaggagacagaaagtctgggagtgt

SEQ ID NO: 607 - DNA, 340 bp, Homo sapiens
aatttcttaaaatcttgttttctctcgttgtcttcggaagaagcccgacatttcttataggaaatggaactcttcataaggtcgccccgacccctcctccctgacctgggaagacgcgcgcagtccccgaccagaggacctcagacacaggtgaaaaccatccatttcttggagaagtgccacggtggggttgcaagtcccaggatcaagttttcgatgtgtctctttttcccgtaaagtggctgaaatctgaagctgaatctgcaagtgtcatggagtcattgaatctcacagtctcaactgataaaagttattaaaggtcgtctggttcagccttcta

SEQ ID NO: 608 - DNA, 720 bp, Homo sapiens
gcacagacagactcgacagaaaacatgcggaggcggcacagtgcagttgccaccaaaactgagctttagacaaacctaaactacagagtggtgcttggagagtcagaaaacttgggcagccaccaaggggaagccagggtccctggcgcagaagaggccagagaggccacatcttctgcacacctgaggcccgatggccctgcagaagggaggcaggttgggaagtgctagcgaagggccagcactgaccctggctctggggtgatccaaggacgcagctcagaactgcttagaagaggagccggagctgcctgaggaaatggaatggcagccacagaaacgatggaaaagcgtccttcgtataaattctggggcagatctgcacctgcaggacctccccagttgctatagatatttggaatagatcaagtgaaaaccgaacaagcagaacagatgcctcattttgcttacaaaactgctttgagaattgggacgtggctacaccccacgaagtacatccctctgaatttcacccacatcagaacccagagcccaggagatactcacatttggacggtttccaaaggcagcatagaagggctgcttagacggggcaaacagattcttgatatcatttagacactcaattttgaacttctctggtttcttttctatcacttctctaagaaaaaaatacaaatacaatcaccaatctcaaaa

SEQ ID NO: 609 - DNA, 509 bp, Homo sapiens
tctgtcaccagccaggaaggacatgaacctttctctccctcagggccatccattctagagggcagagagttggcctcatttctgagataacttaggggacagaagttcactaccctgagcccattgtgaggccatcctcacagccgtgactccttatatttctactgctgggttgggaccttggcttgtcaagactaagtagtcagcccccaccaccccaaaaacaaaaccaagcaaagaccacatacagattccatttataggaaatgtcccaaataggcaaatctataaagacagaaagtagatgagtggttgcctagggctgaggagactgaggatgactgctaaggggcataggggtttttttggggggaggtgtcaaaaatgttccaaaattgtaatagttgcacaattctgtaaatttactaaaaaacactgtataccttaaatgggtaaactgtatagttaagtgaactgtatctcaataaaacaaaaacaaaacccaaaaa

SEQ ID NO: 610 - DNA, 641 bp, Homo sapiens
aaatctgagacagccttggtctgagggagcaaagacagagaattcacgtgctgcccaggcatagccacatagcaggtggacatccctggacacttttctgacaaagcacgcaatgtggggacaacacagaaatccaagaaaggcaagaccaatttcaaggcactaaataagtggactgagacaagaagtacacagatacttcccagaacaaaaccctcattggattttcctggaagtacggagagttacatccagagaactctgaacattttggaaggaccccaatcctgcaaacaatgaatggcaataaatcctgggactggaaaggggcttctcaaccccaaggcaaccataaagtcctatacaaagaaagatacagcagtgtgaaagaggcctggatgaaaaaacaaagacagagccagtgagccagagccagagccagaggacaagagagaaaggcagagaatggaaaacacagacagagaaggcagatgcgtagagagacagagattcaatgagaaaataaggaaggaagaaagaaagaaaacaaaaacgttctcagcactacaacttctgccttgttctgttccagaacagtatgagctcagtactttttcagactctcaattttctacaactaa

SEQ ID NO: 611 - DNA, 410 bp, Homo sapiens
aggcccagacccacagagacaacgatgatggccacagctaagatgatccagaaattattcctccaccagctcattgcagtggaatcctgagaagaatggagagagaagaatgagcttcttgcatgactgcctgaaatccgcctcctgtcagatcagcaggggcattggattatgataggagtgagaacaccattgtggactgcgcatgccagggatctaggttccgcgctccttatgagaatctgatgcctgatgatctgtcactgtctcccatcacccccagatgggactgtctagttgaagaaaaacaagttcagggctcccactgatgctacgttacggtgagttgtataattatttcattataattacaatgtaatgataatagaaataaagggcacaataaatat

SEQ ID NO: 612 - DNA, 551 bp, Homo sapiens
cagtgccattttgtgggaacttagatccaatatatccctgttcacgggtcccacaatgcttagaatgatgcactgccctgaggagtttgacagacgtggcagaggagagaggcaggagggaggaggagaagagacacttaacaagtgtctgtgaggtggcgtttacatttagaattccctttcctttcaaaggaatctccaggatagccaaagagtccagcttaaaggtagccagccagaaaaagtgcccaaaccacgcagtgagatcacacctttgaagaccccaccttggcatagactctacggctttcacgaatgatgctgagctctcagcagcaccagaacctcaggctctgacacccacaaagctgcaggtctccagggctgcttgggccaaaaggacattggcactggatttagagcccaccagataatttgggatgatcttcttcatatcaagatccttcacatctgcaaagatcctttttccatataaggctccaaatcaccaaacttctttgcctctctgggaaaactaaatgacccaccac

SEQ ID NO: 613 - DNA, 572 bp, Homo sapiens
aggcaagccagtcccatccttcccagcaactgggactttccgggcagggctccccagcgcgggttcagctaattaaggaagcaattagcctcccctgaggctattcatgcttcctcacccacagttctcaggttctgtgagaccagagcctcagtctcccgtgagcagagggtgtgtgtgtggctgccactattctgcagacacgctggctccaccccagagagttgcagggccaggaaatctgcatttaaacagaccctggctctcacacttcggaaactgcccgaagcacctctcaaatatgggacaggtgcttaggccgaaaatcaggaatctcttgaatgaatgcatgaaggtggagccctttcccttaatgcgcaggtgaaaagggcacctcggtggattctactaaatttaatagaagacccaagacggggtgggggagacgtgctttgtgctcacctggctggttcatgggcaggtggcctggaggacccagccctggcagctgtggggtagctccagcctgggccggacagcttctttcatcgcaggcaccactgcggacattg

SEQ ID NO: 614 - DNA, 3398 bp, Homo sapiens
atctgagcattgataatgttctatctaaatttgtacagtgtgatttttttttttagaataaatattttataaaagggtttattgtcccttgtttatgttaaaatgcttgtttccatgaggggtttcttccctctcaatgtccctagccccttgggaaccagaggccccagagacagtgtgggctcctcagcgtagcctcttggtgacagcgtgcgctgcctgggcaggcacagtgctgctgtgatcacaggggaggccatgacttggcacctgggaagccagctcagagcatattcagtcaagttgatgaggaatggcggcccgacctcagcagcaggtcggcgtgcgggactctcagaatggcggcctgatctcagcagcgggtcggcatgccagactctcggagccctcagctatcttcatgtgtttcaggactgctgccatgtaacgtgtgtgtgtggagagtgtgcggagtgtacacgaagcatgcccggaggctcagcatgaagcactctgtacccagctctacctcctcattgtccttcatccagtgtgtaccttcagccaggcctgccctcgtgtgggaggggcagtccccaaggagcacacgccatgatgtcagaaacatcttcttcgaggaagatggccctttacaggccccaggggacgggggcagcacggagccctctctggacctctgccgcaggccacagaaccttctccagcccttgactctccttgcctttcatttaccctccattgttccaggctaccacggaatgatgattacagctgagtttacccaaatcccaccacagggtcaaatgaaagggccttgacaagatgtcccttggcagcttgagatcgcagttgtgttgctgggttatggcctgggtgcaggctggtttgcagtgggcggtactggcagctaccatcaaggtctctgtgctgggctccagccctcagcccagaggggtggttccccactttatagagagggggtttccagctcacagaaggtgagaagcttgtcccaggcctggagcagctgtggagaaactgggagggaagcccgtccagcctgattccaagcccacatgctgctcacaggtcaaggccgagggactgatttttgccggtctgactggactcaagttacttcccagttccttgcagagagctgtctttgtgagacagtgtcttgggttctggaatgatgggagccgtgctttgcaaatgaggagtgattgcgtgctcatctggcagctggtgggtgtcctgctggcatcaggcctgagcggtgaccgtgctcctctgattgtcctcactgcgtgtgacaaggcctgggccactgtgtgagtcgtcttgcgctccatgaagcctggtgtctgtgcagatgtgtgggtggcgttagggttgggggacatttgtctttcacactggagaatgggagtctggagctggtgctactggtgaggaagaggcccggcctgctgccaggttcgcccacaccttccccctggttgttgggaaaaccaaccttggaatggccaaggcaggagatagcacctccccggtgaagatccaggagctctcatgagctccacgtggaaagatcaaggatctggagtctggagcccttcaggcagcaactcagtgaccatgaacctcagctctgtccacccggcacagcattgctgggagctggacccgggaggctgccggctccagagtgaggagggtccagaccatgcagacaatatgccctttttctccaaacaccatttcaagcaaacccgcaggtctcctccacggctgtcagcagcttctcgtagagcttctcataggactcatatggtggaatgtcgatccggttaaagctgaaaaaggacaaaagagagtcaccgtgtgggcagtccagccctaggaccaacctcaaggccaaggacaggcaagacagggtctcgctaggttgcccaggctgctctcaaactcctggcctcaagtgaacctcctgccttgccctctcaacgtgctgggagccactgtgcccaatcaacacacagtaaaggggaagctcatttccagtatttgtgcaaagaaaaagacatcctttaagaagctatcgtagcaaaccaaaaaatacaaaattgtgacccagaggatgtacagtgacttctggctttctagggtgctgtggcttttgagttctgatgatgacaaaaatattttggcagagactccatctcaaaaaaaaacaacaaaaaaaaaacgtgaacgtcagcatcctctggggctcccaggacgccgtgacttcctggccgcggtgcttaccagcacacatctcagaaaaacatcccagccaccttccagctcttcctgcccacagcgcacatagacgcgtcatcgaatagccctgcctccacgtcagtcaccttgcaaagccttgaagccttggagcgggactcgcgtggacccagtcacaaactgcaggagcctggccctcctttcttcatcgaacgtctccaccgcttgccagaaccaccgcacgatgttgctgtcggccacacagtgcttcagccgcgtgttcgacttccagtcgttcaagtctattttatccaggccgcctatgatcagctgaggaggtgcagaaaggtgaattacttccaaaatgcataaacccacgtcaggatgcgcctcctaggtacccgacacacaacagtgaaaagtcgattcccaagcaaagcagcagctgtgtactaggcagatgttgagacaggaagaaagctacaaacaggaggcctgtggcacatgcttccgtccgcctcctccaaacgggtctccaaccccaaggaccgcggtgcacagctgttgatgggatgttattttataaccaaagcggggtttttgctctgcatcggtgaggagtatcaaagaaccaaccggtgacactgaacagagctaaccatgaataacggcacgtcccagggtctctccaggacactcaaggacatgtggagtttcaagtctgaagagaggagaattcagcaagagttaggtggggctggggccgatagggcatgtttccgcaattggcttaaaaagttcaacccctgctgggtgcagtggctcacgcctgtagtcccagcactttgtgggggccgaagttgggcagatcacttgagcccaggagttcaaggccagcctgggcaacatggcaaaaccccgtctctacaacaaatacaaaaattagccaggcatgatgacgtgcacctgtagcctcagctactcgggaggcggaggtgggaggatggcttcagcctgggaggtcgaggctgcagtgagccatgatcgcaccactgcactccagcctgagcaacagagcgagaccgtgtctc

SEQ ID NO: 615 - DNA, 1157 bp, Homo sapiens
aaacaggctccaaaagcttgttacttgcttgtagtcaaacagaaggcagagctgcgaatcaaatccaggtttgtctcgacatgccactagctcatacttcccttggatcagccactaaatggctttcactccagtgagcagcgaccagcaccagaattatggaacatttatcaacagcctaaaataaagacaacacgaggagaatttggttgcttatatagattcaaggtacaatcctgctggattctggaagaaatatcacagtgtgcatgcacagaagtacgaccatgtgaagaggtagcaagagagcagcaatctacaagccaaggaaagaggccacagaggaaaccaaccctgccagcatcttgatcttggacttccagcttccagaactaaccagggaccccactcccatgccgacagtatgggctgctgtcttcaggaccattgcaaggctgcaggaagacttagaggcatcatcctgccttggcttctggttgccaaggtgttctgcctgataccaactttgtcagcagtcaccaactagccatgcttttcccttgaaggcacatgtagattgcctaaccatccacaccaggcaaacaattcttcaaatgtcatgccctttgcacttctgttcagatccagccttagagaagcttgtgaagcaatgactgttttaattggtctcctgggtacccaggcctaatcctttaccaagtcactagttatcccatgttccttatctgtctgtctatccatctatccttccatcctcatccaatacttacagaatgcctatggctgcaaatacaaggatgactgcttggttcctgctgtccataaactcacagcctgggataagtgtccttcacggttcggttcacatttcacaagccccatgaagtctatctggattttcggtaatgtttcctgtctctgaaatcttatgacatttatgtctgtatcagccatttgatgcttgattatctatttttcagatggatgtcttgccttttcctctacacactacaggaagagtggccacccctgccaagggcctagtatagtaccctatacatgtagctgatcagttgattgttactgatcatatgtatcctgcatcatgttataaaaaattaacacagtgcttggca

SEQ ID NO: 616 - DNA, 537 bp, Homo sapiens
caggctggagtgcaatggcatgatctcagctcactgcaacctccgcctcctgggctcaagtgattctcctgcctcagcctccctagtagctgagattacagcaatgaatgaaggttcctgttgctccacattctcaccagcacttggtttcatcagtgttctgacttcagccattctaacaggtttgaactgcatggactgcttatatgtgaattttcttccacttctgccacccctggaacagcaagaccaacccatccttttcctcctcttcttcagcatactcaaggtgaagacaacaaaggatgaagatctttatgatgatctacttccatttaataaatagtactatattgtacattccactgtaaatgagcaaacattacactggcagcagggaccagcatcctttatcaagaggcagttgtagctcaagagttgcatcttggtagcatcaatacagaatttaaggattacagaagatatctcaaaagttctctatacttggaagaaaaataaagaacgatttgcacttca

SEQ ID NO: 617 - DNA, 573 bp, Homo sapiens
gtttttctttactagcaattagggaaacatagagtggctgctttctctactaacagcctcataatggagccatctaaatctcttactgattcctctaacctccagggagccacacctttacccagtcctcctagatcctgggggaatcagaggaccttgtgtaagcactatgtgaggaaacaagaaaacctagggccacaacaactggattctcttttctgatttttgctgcagcttctgctttgtaatcatacggacagttgtgcttgtcagagttaacggtgaagtccacaaaacaaatttccacatcggcagtcaaacctgtaagaccaactttctttctgcacatgaaacatctgtttttctttggtttgggcaattcaggagctttttctttactctgagaagtactgggctgaaaaactgatgggctgggctgagtgacaactggctctcacacctctgttttcggggtagttattttgtcctctgttgaaatgctcatttctgtcatttgctgagttacaggcaaggcagccgcaggcacatttcttgatttttcagatgtgctgc

SEQ ID NO: 618 - DNA, 5984 bp, Homo sapiens
ggtgcagaggatttgaacagaatgagagtcctcctctgtgcagggagaaaggcttcagtgggtctccccctccctgctagggatcctccttgccagccctgggctgggcgctggcaggcccgttcccaggtctcccgccgagggcaggagaggagccaggcctcaggagagaagtgcttactgagtaatttaccaagagcgataggcttcccactgagccagacgggatccccaggaggggagtcagaggcgggcctggcatgcatgcacagagagagtgtgcccacttggggagtgtgaagggccttgctgtgggacccgagaggatgagcagagtcaagtggcaggtgggacacacagtctgcagtcacttcttaaaaggccctgggtggtgtgtccttcaatgatgaccattgtccacaatagtgagttccagagggtcgattgggacagttggatagccaaggaccagagtcaggaggcaaggctgatgagcaagaggctgttgccattggccaggcgaggcgtgagggaggctgatggagcgcagcagcagagggatggagaggcaggaatggcatctcctcacaggccaggctcctctgccggattgggtagggacgggaagatgatggcccccaaccctgggccaaggaacaatagcacccatccgggggcgggggacctgctggagtacttctcctggaccactgctcagtgggcaatagagggaacaatggtgtttctgaccaggacgggggaaggcaggggaatggaggaagatactgacagggtacagaggaggtagaatggagcgagggccatctccaccgggctaggaaatggggctttggtgggccacactccattgtgctggagcactctggcatctccattggcagtggggaggggcttgtgacctatcagcatcttcaccctttctgagtttccgccgggctgggctctccagccaggagtcacaggtaccgggtggttgttcatgctgaggccttttgcttggcaaaaagttaatccatttgtgttcatttttaacctaagcaagggttggagcttgttggattcagcatctgtggaacacagtctgtagcccatgggaagacgtggacattctttcccaagttcttgaaggacggaaaggaccatgaacttgtgaggtgaccggaggattggttttgggtgtcagttttgtgtctgtcccagtgctgccacttttgctttgaaatggacggggagagctgaaggccagcatgggtttctgcacctgtttcctacagctctgctggggactgtggctcaggtggcagctgtggacacggatcctgtcagcctttgggtggccagagctccaaggccaggtgtctcttagctgcaagcagccttcactgttaatcaacaggctacacaaatctcacctctaaagaggtgaaatgtgaaaatatatgggaagcgctgccttagccctgtgtccacaaatcctttctgtaaagggccagatagcatttcaggctttatggaccatgtggtctctgccacaactgctcagctctgccactgtagcacaaaagcagccagagacagtgcgtaaatagatagcatggctgtgttctgatgaagcttcacttacaaatacacagggctgtagtttgccaacccctgcaaagtagggagtattttgccaaacttggctgtatttcaccaaccccttagactatagagatgacttaccctttggcttaatcatgactggaaacttccttcccatccactgcctggatccatccacctccccacaaaggcttcctgagcatctcctccgtgtgagcactggctcaatgcacaggacgatgtagttcctgcccatatggaacttaggttttgagtgacacgtgggacattggaagaggagagcaggtggctaaagagcatcatacagaacagggctcagggaagtcccaggtgatagaatctcaaagagaagggctgagggtgaatcaggaaagccctgaaggcaggcagctccggagtcgggtttagacgaggaggctgcagttctccaggaagggaagcaggaccagataacggatgagattgtgtcaaacaatgaggaggcctgcatagtcacacaggcgcatgaggtctgctcgtaaaggaccaggagggccaggctcaggggtgtggactggattctctgggctgtagggagccactggacagctgtgctcaggagggtcatgtgatcacaaatgcttattagaaatgtcactggctatggaggaccatgtctgtggttgtaagttacgcctttccgtttagtctggacttcctggtcaaggtacttttggtattagagtggggaagagaggcccagagagttggacaggttttctgaccattggcttatagtcagtgagcaccccacctttattttgacatgacagagctttacagaatcttccttcttcaggcgttttctttcctgctatcctaaagattcacgtacgagggcaggataaatgaaacattctgtctccaatctaagttcggcttggggcctcagaatatgaaggtaaaggggcggggacggactgactgccccttgcttcagaatcaagtcacatggcgggaacgctctatggagcagattgcttcctttgtacatgccctaggcccgtgttcagcaggcctcagagaagcagaggtgctggcctctcgtctccagaggctgccagctactaagggaggtggaagcaactacccctgggggtggactgctctgggccgggcccgacgtcaggcgtaggggactgaggtgaatcagacgtggtggctgcattgaggaatgctcagtgtagttggggtgtttgtagcgctttctgctgagcatggtctttcctctcagaggggtttctaggcacgttgaagggagctgccgttcagagcatcggagaggtgccagggacgtgagctgctgccagtctgacgtgaacagaaggtgggaatagctggcgctgccgtgcgttgataggagcacagtgtccgctgcgaaggggcggctagggctggagaaagatggcctgatagaagcgcctccacaggcgctgattcagcgaagccccagcagccccgcggggcaggcgaggatcacatgcagctcggagaagaggaggcacttgcccctctgcctgagctgggaggtggtggccagctgcacacagggctgtcccaggatgctgacgaggcgggaccagccacaggccggcagcgctgcactgtgactccctttcacggggcccagccttgtctctggccttccgggactgagtcaggaggcgagggctacgttgctgccccagcacagtcgggccaggtgtggggaaaggcgggagggaggtgtgctgtgctctgagcagcctggcaggccctggagaggcaggaagccactgcaaacttcagaaactgggtgctgcttcctctcggtgaagttgtgttttgctaatctctgataatcaggtcagggatacagaaggaagagttgcccctgggtggctgctgtctttagacttgtcgggctccctctggtacagaagtgcctctcggattttgctgcctggtcttctctcttatggacatggagtagctctcaggctcttatggtacagctctaagaaggaacacttcttgcattgtctagtgaagtttctgggtttatggaagggaaactgacaaactggagccggcacagatggacactgggtaaagagaatgcagcctgtccctggctgcagtgccaggtgtggcctttcctgtgacagcaagtcacgtgctgtggctccagcttcataggaaggctcttgtctgtcaggcagtggagttacttacagacaagagccttgctcaggccagccctgcccctgcctacaggcacaggtgctttgccatctgtcccgttttcctgcttagggaaccaagatggtcagaaagttgcttgactctaacctaaatatttctgccgcttttgcgagtcagactctttttcttttccttgttcatggaaatggatcaaggagtaggagttttagatagctagggaggtggtgagaagttccgtctccacctgtaatttacaagtcgtgtcttaggtttccagcctctttcctctgttctgggtatctcgtgctctccaccctttagggattttggtgtggtgggtccgtggcaagacactcgatccagacacacgcatttccgaggcacttccatgtcacttaccaagcctccttgtgtgtggatatcacttcactggctccctcaggctgcagccctgacccccaaggtagtgatggcagctggtgcatgaggtttgatttggaagtagccaggcaagccctggttgcaaaaaatacctcttctattccgacagcgggccagaggccgctgccattagacgcatccctctacttacccccgatcacttttcatggtcaggccggccttgcacaagcaggttctgttcactgcgcacccccatttcttagatggggtactgagcactgcttttcccttagctcacttcatgtggcagcttctcagggatgggacctaccatggctgtgggagatgctttgctactacttactacctttccgagggaggagggctcatttttagaaatgttactggggagccaaattgtaggcctccgaccagagggcctcgctctctccatctcccaggaaccaagggtagctctggctctctgaggagctgtctccagcctccaggtggacgtcctttccagcataccagggcttatggaggcaaaatgaaagctggtccacgtgggaactccctactgttgtcctttccttgggcagacaccatatactttttagctcctagcagtgtttatcccgttttccccaaagcatccttggactcaggcctttcatcctggacccatctgtctggcctgttgtgctgagcctttggtctaagtggttggttggtcccagccacttcttcaaaagaaggtttcctgaggtaaccataaattagggcaatcgtacttccaggaacagtgaggctgatgggcctgttcccaagggtactttggcagggggtgctggggaaggggctggcctagggccaggttcatcataccgttagccctgcagccccatgcctgtgtgtcctggtttacccgccgtgtagtggtcctgcaggagtggagcctgtaggacttgcttctcagcggctccaagcagaactctgtctgggaaggtgggaggtgcagccagtctagacctgaagccctcacactaaggactaaggtaggcctgctcagccttagcccttcgtcaggcccaagggtgggggaggcaggaggaggctgagcgtagtcgtggatagaaacctttccctaccgcacggttacacacatggcatgggactcctggctgtagctcactcgggtctactgaagaccaagttggtttttagaaatctatttaaaatatctatcatgtatctatttactgtgtttttctgaatacgcaagtgtaaatagtataatttgcagtgcaaaatccttggcaataactttgtgtattatgtttaaaaacactggaaaccgtgaccaccatggactgcccttcccctctgaggcaattattacatgtaggactctgaactttaaaccttcagcgtgactgaagcagcagcctgcacatgtggatggtcatcagtgcctcgcccagagatacctggccttcatccaaagggaccctgctgccacaagtcctccaggcagcacccgcactgtggctccttcgcactgagtatgttggactctgccatagactgaccctcttgtctggctgctgcagtttgtctgtaatgccctgacatgttgcattctccccatttggataaataaaaacaaacaaatgcttctgtcacacaca

SEQ ID NO: 619 - DNA, 752 bp, Homo sapiens
gaggggtatagtctgcctccccacccacggctggtggaacctgagggcccccggcgccaccagagcttcgtggcttaatgggggaggcgaggagccactgcggacctgctcgggacagtgaagggcgccagtctcagccctcatctgaaacctgctccgtgaccctggactagttcctgctcctctctgggccaaatcctggccctgctcctttctggctgagtaactttggagctgtgccctgaaaccctctgccctgctgaagaatggagaggactcccccaccagcacctccacctaggacacatgggaactgtgggacttggagcaaagttttcaagtctctgtgccttagtttcctcacctgtaagttgggggaatgatagtaactgctcttaagagctgctgtaggaattgagatcttgcatgaaaaaggataaaaccaattgatatggtttagttcttagtccccacccaaatctcatgtccagttatgatcctcagtgtaggaggagggacctcgtgggaggtgattggatcgtgggggcagtttctaatgttttagcaccgtccccctagtgctgcttgtttaaaagtgtgtagcaccccacctgcctctcctgccggccatgtgaagacgtgcttgcttccctttcaccttctgccatgattgtaagtttcctgaggtctccccagaagcagaagcctgtatagcccacagaatcatgagctgattaaacctcttttcttta

SEQ ID NO: 620 - DNA, 1039 bp, Homo sapiens
atcgtggtggctgcgcttgcgaggaccctgaggtagattgggtggtttcaacaggaacgcatccactgtctgagaggtggcaattgaagccggaagaacatctaccaagagcagagaacccaggaagaaaattctgcctctttaatacgttccaatatggacgttttccatatagatacctatctatatagatagatgctctgggatctgacggtcctggacacctgtatggctgtgtgctgtggtctttgcctagcctgcggttcacttttgctctggccaccacctcccctcatgtacaaaccgcgtctctgctctgccagtcttggcccccgtcaggcagcggttcactccctcaccagggaagtctagatagatagatatagatagatatcgatcgatagatatagatatatatatagatagatagataggtagatatatggatagatatagatatttggatagatatgtagacgtctatctataaatatatcgatatatcggggttctcagccatcccaaagaagcttgcacagggccagttgctttatgtcaggaaaagggacacagactgagtgtatgagggttttttttttctatagatgtatagatatttatatcagatgcaaataagtgaaactctcatacaacttttaattttgtgttttttccaaactctattccattcaactttttctgcctttttatttgattataatgagacatcgtactggaggcaggcttgaaatggatatacagagcactttcaacccagaaatttgtctcacgacttggggtccttacttaagttgtagctgttagtaatttcatccatgaattcactttgtgccatagtgtgatgttttgttatgaagttggaattgggaagggaaactaggaagttttgggagaagttaagaaggttgagtaggcaggcgttgttatagatattaaatttcaccctgcttatcaaagtacctggagcgtatggtatccaagctgtaaatggcccaaaggaatcggggttctcagccat

SEQ ID NO: 621 - DNA, 423 bp, Homo sapiens
atttgcaaatcaaacataaagcctgaaaggaaacattacttttcattaaatagacggccagccgaatgaacagagaagaagtccggacagcttttcaatgtgatggattctgtggcaaggattacatcattggggggttttatatttctataattttagattagttattttagttcccttacccccatttttaaatattcctgtcagctaaaacaaggattttcttaggaaatgatgaagccaggtttaatttctacttagtgagaagactgcattaccaccccactgttaaggtgcaggtattgtcagtagggcaaggatgggttttcttttgtaaggaatgcatttgaagggatagattacagactcagggtaatgtgaacctgtttccatgcttgggaatgtcctcccaggtgatggaca

SEQ ID NO: 622 - DNA, 3116 bp, Homo sapiens
agacctgtactccgtactccgtacttcgtagtcgcagcggcgcggtcttcggcagtctagtcatccaccgccatcctgggccccacgtgttgcctgaccattcctgagcccaggtaggggtcctgggggattgggttcagtggcgggcggcgtgggaggctgggccgcagtgagtgggggcaccagtgattcttggagaccaagccttcactacacgtgctacttcctctcaagaggcggttgagcgcgttcggaacattttacccggaggagactcggggattacttgatgagtaacctcgtgcttctctttcagccgagaagtggggcttctgcatgacctgggtggaccccagtaggtgggatgggacgtgtggtcaggagggacctcaccggaaggcatggggtggcgtgtagacctgccgcaagagaggctgtagagtgggccaggcgttgcaaggagctagagctggataatggttcagaggcacaagctgaagctaactgcgtttggagctaactgcatttgttcccttctaggtgggagccgtggctgaggtgacggtctcaaagtggaagagcttactgtcacagcaactcctttgcaagatgccccggtaaatcacgttgcagagaccccaactctgccttcctggaactaggcctgcgttttctctgaaccattatttcatggggaaaatgaaatctacttcatgtgcctggtctacttactccttcagaagtgatttctgagccgtaagatacatgagaaaaaaatgaaggggaaaaggcagtatttatattaactacatgatgataaggatgtttctggtcacagtgaaaagccatgctagaattgtagtgtcatagaataatgtggaagtttagttcgtgttgtctgatctatttaataatttaataaggttatctcttccaagacaccttcccttcttcctcagccagaaaggatctttccctgagagtcattagtagctctgggctcctggaaccaagctcaggtgcctaattgaactctggtctcttcccacagcccccagcagggactggtgcttagtgagagtggactgccagattccttgagtgtgggggatttgggtgaatgagggtagcaagcctccagcgtgcttgggtctgcggtgaccctatgcattccttcagtgcttgctagaacagttttgaaacggtttgaggccttgccctgctccatccagagcaaggttatagaaatttcagacaatgacttcctccctcctggatctagtgtcctgggccttgtatagatccgtgccatctaatgtggtagccacttggcacacatgattaaattaaatttggagttttatttcattttcacactagccacatttcagatgatcagtagccacaggtggccagtggctaccatattggaccgcacagattagagggcatttctgtcgctgtggaagttgttttggacaatgctggtgtgaaaggtgaagggaatcctgagtgtttgctgtgctccaggctcagtacaaattttattttattatacacttaaagcaaaagtcttataaaagttgaggatgaagccaagagtggtggtaagggtaggagttgaaacagtgaagaggaataacagggaagagtcctgccctgagagactcatggaataggatatttacaaggcaaagcaaagagaaccaaagtctcagttctgcagaggagctgagtgccccaggagctagtggagggtgaggtcaatgtgtgctcatcttaaaggaaaaactcatggaagaggaaggtgctaatgttgaacacctattttgcgccagacctcttaattgttttaaatctttgaggtatcatcatgaggtcgtttttaagttcagtacagatgaggggcccaaggtcagaattatgtgtccagggttgcccagccacaaaccagcagatcagggtttgatgccaggcctctctaaccctgcatcctgagtggaatatagaagccggtgggaagtttggatgggaaggagatggatgccttcaagttcttgtcttggtgttaggtgtgttaaaggactggctgggatgagaagagtgttgctggcttgagcatagcacgagcagcacagctcctgtgttcctctgggtggtggggtcacctctcttaaaggtagaggctttcagctgattctgtcttttcaggccaggaatagttgctgaacaccccaggcctgctgaggtccctccttgagtctcatgttcaagcagtcttgtgagtaaagcactggctaccccttttcacttactatcttttcaagcatgttctaccaccttggaaggtaagaggttagtaccttcttccagagcagagggcaggcattcttgctgtgcgttgtgaaagggtagagtcctgcgctcctttcttgtagtagtccaatggctcatgcaggtgcctctgactcccctatgggaactggggcttgggagggtggtggaaaatgctgatgctctggctattgctattgttttgaataatcagtggtcccttgtccctaatcgaggaattttgtattttctaccagtgtccatgaaactgggaggcgaccgtgttagctgccagttcctgacagccacctctcaccagtggcttcactctgtgtccctgacccagcacatggcacaagagtgcctgccatccgtcagtgtttctacagcagcaatcccaagatgctggagctagaggggacctgacctgagagaagataccttcagtggctgccaggctgttccttggaacctgtgcagggatgaggcctgcctgtgttaatacacctagtgaggagtggagctgaatttgaatgcaagccttggcaccttaattgagcaagtttgaaacctcgcttgttgcccttctggaaggagtcaggaatttccagttctgggcctgggctgtgggtctggcagacagacctctggccctaggtttgggtgccaggttctctgcttccagaatgagaagctttgctgtgcaccaggacctgggcccttctggtatctcctgaatgaaaaacaagggatatttaataaatatggatttaaatatgtga

SEQ ID NO: 623 - DNA, 736 bp, Homo sapiens
tatacactgatcactatgaagacataaagatttgttaaaagtggcctttgaagagcatgtaattgtgtccagaattggcgggttcttggtctcactgacttcaagaatgaagccgcagaccctcacggctaagacatccaaggtcaaagggcctacatctggtgaaggtcttgctgctttatcccatggtggaaggcagatgggttcacagaaaatagaaattctttacacagtcttctgatcaatagaatcaaagccctttttctgtaaatactggctagagagttgctaacttccataatggagaaatggaaaaagcagtttctttctccaataaaaccacaaaagccatggttttaaaagaaactatagaggatttcttgtgtggagtccttagctttgtgactgctgagatttaagacataggaaatcatgacttcctcgtggcagcctcatgattctgagatcacagcacgtgcatttggtacagccagcagaggtggtggtgtcttctcgaattcctgaccttctttccatggcagaagaagcaacccttttgctaactgaggtctatggtggtgttcctggaatctccatctctaacctatttacctaatccttccaaaaatcttatattgaatcttttcatgtttaaattatttagaatggtttgtggtatctgtaaacactgaccaatgcttcccacaataaaatcagcagtatggaaagaaagaaa

SEQ ID NO: 624 - DNA, 4641 bp, Homo sapiens
tccatcagagaacaggctacacgttctttggaatgtgctctgagttccagctgggacattgggatactgggatgccaagaacgtgtctgcctgatgtcagcagtgggctcgaggcagatgtccctgcgcacccactagtcacttagtcggtgcatcttcacagaagataacatctctgtgggcccctctcctcccctgctgtacagtggctcttctgcgaccaagtggcccccttggaggtggaagcaaaaggaaaggctctggacggaggttccccagctccttgataacgtgtaaaaatctctggcaagtcagaggagttcattgctcacattaagagctgcttctcattgctctcttattcattcagccattagttaattaattctctcaacatgaatctattcggtcccggctgtgtgccagggtctgtgctagatgccgggggcatcatgtcagccaaacatggttgccagcctccataaaactgttctagtggggaaattagatattaaacgagcagtgtcacaactccataattaaaaacagtggatgagctttcagggaaaatcatagtgtgctgtgaaagagtaaaaatgaggggatccgatcaaagctgagggagctgcatttgggctgaattctgcaagatccatgagaagtaacacgcaaagtgggtgcgaaggtacagttgggagagggacacgttccagggagagggacattttccaggcagaggcatgtgccaaggccccagggtggagccattgaaagaaggaacctaagagctgtggtgatagtgccatatgtgttcatgctgcttttgtttttacaaagacttaactttttagggcagttttaggttcacagcaaaattgagaggaagatacagaaatttccgtatgccccccatgccctcacatgcacaagctccccaactatcaccatcccccaccagagtggtgcatttgttacaaatgatgaaccaaattgacacgtcattatcacccagagtccatagtttacattcgggtttgttcttggtgttatacagcctatgggtttggactctatccactgttagagtatcatagagaatagtttccctgaccaaaaaattctctgtgctccatccacctgttcattcctgtctccctcctgacccctggcaaccactgatcttttaactgtcttcatacttttgccttttccagaatgtcagatagttggaatcacacagtagccttttcaaagtggcttttttcacttagtaagtatgcctttaagtttccatcatgtcttttcatgactcaatagcacatttcttttcagtgctgaataaaatcccattgtctggatgtactgccattcgtttatccaatcacctgctgatgggtatgttggttgtttctaggttttggtaattatgaataacattgctatacatatctaggttttggtagttatgaataacattgctatacatatctgtgtgcaggtttttatgtggacttaaattttcaacttctttggataaatgccaagaactgtgattgctgcattgcacagtgagaggtatgtttagttttgtaagaagttgccaaactgtcttccaaagtggctgtgccattttgcattctcactagcaatgaatgagaattccagtggctccacatcttcaccagcatttggtgctgtcggtgttctggatttcggtcatgttaataggtgtgtagtgatgtctcgttgttttagttcacatttccctgatgacccatgatgtggagcatgttttcatgtgcttctttgtgtctatatatcttcattggtgaggtgtctatcacaatatttggcccagtggttaatttttcgtagctgaccagtatgatgaggggtgctagggatgaaggttggtgaagcccacaaagtgagtttctgtctttttgagtatccacatttgaactaggcaacctggctgcatgaaactcgtagcttttgttttcccccactttttcagccatctttcagggtcacatcctgaggtaatgttggggcccctggtttttactgttgataattattttaaaactgcagtgacctcactgttgcatttaatttttttaaacacaagggctgggggtggtggctcacacctgtaatcccagcactttgggaggctggggcagggagatcacttgaggccaggatttcaagactagcctggccaacatggcgaatccctgcctctaataaaaatacaaaaattagtttggtggcacacacctgtaatcccagctactcaggaggctgaagcacaaaaatcgcttgaacccgggaggtggagcttgcagtgagctgagattgcaccactgcactccagcctgggtgacagagtgagaccctgtctcaaaaaaaaaaaaatgtaatttacacaaaaaactacacacaaagtatataatttgataactttttgacatacatatatagccatgaaatcatagctacagtcaagataacaaatgtatccaccaccccaaaaatatcctcacacctcttattcctgggcctgcttcccctactccatattcaggacgcagtcctaaggcaatccgctttctgccattaaagactagtttgcatttctgaaattggactcagcatttactcttccatcatctggcttcctactcaacgtaagtattttgagattcatccatgttgctgcatgtctcattggttcattcctcttcattgctaagtagtattccatcgcatggatgtaccacagtgggtttatccatttatctgctgacggacatttgggttcttttcagtttgtgattataacacataaacgtgctatggagttcatgttttaatctttgtatgaacacatgatttcatttctcctgggtatatacccagctgtcaaatgcctaggtcatatgataggtgcatgtttaactatttaagaaactgccagactgttttccaaagtgattgtaacattttacgttgttaccaccagcagctatgagagttccaggtgtgctgcgtcatcctggatgcttgccatggtcaatcgttttgagtttagatattccaacaggtgtgcagtgggatctcactatggtttcaatttgcatttccctaacaaatgatcctgagcctcttctatgtgctgctttgccatctggttatcttatttggtgacacatctagtaaaatcttttgctcattttgggcagttgttaccttagtattgagttttgacagtcctttttatattctagatacgtcctttattagatatccattttgcaaagcctgtaacttgtctttttatttttttaacagtatctttcaaaaacagaagttctcaatgttgatgaagctcagtttatcaagtttttcctttatgtattgtgtttttggtattgtgtctaagacatctttgcctgagatgagaagttgtatggtttaaggttttacacttaggcctgtggtccattttgagtttgtttttgtacacagtgtaaagtatgaattaaagtttggtttattttttgcatatagatattcaattattccagcaccatttgttgacaggctattggtatggtctaaaagtttgtaccctctgcagatttgtatgtagagatcctaatccccgaggtgattgtattaggaggtggggtgtttggggatcttattaagtcatgagggcagagccttcatgaatgccattagtgcccttataaaagagcctcagagacctgccttgtccgttccacattgggaggacacagtgagaagactgtgagtctatgaggaagcagagccctggccagacaccgaatctgctgccaccttgatcctggacttctcagcctccagaactgtgagaaatacatttatgttgtttagaagggtacagattatggtatttgatcatagcagcctgagtggactcagacaaccatcctttctcaactgaatcgatgttgcacatttgttgaaaatcaatcgtccatatatgtgtagatctatttctggactgtgtattctgtttcattgatctagtctacctttgtgccaatgctatacagttttgattactaaagattataagttttagaatcagctagtgtaaacagtgaaaatcactgagagttcagaagttaaagttgtactgcggtttcaaataaggtacttaatggtcctttttcatcattcagcatgaatatcccctacgtatctctgaaggttgattttgttctttattttaagaataaaataacgttgtgaacagcttgaacctgacaagttcacttgaaagcattgcacaggaagtggatttctcagcagccattggtggggccttgtgatcccctgagagtgagcagctctgggaacagaactgacatgagtgtctgggaggggacatgggaaggatctgcatacaaattgaagatccaattcctataaattttctatacaattgtatattttaatatataattataattgattttaagtctgtctctggaaatataagctttaataatttacatcttcacttaatcacttatgaaatcattttataacccttaataaaattagatagtgtaacttgtcaaa

SEQ ID NO: 625 - DNA, 2080 bp, Homo sapiens
cagtatttgatgggtctgaatgaaaatctgatgaaacagatgttacttgaagctgagtgactttctcagggtcaagcaaataagtaaatggaggagccagaattataccccaggatccccatcacaaggaggggagggctaccatcccagctgcaaactctcattcaaggtttatgctgcagccagcagtgtccttggagtctagttcaaagctgaagagagtgaaccatggaactgggagccattggcggagaggctggcctgaaggaagggaagtgtttcagccagaatgtactgacgcacaaccaggaaaccacaagactggtgagaacctttccaaaactgagctttatgatcaaaagaggtacaggaaacagctctgccaagagtcctttctgctcctggctggaaccctgagcttctgaggctctctgagtcaactctctgaacagatgctgtcacccaaggaaccatcactaaagcatttttttgctttgctctgaggtggcctcactggtgggtgcaagtgagttactgtctctttttctctttcttgtttctttcttttgacagaagttgccatgtgattactcaattctgaattttagaggccataggttactgcatttatgccctttgccaactgactattgtttggtgctgggcctgcatacaaacacgacatccccaaactcttatcaatacctagatcacctgatgtgaatctatcaataccctggacttaacagggtattgaaggaaagagaaccggcaattccttcatttcttacatcccagccagtagtccttctcccaggctagtcttccttttgtttcccctaagaatgactcaactaggaattgcattctgatccctgtcacagatataaatcttgtctggatacaaggtcaaaataattgtgttcctgtggattctttttcttttttcaaccagagtaactaccagttgccatgaaataaatcacatcatcatatggcagatccagctaatagctgagactggcaggataactgaaccgtgtactcagagctaaatgatggagaaattggactggccatggagcacttcaaattgattgcttagtaatgggatatttttcctggaaagacaacagaatacttctgaattgttggttctgtcatgggtacaggctcccatgtacaggaaaataaagaaagtgtgatgaatttttcatctggccttctgcctactttcttgctttctgcatgtctccatttttagtctgtaagccctgcctagatgaccaatcactattgcccatgtggcataaaacctacaatttaactatacttcttaccaaactctcagcaagtatgaggtagccaacagccttttcaagataatgactgagtcttagcttaggtttcagtcattttaggaaacataaaaaattcaatggtgggagatcatacacactctgcaaagatgtcagaagtcaagttttgggagagtccacacacaaactgagcagtgatggtaaaatatatttttgaaatatttctcctctgtgactgttatgtgaagtagagcaaacacattgtgctgcagtgctctttgggacatgccttttttgggaagtgctaactttatactctgctgacaccaaacatttgaatataaaaccttatttttttctctcactctgctccacttttggctcagcttattctaccaaaacacacttcaaaagacttctttatagaaagaatgtttcaaaaatataatatttccatctgttatttcaataatacatgctctgggactctctttatgaaccactttcctttctttgctcccatttagatgtataaatatttgattgtaaagctctaaggaatagtcagccaatcgggtcactgaattgtgaacattcctaaccctataattttgtctgtagcaggcacctcctgctgtggaactaactgctaagggattatagcaatgtaatcctcagactgttccatctcaaggttactctgaagtggagggaaggaagccgttttaattttgataaaataaactttattttgtaacttt

SEQ ID NO: 626 - DNA, 2296 bp, Homo sapiens
aagaataaaagcaggctgcctgaggttgcggtggtaacatgtttcggcgtccttccacactgtcgcggcttatgttgttttgctgtttgggtttgcactgtctttttgagctgtaacacagcaaaggtttgcagtttcgctcctgaaatcatcgagaccacaaacccaccgggaagaacgaacaactccagacgcaccgctttaagagctgtaatactcgttaggaaggtgtgcagcttgactcctgagtcagcgagaccatgaacccatcagaaggaaaaaactccgaacatcagaaggaacaagtttcagacacgccacctttaagaactgtgatactcaccgcgagggcccgcggcttcattcttgaagtccgtgagaccaagaacctaccaattccgaatacgttgggttcaagtggttctcctgcctcagactcccgaatacctgggactacaggcacccaccacgcccgggtaattgtatgacaatggagaggtgattactgcgctgaaaatcagtttcctgaagtgaaaaagggaatcaagttacgtcacagagcctggtgtgagcggcgctctgtcaacaccagctcttcatgggttgtggtttcctccagttcctggatgtgtggagttcatcctccactgactggcgccccggttgacaatgaggtctggcatccctggagttgagtaactagttctggctgctggtctccaggtgacatgtgtcacgtttgagctaagaattgcttcacatgattatggaggctgacaagtcccaagactcacagtcggcaagctggacacccaagacagctggtgctgcacatattaccagtgatgtagtttcagtctgaatctgaaggcctgagaaccaggacagttgatggtgtaaattccagtccgaggtcaggagaagcctaatgttctagcctaacatcttgcagcttttttgttctatgcaagttttaaagtaattggatgggacccagccacattagggaggccaatctgctttactcagtctaccaattcaaatctaatcttatccagaaacaccctcgtagacacatccacagtaatatttgaccaaatatctcagcactcaaaggcttaggcaagtcgatatgtaaaattaatgatcacaaggagggagaatgggttcaacaggtatttaaaagtattcataatagaaaagtatttattgtgtttatgtggcaggcagtattctgagtgctgttattgtatctcagttaaaacactagttaggtaagaaaagcgtcacctctgtgaggtggttactattattgtcctcatttagcagatgagaaaacaggcagagaaaaatttacatgatttgctggcactcatgcaactgataagtatctgaactgggattcgaacccaaactaactcagagtttaagctcttaactgccattctagagtcctccttggggacaggtgattgtaggtagaaaaaagaaatatggggagaggcatgctgaattgaaaaaaaaaacctctctaaatgaaactgagaaccacatcttctagtactaattataggtagagaactctgctaaatattttgcaagcattatccaatttaatgataaaaaccatactggacatgagaagccattatatccattttacagaaaagaaaaatgagctgggttggaattgcagctgggacatttttgatactgtgatcttagatacattcatctgtcagactccagctgattccaaactccttgttcattctattaggttgtgctataagaaaaaattctgtaagctttaaaagtggtaagtcaactcaaggcacagccaataagcatttatatgactgtacattatttacctaactctgcagagggagccagatatcctttagtgtagtaacgaagaatggctcctgcatatccccagcaattctcaggaaaaggtgggtgttatattctcttaaatagagaggcgtttttttcttagtcctattactggcagcttctaaatttaataacaaaatgctcacctacaaataagaagaataaaagcttaacttgccagggggaaaaaaagttctatgatgtaacagacccaggaataagtgatattcatgggaaggtcactgcctgaggctgcttgataaactccagccctttcctatatccactgtttaatgtttaagctttggatgctaagagtggttataataaactgtccaacagtttctcacttagacttcccaagaaggtgacaaaataaaatcaatgtaaagctgtc

SEQ ID NO: 627 - DNA, 1413 bp, Homo sapiens
taaaaggctagagaattcttctaaacattcaaatatggttaccatttagagtgtactgcatattcagatagtttcaactatcatgttaaaagctctctggatgtattttttccctataacattaaagcttgtcaaactttttcactctttctgtttcttccaggaacaggacacactggcacatccttttcccaccaaaccacagaaaaacatttttaagtgaaggttgaagaaatggcaatttacagatgccagaagaaaggataaaaatcaaggcaagataagaaaaaaggaggctgatgttctgctggtccacttggtttactggcttctctgtctgattgtgcctaactctgacactgtgccttccctctagacactgtagatgatgtttagtcctagctcaatcagtctctccctttgcacatttccgttacaaccctgctcatgtgctcaagatattgctcctgctactctcccctctcttctgcatcaacagttctttctcatctactggacaattcgcatcagcctactatcatacacaaatacccccacctttaaaaacccctcccttggtcccacactagtcttcagattccatcccattttttgctccccttgacagcaaaaacctccaaagagtatctgtactcagtgtattttctcttcacccatcagcaaaatttgacttagttaccatctcctcctggaaacagcttcttcacctggcatccaagtacctctctattctcctacctcatcaagaacttctgctttgctgattcttcatccccttgatatccaaacatagcaatgtcccaaggctcagttctcaggtccaccaagcactctcccacttcacagcccttgtatttgcagccctttctgcctgtaagctctctcaaccctcttatcctcctgaccccaggtctcttcaaatatttaccatctcagttttctttcttaatctctctatataaaaaactacatcaaaatctttttcccttatcttgctttattttttctccatagcatttagcaccagctgatatattaccatgtttatttgtttgctgtttgtcctactagaatgctagttttttgaaggcaagggctctgtctgcttggttcctgctgttggccacttcgtaacccagattctggcacataacagacccttgctacatatttgttgaatagctgaactcttagacacaatatcctaagactttgatagagatcttacttctgatagattgttctttcctgcaacaatactgattcctatataaatctggggaaggaagaaaaggtgactgatcactttttacctctcatcttttgccaaggtaaggttttttgtggttgttaaatctgaatataattaaattaaaaactttggatacccga

SEQ ID NO: 628 - DNA, 704 bp, Homo sapiens
gggttcctggagggcctctccgggactcgaggaaaacgaccttttcccttgcagcggcgggagagggcgaagtggaggactgctgctcggttccgtatccaaaagagacccaaggctccaggcaaaatagattggacattttcactttctcaagccagggccaccggtcgcccaaccagcagccactgagggtggtatcggggcgccccttcccctggcagcgtatttcagcccccagagacatcccccacctcggccatccccagcgcctttgcagggacagcagcacaaccatagcagaggtcctgggcatcctggaaataacgtgctggtgatctggctcagaagtgcacgttggcccgcgcgtgcggggagctgagaagcaagagattggaactttgcacgtgtcaagcaaggtttggcctgctttgaagacagtaatttcagagccactccggtctctgcgtcacaagcgggcatcagggcagtggtggggcggcaggggatcctgagacctcccatgccctctctttggccccggtgcttctgggcttcaaaatggttaactgaaaagaacggaggtcacatgacaacatgagtatatcccccaaggaagcctacctgtctatccccaggaatctgaaccagcagacaaagcactgtcgggtccttgctgcaacctcttccccccaccccctttgatg

SEQ ID NO: 629 - DNA, 530 bp, Homo sapiens
gtttttgagtttcagtggaagactctgacgtttcaaataccaaggctctttacgttgttgggacccaatttgttctcctctacggtcactaaaaatataatggctctacaattaactacaaggaagtatgttgcaaggtagtccaagtgcacacactgcaaggcagagatacaaacatcacatccagcaagcaaataagagtgtatctgtgcctgaaacaaggatactaaggtcatccacaacagtggtgtctaatggggtaagctaatatgaaagagtgaagcagcatcaacagtgagtaaaacagagtgactgcaacatgttcttcatttttgtcactgctttttaatacattacttcagatttcaatgtaaagttttgaataaaaggaatcattatatacatgttttatttgtttttgaaacagatgttctctctttttgaagaataaatcacattttatttccctccagctttattgaaatataattgacaaacaaaattaaataaatctaaagtgtgtaatataa

SEQ ID NO: 630 - DNA, 543 bp, Homo sapiens
cttttcagcaaggtgtttggatggtcctgtgcaatgtctttgagggcaagatggtgctatgtggactggacagtagcagcatgtggtgatttgcagctgacccttgaatgcctggacagtggatggcggacaggtgttcatccagagagaaagttccagagaagcagaggactgattaaaacagcagatacgcatcaaaacagggaggaatcagcttgggacagtcaccaggtgggaggaaaggagtccaaggggacagccgagccaagaatctgaaacccaagctgtagagactcaacttgcagataacctggctgcgagtactctgcccccaactggtggaagggaggagatggtggcgagaaggtgcatctacttctgaagtgccttgggttggagtgaaacacctcacgtcctctcacatctcattagcaagaactaaccaaatagccctgctcagatgcaaagggagctggaaaaggtagcccgcaaggagtctacactatgaagggggaatatatggaattgtggtgtttgcctgct

SEQ ID NO: 631 - DNA, 499 bp, Homo sapiens
catctcttgaccggggtgttctcaccatgccctttctacaaacaaaaaaatgaagatgtggagacctggagacaggtggcacctcgtgcttcctccgaagggagagcccatttcctaacagctggatcaaaggcatgaaatgaacatggagtccctgaagatgaagagaaggcatggcttccagggagaaattgtacattacaggaatgcagatgtgattcctatggatgagggtaacctagaggctagaagaacaataggacagaagaagcctgggtccctgaacaaccttgtggagcatagacacctacgtggcctggactgccagctcacaatgggcctctctgtgagagaaggaaacttccctcttgtttaagcaactgtgcttttgagaatctcttggtctataccctaatgaataaggccatcataaatggatatcaaagtaaggaaatttgtgtaaatgatttaataaaacattacctcaggtatgaaataa

SEQ ID NO: 632 - DNA, 358 bp, Homo sapiens
ctcctctgcatggaaccaggtggggagagagcgaacctcaaagtcatgcaaagggcttcttagcctggcttgaccactttggaacaggctgtctgtgggcaaaggattcaacctcactgaacctcaattttctcaaatgcaaaaagggttttaagtgctggctgttgttcaatggaagaggaaatcatttgaacaagaatcgcatcaagttgtgttgtgataaattttctttattaggatgaataacatgcacagatgagcttcaaaagtgaatgagcaaacttactggttacactctgcatccatttactctgtttagtatggagtaatgttaggcaataaatgatgctggcaaatg

SEQ ID NO: 633 - DNA, 5673 bp, Homo sapiens
aaaatgtttgaacaattggatttcaaacattttcgttttgtggagtggtgctcaccaagtggtacagccctaagcaagtgaacacaaacacatttaagtgtattttgtctgattagatgttagccagttatgctatttcattcaaatgtctgaaaaaatcaattgactattcccttttcctaaagggcagagacagataatctcacttccagagaaatgacttggagaaaaaaaagtgttggtctttttgctcttttgtaattaaatccggatgtacctcaaaagacttaagactgtggtgataagatgctttcctcagcagaaaggagggaaaaaaaacaactggaactcaaagcttgaaattctgtggcaaaacatgagatgtccaggattggaggttgaaaagatttcactacagtgttctgcaatagttggagcagataactttcagtgtagccacagccatggactccagatttccagattttcaagacctggacctggaacccgaaagagcttgtcacgatgcggcaggaacactggaggtagatttttttttatttttgaattttgggactgttgaccttgctgtgagaaaagagacaacgactgagcaagcactaccaccagcactgttactgggaattagaagacctgagtttctgtccagaccctcagtgcaaactgaggatgctccatccaaagtgaattatgtcctgtgcctcctgattgctgagtgttcacctggaccttctgactaccttccctgtgctattccatcagcctacagacctggtacctggatttttgcccgagatgattcctaccaccttactactgacgaagacacccattccagtggaccactgtgacccaggaggcattcagccatcatgatgtggcctttacctccactcctgtcttgttctacccagattcagcacagccctttatagtgaagtcagagtcctcaagccaaatagctaaagctgttttatcacaacaaaggcctagtttgttccatgagtgtgcatttcatttcttcagttaaagccttcagagacacacaataaatttggaccaggggattttttagttattaatgctctctgaagaaaggcaacatctttttgagagcagcattggaccacaccccacaatctcaaatgattgaaattcatgaacatctaggatcccgtgaaggtcactggaccctgttttttctacttcaaatcctgtagtagcctactgaatgagaaaacatattctgacccattgggatcaaatcaaaggcacagtgaactcctcatagcatcttctttggaattactcaggaaccagaactttttacacaaatgtaagaaattctaccaaggagtccccttacctaacagcatctcacaaggctgcaccagattccagaaaaggcttctcttgatacatcaagcattttgtgaccgacttattcttagatcattggttttccaaaggctttgtggccatgaagccctttgagtgaaaactgtgcagaagcccagagtaaaagtgaagctgctctggatgaagtagtgaagcaagagtaggggcctgaatcctgctacaactatcttcctttaccaccgtggtgacacctaaggggacttccttacaacaccttgaactcttccgaacacagtttgaaaaccactgccccagacagcaatatgtttgacctgaatggcattccaatcttttctgtacctccactcagcacagttcatgttcagtagatgctgaacattcttagaaatactgtgtgtgaacttagaaaagtgcaagaagacaggcatgtctttgaccccaggaatgatcatttgctgaagatggtgtcaagtgaacctagattaacagccctccactccagatggatatccagtgattcctagaatgggatatagccagagaacaattctatgcaccctacactgacagactcccttaagcaacaccagatgctctactggtacttgaagtacatgactttgaagtcttgaccctccatgaatacctgaattatcagcaagcgggttttgaagctggtgcctcattgaggccatattagagcaacttgtacatttgacctcttgttatcagccatggtactctacttcgtgtgcaagagataactatgaaagccaaattcaaatactggcaacatttcctaaaggggctcaatatctatcattcgtcttcttttccaaactacacatcactgtatgactcaaccagtagcagttatattgccccttggtttttattcagtttaactactgtttccaagataaatgagctaataagctttaaaaaaaaaaaaaaaaaaggctgaattcttttttcttcatcactggcatatctgcctattctccagaattattatgactattcagctcactttaacagttgaacttcaagcgacaatctttgaacaccccttctcatgtgatttaaaatgaaaccatttggaaaagtttcttctagccagtaatagattttttttttaattgctctgccttgtgccgagagatgttcttttaagatgaatcttttgatgtctgataccaccaaatataggtggtagggagagttggaggctggccctttgagcaggccattagcttacttgctgggcatttccgatagcttattgcctacctttttgctggaaacaaactgatttgaaaaacaaaatctatgaagactgcagctaaggattttatcggtagacttaagagcttttgtccttgtggatattttagtggaaccacatcagtctcaatactgtcattttacactgactcagagcagctgacttcattccttgccatgatatatatttaaggcaggcattgtaacagacataaagacaacttatctgtttcagcaggaaggattcagtttatgaactctcagaccagatcatgttgaacaaggagactttgatgtgtgtcatgagaaaactcattctttacttcccagtcaatttaaaggccagctatcctgagctactcgaatgaatgcactggttaaacattggaaatagtttgtttatatccttgtctctctctaggccaattgtgattacatgactcgactctacatctcgtcaaacaaggcctaggtctggttgctgtagactgctcgccctcaacaaataaaatctggttgactagcctccttgtatatacaactattatttgttaagaagaaattatcgtcaattttctactaccttccaattgtcagctctttttttcctctctggtttttcctatactttacagaaaaagacattgatctatactgccattccctctaatcctgccatactcagtcaaaaggaatgacttaagatgaagatgatcatctgctcgagtctaaaatatacattgtatataagaattggtgattagaaaagcaaaaaacctaaaacttaaatctaggagtctgtatactgtctccatgtctccatgcctcagatctcatctaaatctttgaacagcaccattcaaccaatctgaggccttgacttgcttgtaagatgattctcagagatcggctgagttaaaaaagatgacgacttgattaccaaagaaagtagggccaactttgacaaatctggctctgctgaccctgtcactcccagatgtagcatagactcctaaacagaacctcaagtctgattgaggataaggccttctcctgagctgaaagttctttggcagatgagcaagaaactgaaagctgatgtacctgactggctctgtaagatcagaaaactgtatccagaataagccctatggattaacccctgagtacccagagtaaaaactaatttacagaacttccttattgatctgctggttcttccagatcatattctggctattggtatggctggcctttctgaaggtaccctgcttgtctattttcctgactcagctcttgcctgcctttttcacatgttgctgcaattagactcaccgtgaggactacagtcaatttcagtctatcttgtgcccaatacaacaaggatttttaatagtaacaacccacacctcacccactaggactcaatgttcacaacaggaaggaccattgctgcatactccttgaccagcaacttttttgaagatatttttaagtgcagagtaggcctctattcctgtatgtaattgttcattttcagcacctggaacctcatctatcgggtctggaaggaatacagcagttcgaaagccgcgtccatttctctccttcagtagtgcagaaatgagtccgattcaccagtacacacagaactgtaccagttcaacctagcaaaagaagaaaagtttccactgtacttaaaatttacagctgactcaaattgcctcacagaattatttgatgtagaaggctagttgtcttacttcagatcagcaggacagttgggctctcagactcatgaccactgagtttgcttgtgttgaaactgtggtttcatccaacatatgctattggacatgattattattccattcaaatggattacagacttcttgaggacaggacaaacttatctctcatggtgtttttttagaatacttttataaccaaggaagaaaccatgccagctgttaccattcaacttcttaagcagagattaagctttttcatatctgttcttatcctggacatcagtagtttttaattgcccagcatccgttccatcttgtaacaactccctgatgtttcttaaaaccacctcttcctattttcagtctgtggtttggacagtctgacccaaccttgagctttgtgggtgaacatgtaattcagacctcatcaatcagcaaatccatctgaactgtggaggagaagctctctttactgagggtgctttagctttgtaggatgaaaacctcaaactaacagggcctaccatgtagagaatgaagccagtgcaggggaaagcagagccaaaatatggagagacttgaatcctgatgacagcgtttgtgcccctggatccaaccgtgcctgaagctagaatatcccctggacttttcagttatgtgaaccaataaatacccttttttgcttaagttactttgagttgggtttctgttacttgaaattgaatccacactaatatatctaccaacattgagacttgacagatccaagtatttattaagctagaggtcatggtcactgaaattactttccaaagtggaagacaaaatgaaacaggaactgagggaatatttaagatcccacagaagcgtaaaaatgacatggtagaaagtaatagaaaacctaaatgtctgtcattaaaggataggttaaggtgtggttcagccatataggaatatctcgtatctgttaaaatgaataaagtacattcattgtgtatggaaaaatggccatgatacattaggtgaaacaagttattaatagaaaagtgtacagtgtgaactcattttaaaatgtgtgtgcttatgtttataaatgcatagaaaggtctattcacagctttctttgaacagtgtagatcacatgaaactttcaactttatacatttctgtattaatattttacactacccacattatttttaaactttattttaaataaagaatttttaaaattaaa

SEQ ID NO: 634 - DNA, 544 bp, Homo sapiens
cgccacgggctgcatgggcagcgctcgcgccccgccgctgagccgccggggagccgtccagtcttcgaatcccaccacagcatgttccgaagagatgattggaagatggaagtggagggttaaataatgaaatgcagctaacatttcggaaagtttctaaaagttgtacaacatgccctacagctactctttaaatctccaaatcaaatgagtttcaggtggagcctctgggaggtgatgaggtcatgagagtggagcctcatgaatgggatgagcactcctacaaaaaggattccagagagctcgcttgctccttccacagtgtgaggacacagagggaaggctctgtctatgaatgagaaagtgggtccccaccagacattgaatctgccgcatcttgatactggacttccagtctccagaactgtgggcaataaatgtctgttgtttattacctgtccagtatctttggtattttgctatagcaacccaaatggactaagaaaacaccagaggccatacctaataaaaatattgacatcac

SEQ ID NO: 635 - DNA, 671 bp, Homo sapiens
gctagtaactgcacagacccatctgaaagccctttgatagatgtaatggatttgagcatggactgtgtgtcagacgctgcgtcagagactgggataccacagggacctgaccagatataaactctgctctctagaagcttgacagtccaagcatcacaaatatttgattcggtatactttttaatcactcatgctcaactgaactatttggtaaaaggtaaaaaagcagaatcactctacatcctcaaaggaactcagtatacaacagcaacagcaacagctgcttcctgctttacatgctgaaaacaaatggttcagccaaagtttgtttttgcaaaaataaacatagtgcaactgaggagtctttaatagacttatgcagatttcctaagtgattatagaagtgtttcttataaaggatatcaaagagtttgcttggaaattatagcagagttaatattaaatacatatttttaaatgttcttggaaccagcattgaaagcctttttcaggtttgaaatatcattatttatttaatatttctacttgtctgtcacattatggagaaaaaaacgaatgcctgttattaagaatgtggcctccctataatcaatggtgttagtcaactttcagatttcctttaaattacgtttctaagattttaaaaattt

SEQ ID NO: 636 - DNA, 2501 bp, Homo sapiens
gggctgcttcttatttatgatcagatcaagggtataaggtgtcagtgggggcagccagcagtcataggccagagaggggcgactgcccgtcccaagggcttgtcacagggtaagtaaccgacagactgggaaaggaaggaggcaatcttcagccactcggtcactcattctaaattcactctcattttttgggcatctattgtgcaagccctgtggacttaaaaagagaaataagacgccgtccctgccctcgggagctcccggcgcatctgccccaacaactcgctgaagccgcctgcaggacgcctgagtgaggacaaggtgtctcactcagaaaatttgcttgattcttcctggcaagtgggacagggtgagcttcccggaggaggggaccttcgagctgtgtagcggggaaggtaggagagcgatgagagcgcccggaagggacaagcattcggggagactgaagcgcattcaacaacatatttattgagcacctactacgtccaggcactgttacatcggtgatgtaacaaaagccgacaaaaaccctcaccccgagcgcaggcaccgcagagggcgatgacgacccgagaagatgccgaacgcaggccaggagggggctctggggaaaagcaaaggcaggggaggttgcccatcggggagcctcgcgtccctgggccctccgtactctgcacatatgcagaggcccccacccgtcctgtaaccgcaaactgcttggcgtgacttggccagcggagggaggagcccaggctgcaggacaagcaggagtcagggtccctgcagttgctggggaaagtggactcttctggtagctgcttttacagcccctgccctcagaggccccccaggtgggaagggcctgcctcctaggcagtgggtggtcaccgaggactgactttgaacccggggcaagggagccccagaaggctggaggcctgcacacggcactggaagaaacaaactgcaaaggctgtccctcagggctatctccacagccaccggaatgcggcctggaatatccaaacctgtcagcccacctgcacccagccagacagcgaccattctagctgcttccccggaggcctgctgacccagagaggtgtcaaaaagctgaagcacaacagacagacctcccacagactcagcagggagttggaggacagtcggcacaccagcagctgtagcccatcacctcccccctccccattcacctggtatgcagcacttaagggcttgctgaagccccagcaaagcagaggcccacctgagagcttggaaacacacctatgccccagaccaccgcaatcgcaatctccagtcagccctggccaccacagtgaactgcctaagtgccccagatgactgagtcacaagccagggctgggaagcactgcatgaaaggcggccttctctagacaaggctggacacacccctgcaaggcctgtctcctaggagctgggatgaaactctggacgatgtgctgggaacaaagaaaacccacatggtaaaggctcgcttttccttgggaatctgcaatgcttacagaacgggaaaggctgaaagccgcccacagtgccgcacctgggcctgagggctggtgtacccaccctctcccggaggaaacaagacccgtgaccagactcaaaaccacctcacaccctcacaatccttacagaatattcaaagactggcacttcaaccttacaacctgagcacgtctaaatgcctaacacaataccaagcacactgtatgccacgcttttaaaaggtagagatcttaaaaaaacaaaaaacactacctcgggtatgaagacagattttatgatgccagtcatttccagaggggctgcccgctgtggcacagcaccacctggtggccaccccaacccatgcacctccccccatcccagtaccctgacagcaagccaatgaaagaggtgttaatatggctattttccaactgaggaaacaggcaaaagtgtagtcatttctccaagtcagtcaagttagcgagtggtagatgtgctataccttgttgcacccattttgggacctgtttgaatggcatgccccaccatcgctcccacatctgccagttatgtttaaccccacgtgctatttccatcatggcctccccacatcttattttcaaacaggctgaaaacagatggcctcatttgccgactgagatcatgctcaagattagggatgcaccgggcacggaggctcatgcctgtaatcccagcactatgggaggctgaggcaggcagtgaaaccctgtctctactacaaatacaaaaattggccaggcgtggtgatgtgtgcctgtaatcccagccactcgggaggctgaggcaggacagtcgcttgaacccaggaggcggaggtggtagtgagctgatatcgcaccactgtgctccaggatgagccacagagcaagactccgtctcaaagaaagaaaaaaaaaaaaaaaaaa

SEQ ID NO: 637 - DNA, 540 bp, Homo sapiens
agacattattgctgggcttagcacctaaaaatgttttatatactggagcatctgaaagttcctattcagtagcagaacttcagggtagttgaggtttataatctagtcagttataataacattgctagcatatttcagttttttggatttgtctattatttgacaatataatttttattgtctttgtctatgtcatatctttaaattggctattgttttgtgcttatggaaaaatactttaattctcaaaaacagtgatttcttttttgtttttgcctctttataaggaatagcaaatagaagtgctagtatttactagatgcagtgattgctacagttggttttaagtaaaacagattgtttttgattattttgaaatcagcccctaaggctcatacatggatgggcctcagattttgctataagcttcctgtcatctgtcatatgagagggatgctgtgtgaatcagttatgtatattcctgttctttaacattgctaaatttttaccattaaaatttatgttggtttctgttttctt

SEQ ID NO: 638 - DNA, 1572 bp, Homo sapiens
ggacggcaaggcggggagaggggcagcccgctcgcggccctcccgcctggctctcgcctcggcctgcggccgggatcctccgcccgggtcgcgcagcggaggccgagggctgggacgggcggctgggaagtgggaaagggagctccttttgtcttctcttcccatcccccaggtttgggaaagttttccttttgggaaagcccctctcttcagcctgctggcgggtgtcggattggttagcgaccaccggcccccgcctcccccaacaggattctcctttgggccacaggtcttccggaagttgccaaaccccggtagcggcagcgtccggctgggggctttattagggggcaccggggtctgctttccgactcccttccgactccgcgcctgcgcaggaagcgatttggggagtgttgtgaattccgagggctccacacttaagaggttgtacactcacctgtctacctggactccaatttccatatttccagccacttgaggactgagaggtggatgataaaccctgtcatagtggagcaagttcaggtgtttaaccgctgttatgggggatctgccttttctccctcttctttcttacttccataagtatgtatgtgcagagattgaaaaataaccttgagagagtccatccatctaactccagttcattggaaatttctgcttctttgagactgaggttatattccacttcttctgactacaccaccaccatcaatctccttctctgaactcttggatcattacttcaacctgaaacaactcatcaggcagaatagttgcctactgccccaaccccaccaaatgttccagcacctctgatattacctcacatggcaagagggctttgaagatgtgattgagtcaaggatcttgaatggggagattatcctgaattattcagctggacccagtgtaatcacaaaggtttttcaaagatggaagagaggcagaagagccagaaaaggatatgtgacaatggagtcagtgtcagagttggagtgacgtgatgtgagaaggattcaacctgctgtttctggctttgaggatgaaagaaggggccatgagccaagcaatacaggtggcttctttcaagaagttggaaaagtggtaatattttatgttattttggtttgatttttgtttgtggcatatggctctgctgtcctgtgactctaagtagaagagaaaatagtgccaataattcttcatggagatgcacctctctcaagtcttgaacaatgtttgagatttccccaggccaccatcactggatttggctatttgacttgctgtagtcaatggaatgtgagtgaaaagtgactctgtaccagtggggaggcaaagccttaaaagacccagcaaatttcttccagcccttttgtgcttctgccaaaagaatactgtgagcaatcagtgcccttaagcctgggcctcagaacgagagatatggagcaaacctgaacctgaacagcagcctacaatcaagccaggatgaccctgcaaagcccagccaacgatagcaaagccacagcagacttgtagaccaat

SEQ ID NO: 639 - DNA, 1818 bp, Homo sapiens
ctcggatttggatttggatgcctgtcaagccctcactcttcagactaaatgtctgatttgcatggagaattatcaagagaagcaacaatgccaagcagactattccaggtcaaaatagtcaaattaataattcataaattattatatgttttgaaggtattgcaaaattaaagttgcaagaacagtacagataacttttttcctgaaccatttgagagtaggttgcagacctggtgccccatcatttctgaatattttagtgtgcattttctacaaacaaggacattttccagcataaccacaatgcacccatcaatgtcgtgaaattaatgttggtacattactaccacctagtcctcagaccctattcaaattataccagttatcataatagtttcttataatttatagcaaaatgatccaaaccaggagcatgcattgcatttttatgaatttttaaaacaattaagtctgtgtagtgagtgaagccacagtgataggaatatataaaggctttgcatctagaatttgttctgaaaaccctgagattcaagtagtacattatttcatttactattttacacagagaagccctcatttttaagagtttgcctttctgatttccaccggaaatgatactatcagtatcatactcagaatcttaattacatacaaggcactaacctctcacctgttttcagctttgtgtaaagacaagggatcaaaacatccctttctgctatttcatacttaagtgtgggagctgatccaaaggaagaatagtttcaaaagtttgtagcaaaaaaaatttaaaaggtgaagattttttccttgaatgattctcacctggcagatctatggaaagattagctgactctttggatccctgaatatagttaatagaaatttggaaggaccatgtcaaaattaactaatgtgaactgacaaagatttggtgttcaaagcaaaaattaaactttggaaaagtgagcaagtacttaatcagaaacaaaaaaaaaaaaaagaaaggaaaagttaggtgaaaatggtttccaggtgttgttgctgttatagtttgaatcataaaagttgttaaaagtctgctgtaacaaaccatcatagactgggtgacttataaagaacaaaaatgtatttctcacagttccagaggctgggaagtctaagatcaaggcatcagcagattcagtgtctggtgagggcccactttctggttcatagatggcaccttctcactgtctccccacgtgatggaaggggcaagaggtctctcttggtactcttttattaagggcactaatcccatccatggggctccaccttcatgacctattcatctcccagaggccctacctgcagataccatcgtatgggggatttgatttcagcctgtgaatttgggggaagcgggacaaacattcgttttgtagcaaaaggagtagagtaatatctgccaataactggaggaaagaattgttcttttaaaactattaaattgtttaatgggatttaaatgatttcaggaatgaaatggaaatcctggtaatgggtagaaacataggtaaattctccttttccacttaccaccacctgtgtgaacaacaatcatttctcattaatagtcaagaatttgaagagatcatgagtaaaaagtcttgatcagaaattgtgtatagctgtttccagcataaaaccttatataaaatgcatattcatagaagatgctcaagtatgtcatgaaaaatatgaagtttatttaaatatttatacaaattaaagatttactgtattctctaacag

SEQ ID NO: 640 - DNA, 657 bp, Homo sapiens
agagatgggaaagaagcgtcaagaacttgaacagaaatccagctctcagtacattgcaagacgaggtctcactatgttgcccaggctgatcttgaactcctgggttcaagagatccacccatctcagcctcccaaagcgctgggattacaggtgtgagccaccgtgcccagccctgatgcattttctgaaagctcttcagaagcaagtaaattgctaaagtattgtgtctcctaaaacgttcatggaaaggatagaaaggaccctgacatcatttgcgctggaaaccctgagacaaagtcagaaagatctggaaagacctgccagaggaaatctgccacccctctggactaggagacttcatctacataaaagtgggctgtcaccatgctgggagggaccctttaaagtgctgtcgatgacccataaggctatcagtgcaaaaggcaaactgctgaatccaggcttcctatgtgaagctagcaccacaggacaggtggactgtgctttctacaaaggacctaaaactgaagttttctactcaactgaaaagaagtattctagaaaatgtattactattcctataggctgcctggctgttctgttcatgacggtggttattccaattactttgagaattatatttattagaaaacaaa

SEQ ID NO: 641 - DNA, 1739 bp, Homo sapiens
ggaaggcgggggacccgggacttccaagtgttctggccatggaggcatggtatccgtaacatcccccaaaggagctaaagaagaaatccacaatttaccatgagcatttctcgtctgaagattgccaagcgattcctccaggacattcctcaagatcaatttctgttcatccaccttgtcctgggagggacatcaatgggtttccatgtcctttggcttctggttgagttcactcagtggagaaccctggcaagaggcaggaaaaggggaggaaggctttatgatacatgtgttgaatgtgcaggttcgttacataggtaaatgtgtggcatggtggtttgctgcacctatcaacccatcacctaggtattaagccctgcatgcattagctattagtcctgatgctctccctcccccgcaccccctagcaggtccctggtgtatgttgttccactccctgtgttcatgtattctcattgttcaactcccacttatgagtgagaacatgcagtgtttgattttctgttcctgtgtcagtttactgaggatactggcttccagcgtcatccacgtctcagtataggacatcatctcattcctttttatggctgcatagtattccatggtgtatatgtatcacatttttctttatccagtctaccattgtgggcatttgggttcattccaagtctttaataagggtttggtcttacctgatttatgttagaaggaaaccatttgtttggaatgaatagagtaaatcttttgggaaaatagaaaaaaagattattttaaaatcatgtgaatatttaggtctaagagttgtccatgaatccttagctcagtgttcatagatccctacaaacaagatctatgaatagaattcttggaatccttaagttaggataggaaaaaattacatctttattttttctaacctctatttgaaatgtagtatttctttccatcacaagtgtatgtgacaagacacaatagtgttggtcattactaaggctttatcaccgacaaaaatcataggtatttttatatcacactgcagtgttgtaaaaatctcaagatatcatctatactcttcactgcttcgaaattatggtagttggtagacccaccttcaggtcttgttattggcggcattaataaggaagtgtatatgttatgtttcacaattttattttctaaatactttcagattgcaactgcatttccatataatttattttataattcgttgtgtttcaagttatgcatttacacatgtaattctaaaaagaagtccatagacttgaccacatttccaaaagagttcacagtaaacaaattattaaaaatctctgttaattcatagatactcattccagaaaatacagcaatggctgcatatcaggaatatctttttccagaaaaaaaaatatccgaagttactagatattctgtagtttctgtatgtggagtttctggggtaaatcctttgagttcaatatgttgactatgtgctatgtcatctcaaatatttgaccttattctgtttttcttctctgggtcattgtatgttttgtaactagatttcctatttggtatttgtctcccaaattttaagagcaaaacttgtcatctatcgccttattttaattctcactatgtaaacttgtaagaactaactcacaacttggtgtctcataactcacttctgaaatatccaataaaaaactgccaagtta

SEQ ID NO: 642 - DNA, 582 bp, Homo sapiens
aggtttggacacagacactcagaagagcaccatgaaaaagcacagaggcacagacacatagagaagacagccatgtgatgacgaaggcagagattggggtgatgcttctagaagacaaagaatgtcaaggattgctgggcaaccaccagaggccagaaagagcaacagaaaatgggctaagacatggagcaaggggcagaacgactcttgaagatgctgagcaacttctgaaagtttcaactacagtgctgttctgtgaaggggaatgggtgctggagagctaagcaggaagcaggaggcaggagggactgtctgcagcaatcagcagtgaggacaacatggaatgatccctaaggtggagcaggaagctgtcaagagaggggaaaaggtgaaggattcctggaggctgctcagcaatccatctaagacaaaatgcaaaagaacctcttaaagatctttccctacactggtggcctggggaacaaatcacatttggagaattgaagaaatcttaaaatgcaagcatattaagcccttttcccccaaatcacttaagtctcacaagtctacctcacttagagc

SEQ ID NO: 643 - DNA, 509 bp, Homo sapiens
cagtgattccatgtagacagttgtgcaactgtcagaatccctgggagttccctgaaagcttcggggatttcaggcgacttcagacgcctcaaagtcaaacaaaaccaaaaatgtccccttcaggaagtcaggccatgttctgtccttccgttttccttcttactagggaacttggggagggaggctgggcggcagcagttaaacaactcacccaatgggaaaaccagcacgctctgggaccacctctgaagtgatctcacaccctgaccacacactctaaactcactgtcataatccttccccttggtcaaaaataaaagcagcacacccactctgctgggagtgagtcacaaacagaaaaaagtcaatgggtctgagccaagaggatctactaacaaggggaaagatctcccagtggaggtgtttcagcggatgctgcggtcttacccttgtagcctggatgaccagacagatcaaaaaaaatgttaaagtccaggcatctgacacta

SEQ ID NO: 644 - DNA, 1923 bp, Homo sapiens
ctcattagaagccagcttcccctggaaaacaaccacattctgctctactttctcatgtctatgtggccctccctgagtgggaaggcttaagttttgtaagattcatcataagtgtggtgatatttcctaattccagggaatggagctagtcatgccacacatctttgctgttttcacgaactgagattcttcttatgttgctattttaaactcctgaactcaagtgatcctcctgccttggcctcccaaagtgctgggattacaggtgtgagacactgcaccctgcccaagcacctctgctccgtgccatgctcttggctaattggagttgtgaaaggcatgaggattctggtcatggactcagctctcccatagggttctgacaccaaagcaatggtcacaacagtgaaaggaagaatccatctggccaggctcaggtggttcaaggccttcagaatctgccttgagactctcactggctttagactgaaaaccatcttggccccgtccatccgtgtaagcaatttaacgacagcttgcaaagcaccgagctttaacagaaagaagagatgagcacagcgcaagaacttggactccagaagagctgcctaacagattatttttctgtggcatttcatgagaacaaacgaagtaggaattttccttttgtttgtctggcctttggcatcgtttactttctttttattcttctgaaatgtacttcgagccctggcagcatttctgtcctaaaatcttattgtcagaggtttatttttcagcttttcaaatcatatctgatagagtgagtgtactgcctggactcatcactttacttcagaagaaatacagctcaccctttaaatgacaatggtgactgtccacatctttatgttttctacactgaagtggcaggcttcatttaaaaataatgttttccctcatcaaaagagagctagggtagaaccgtcaactctgctgttgtctgggtagtgacctaacacccacgttttggacaatcactcactgtcttatattgggttttcattgcatgtaggataattctttgtcaatggtagttttgtcaaccgtgatctgaggtaatgaggttttctacttttgcttgaaattttgaaaatatgcaagctttaaacatttgcaaagttggattctgttttctttagaaagcaatctgatttgctgatattctctccatctgtcaggggatgcgtgatgtggtgtagacttaatgtgctgcctttctggaacatggacagagtagcagcacagaaaaatgagcatttcagctctgtgatgatttgtgaaaaaaaatctcagatcattgagcaggcattttgctgacacctgtgaaaagtaaccacatgagagagcatggcgtgatggtcggaggccacgtgctggagctggactgcttgagtcaaatcccagctgctcagctgtagtgaactgaatggtggtccccaaaagatacatgtatctcctaatccctggaacctgtgaatgtgaccttattaggcaaaagggtctttgcagatgtaattacattgaggctctcagagatgagaacatcctggattatcagggtgggtcctatatccaatgacaagtgtctccttataggagacagaagaagttgcagacccggaagagactaagtaaagatggaggcagagactggagtgaggctgctgcaggccaaaaatgcctggtgccagcaaaagctggaagaggcaaggaaggacctttccctggggcttttggagggagtgcagccctgctgatgccttagtgttggatatctgggctatggaactatgagagagaaacttctgttgttttaagccacctagtttgtggtactctgttatggcagccacaggaaactaatacactctttaccacctg

SEQ ID NO: 645 - DNA, 714 bp, Homo sapiens
ggagctacggtacacaagcacaggttcacatttatgaagcagccaataagaattcccagcctgagaggaccttggaaccagaaggaattggaggagatttaaacaagctgacccaaggaaagcacaagatctttctatgcattgaagatcaccaaatcaaagataaaagtgctcgaccattatggcctatggcaaactcgggctggctgaagcatccttctcttccatttagaaccctggtgaggccccttagaccaccactgggctgtcctcctccctcctcagagacagagttctgggctgggccatggaggtgtctgtcaacacggcagtagtcctcgttctatggaaaaccagctgttccctgtgacacgactccattcccgcagctgcctgctattcagctgggctgacggacagcagagcacagggttggaagaccaccctctcagacagtttgaaatctctaaaaggccgccgtgtcccggctttaaaaagaggtgaagcacatctctcggcacatgcttctgcataggtgaggcctcagcgaggcgtcctggcccctgagtggagatgctcccctcagccgtgcctcagctccagggcaccatcacgagaggcttcgttcagggtctcctgcctgcggaccacctcttacgtctcctcctcaccttctggtgtcgtctcaaccaactcagaccttcagatcagagg

SEQ ID NO: 646 - DNA, 744 bp, Homo sapiens
cagtcagtgacaccaacagaggctgcgctcagtggggcaacctctcctcctccgcagccccagcctcctccctgactctgccaggcagctagctccagccaggtcctccaacactccccttgtcctggagggccagcctggggcctggcaacgcccagctgttcaacatgaagttgccccaggacccccaggatcaccctggaggggcccccatcaggagacgcaagacccctgggccagggctgagagggcctgttcacttgctgagctgctgatgggcaggtgacggcctatcctgcagcagttagagggcagctagggagacgtgggctcctacctttctctccctgcaccccttctccagcattgttcccagcaggcttgggactccactgaacttggatctctttggttttgttccttgtcctctccctctgctcacacactgggctccaaggagcccgttcaaccccagattcttggattcagaatcctgggatcatcaaatcccagagatgtcaaagctcatttggtctgccccttccttagagctacaccatccggccttgacccttggagatgggatgtccacttggctgggtttattgcacccttgctgtatgcaaggctctttgcttatcaggcttggagaaattgagttaggtggtgcaaaagaggatacagagggaaatagtgcccggcctgccttaggaagcccacagtccaataaaaaagacacaagaa

SEQ ID NO: 647 - DNA, 2896 bp, Homo sapiens
ccatggagggggagcaagcgtgagctggcacccaacacccctttctccacatggagggtggtcacatgttctccacctgttcccctagatggtgagacttctgttgggcttgcttttcctgggccagtgtccatcagccaggtgctcagccatcggtgcgctgaagctccagcccttcctggtgccctgatctcctgcactgagctgtgatgagtacatccgggttccactggatgcatgtgcgggaaggggggtgccctgggttgggtcagtgatgagaaccttatattgtcctgaagagaggtgatgacttaaaaatcatgctcaataggattacgctgaggcccagcctgggggagaattttggaaaaggatgctgggatcccagggtccccaacagggccactgtattttggacctgggacctggtggctctgaagggcatctggaggtggcccaacctgtctctgcactctagtttccctgtgtgggcttggtgtcggtgctccagttccctgggggcagggaatgttgatggctccttcctgagtccctgttctcgcctttgtctttcagtgagctctttcacctaggagggccccttggcattgactggcatagatggtgaccctgaagaaagacttcagttgggcctgaaggccccgggccagtgtccatcatccaggtgctcagctcccagtgcactgaagctcagacccttcctggttccctggtctcttgcactgagctctgatggtgagacttgaggaagacttccactgggcctgcttttcctgagccagtgcccatcacccaggtgctcagtccctggtgcactgaagctccagcccttcctggcgccctggtctcctgaactgagctgtgtgagctcttctgccaagcggttcccctggcattgaccaacatagatggtgagcctggaggaagacttgcgttgggcccaaaggccctagaccagtgtctgtcagccaggttcccaacccccgatgcgctgaagctcaagcctttcctggcaccctggtctcctgcactgagctgtgtgagctcttctgcccaggcgggccccctggaattgatgggtatagatggtgaccccggaggaaaatttgtgttgggcccactatccctgggccaatgtcagtcagctaggcacccagcccccagtgcgctgaagctcaggaccttcctagtgccctcggctcctgcactgagctctgatggtaagcctggaggaagacttgtgttgggcccacaggccccaggccaatgtctgtcagccaggtgctcagcctctggtgcgctgaaactctgacccttcctggcacactggtctcctgcactgagctgggattttccacctaggaggtccacctggcattgactgacatagatggtgagacttctgtcggcctcgcttttcctgggccagtgtccatcagccaggtgctcagccccagtgcactgaagctccagcccttcctggcgccctggactgagctgtgtgagctcttctgccaagggggtcctcctggcattgaccaacataggtggtgagcctggaggaagacttgcattgggcccaatggccctggaccagtgtctgtcagccaggttcccagcccccgatgcgctgaagctcaagcctttcctggcaccctggtctcctgcactgagctgtgtgagctcttcggcccaagtggtccccccggccttaagcggcatagatggtgagcctggaggaagactcgtgttgggcccacaggccccaggccagtgtacgtcagccaggtgctcagcccatggtgtgctgaagctctgacccttcctgactccgtggtctcctgcactgagctgtgatgaccatatccagtgagctcttccaaacaggtgggctccctagcattgaccgacagtgagctctgccacccaggacatccccctggcattgactggcatagtgagcttttccacccaggtgggccccctggcattgaccgacatagatgatgagactggaggaagacttccattgggcccacttttcctgggccagtgtccatcagccaggtgctcagcccctggtgtactgaagctccagcctttcctggtgccccagtcttctgcactaagctgtgtgagctcttccacccaggagggccccttggcattgactggcatagatggtgagacgggaggaagacttgtgttgggcctgctgttcctgggccagtggccatcagcctgttgcccagcccctgaggcgctgaagctcaggcccttcctcacaccctggtctcctgcactagctgtgtgagctcttctgcccaggtggggcccatggccttacacgacataggagcacgcatttcttgaagtcctgcaaaggtgatggtggtccagacaggagagggttccttcagcccaacatagcgcagctcccagctgaaactcggaaggctggtcaggcctcgaggactgcccaggccacatgagggtttggtggccgggagggccaatgatgctctgcgtctgtgttggatcagtgttcttcatggattccatcacatggtgagccttgaggaagacttgtattgggcccccacaggccccaggccagtgtccgtcagcctggtgctcacccccagtgtgctgaagctcagaccctccgtggcaccctggtctcctgcactgagctgtgtgaacttttcctcccagatgggccccctggcattgactggcatagatggtgagaccggaggaagacttgcattgggcctgttgttcctgggccagtggccatcagcctgttgcccagcccctgatgcgctgaagctcgggcccttcctcgcgccctggtctcctgcactgagctgtg

SEQ ID NO: 648 - DNA, 708 bp, Homo sapiens
cggcccctcatgggacagactgtacggcccaggctcctccgggcctggccagcgtggttatttataagccctggctgcctccagtgtgcctggatcagactggcttgtttgggtcaccggtgccaagttttttctttctttttctttttttccaataagaatctacgtctgagcatggacggaatcccagaatcaaatcactggatcaatacttggtcaccaaacacattcgagacctcaaaagctcaaaggctgtagggtaggtacccttgctacctactctacctacagacaaagacgctgagaaatcagataacttgtccaaggtcatggacagctgggactagacccatggcttgtcacactctaccagccttattcttaacctctctgcctgatgcctcttgacccacattcgactttgaaaaagttttcgcacttggttcatcggaaaaagccacacacagctgcccggaggactctgttaatcagtagctggttgcttctggcccagtgggcaacatcagaggcagaaagtacagtacagagagaaccgcaggccagcagttgcatctgaacccacgctcttcctcccagccctttcccttgtcttgactcacaacctagtgtcctcagtatcgcccagcacgtgaggcagccggttcactccagccttgaccagggccatcgcgggatcagagcctcctc

SEQ ID NO: 649 - DNA, 2524 bp, Homo sapiens
gcattgctgtgtgtctgccaccgctgcctggcactcatggggccgtgtgtgtgtgtatgtgtgtgtgcgcgcatgtacatgtacgcataagcgtgtgctgtatgtgagcctcctgggcatgggtgggggttggcattgcggttgccaatctagtgtacaaccagaaggacagagggatggagtggaagaaggaggggagaggcttggggtctgggaggggagaagagggtgcatgagttgcttcatgctgcctgcttacaggcattggcattgtagctgccacccttgtgcccacggagatgggaggaggcgagtggagggcgcagcggcaggagtcctgtgctctgggaggaaggctttgtacatgggagctgttggcatcacatctgtcaggccggtgcccagaactggggcaatggagactgggggatccaggaagcagggaggaggggcagaatgtgtttctgatgttgctgtccctctagaagctcagctctgaaaaatggttggagtatgaggtgattagtgctcttccagcttgaggaagtaaagtggtggagagagtagccagggaagtgccaagaaacagtctacgagccagggaggagggagtgtgccaccgtacccagggagaacttgttggggctggcaatctggccctttgtcagagtattgaaggagacagcaagaggaccagatgtgaggtgggtgggtgctggcactgcccatggcacctggcacaggctctggcattgtgtggaacaggggaggttgacagtgcctcttgccaatctggttgagagggctattgtgccaggagtgagaaggaaggaggtgaaacatttcgggaggtggggtgtttgggagaccagatttttttctgccaggtcctccttccccttccctcttaggcatggggagtggagcaacagacggagagtggcatgaagacacaaaggaggaagcacaccattgccaagaccccaaggaagaaggatggaaagcgctggcagtcctgcctggcccccagccagttccctgctgaagatggccagatccccttgtctggcctcccagctctggcaccagattgggatggtggcctgtccccagtgagaaggaggtggcaaggaggctgtctcttgcactttgcaagatgcttaagtagagacagggtttcaccatgttgtccaggatggtctctatctcctgactacctgacccgcccaccttggcctgggattacaggcgtgagccactgcgcccggctggaaggaaaacattctgagtgaccgtgtatgtaaataagtctttctggttattttattctgtgaacctgtgtgatgtaatgactgcatttaaatagtattacaacaaaaactaattgtaataatagtaaatagctaacatctttaaatgtttgccatgggccaggcaccgtgctaggccctcggcaagtatcacatcacctaatcctccacttcaatctgatgcaatagatgtagctattcattcctattttacaaacatggagactgatttagatgggttaagtaatttttaagatctcctgcttaaaaagaagtagagttgagattggaactcaggtagcctgatgtcagtacctctgctcttgggttaatttgtaagcttctgaactctggctggtatgcattttgaatgaggtcttttgagtctgattgtattactctgtgtgtcaccttgagcatatgtgctatcatgttccgcctgaaggtgctagatggctgtcttccatttggtttgtttcttagtataagatggaccagaagaggagcactgctttgcgcaactccagggtgcgtcattcacactgcagtccatgcaggggcactggccatgccctgtgtgaaggaagggaaggagcgggagggagggagtgggaacaggagggaagggatagataatggcgggtagtgttctttgaatgatatgtgtacccatttgtgacaacatctcttaaagttgaaggtctacacatgtgtatccatattagcatatgaacttcatcagacaagcactctccctccaacagagggagaccctgtctcaaaaaacaaaaaaaaatagcctttagagtcagacagacctggaatcaaattctagttctgtttcttaatatgtaaatgacctcaggtaagttgcgtaaagtctcaatttagtctcttcatatagagaatggggcaggccgggcacgcgcctataattccagcactttgggaggccgaggtgggtggatcattggaggtcaggagcttgagaccagcctggccaacacggtgaaaccctgtctctactaaaaatacaaaaaaaatgagccgggcgtggtggcatgcacctgtaatcccagctactcaggaggctgaggcagaagaatcgcttgaacccgggaagcagaggttgtagtgagccgagattgcaccactgcactccagcctgggtgacagagtgagaccctgtctaaaaacaaacacatcagaaacag

SEQ ID NO: 650 - DNA, 239 bp, Homo sapiens
accaatgtaatttgcttgtattttcatttttatgtatgggcaatataataaaaatgtgtctaatgaagtctaagaaagctttctaagtaagtacaaaattaaattctaagtgatttttcctatgtgtatatttttcttcattttccagactacatatttttgaaaaatgtaccattagtcttttgtaacttaaaacgagttctgttgtttatcatataaaatgaatgcttttttcccaa

SEQ ID NO: 651 - DNA, 563 bp, Homo sapiens
attctctctttgcctgctgccatccatgtaagatggggcttgctctccaccatgatttttaggcttccccagccaactgaaactagtcttttagaatccattcacaggacttgaatcctggatctgagtttgcaaaagaaatgaagctaatgaaagacaaggaacttctggtcttagttgagatgcaaaaagaatttcaaggagaagtcaaggaacaaaaaacaatggccaaaatcatgctcttcctcacggatgactttacttgctttccccaccaactgaatttgaaatcactgttatgtgctcccatgatacctttaactccatgaatttcatccaccatataataaggtagatgatattcatttcccaccaggtgaaagctctcaagtctggaagtcctaaatcaagctgagggctgagccacgcttcttccaaagcttccaggagaggacccttctttgcctcttccagcttctggaaaacatttccatctggctttcctctgtctgacttaaacaatgattttccatcctacctgaacattataatcatctggaaga

SEQ ID NO: 652 - DNA, 360 bp, Homo sapiens
ttctgttttagttttgttttggttctaaaaagttactctgatatttcagctttccaaatttattgagacttatggtctagcatatgatctgtcttgacaaaagtttcacatgcacaggaatatatatttaaactcaaggtgtgcagattttgttcagatagatagtgtctagattttctagattgtcagtgaatttttacaattgttttataagttacaaagagaatagtgtaaaaaatttctgctgtgattatgattttctttatctttagttctctcagttcttcgtgtatttggaaatatcttattgtttatacttttatgaacatcatgactgtaataaattttatcttttcctaa

SEQ ID NO: 653 - DNA, 782 bp, Homo sapiens
agaaatcttacaggcaaaggctattcgacatttgggattcctaagctaatctttttatttttggaagggtgtctttctgagaaaggcagccagaggcacagcaccaacctttctgacagtgtggtcttcacactgttagttctgacaaagggagtcaaggagtcgtccttggaggaggcgatgaggccagtggaagaattgtggctggggacccctccactgctgagggagatgtcgatggactcacagctggtgtggaggctgctgacagactgaaagcccaggccatccttgctaactgcggaggagctgctggcgttggtgccccagggccaagacagccccggcctcttaccagttcctggggtcttcagtgcgcctgccggggctgaaggcttcgtccttggcatggtgatgcccacctgagctgtcatgcctcgccgccatgagcctgtctgggagatgacaggattcttcttgcccgacgtgcttttgtcggactcgtcagacacatcagaaggattccgcctccacttggaacctggctccatttttatgccgctgtctgagcctccgtctgatttcttgacatcatcaccagaccacagggaattcctctccacctgtgagtgcttctcagcatcagtctgtggacagagactctctgaattagtccttccccagtcccaggctgggaagcccctcactccaaaggcaaaaatgccaaaacactggagtagttaagggaaaaataagcattactttaaagatgtttggacttt

SEQ ID NO: 654 - DNA, 2365 bp, Homo sapiens
cacgaaacttttgtctgtgtctccccataatgtgacctttagaagttgccaatggcccacccaatacccaaccatgatttttctgagataatctgcccgaggtgtgtgagaggaaacgcgaagaaggcagtcaggaggattcactcttgggggagctgggtaggatcctatctcctcctacatccagagcatgcaggctccatttagatacaaaggggtgggattgggttcctggggagaaattgagcccctttgattctgcggttctgtgggtctaaatctggcatctccttggctatccacccccaggctttgtgattggttggctgtggttggtgggggggcaggaagctgctggtggagctgcagcatccttcagtctcaggcccctgggagggggaggggaaagaaccagggctgagctgtggagtgaaggggagccatttctctccaccgactgcaacctccgtgctcacagctcacggttcaccagaatccaggggcttggtcggcctaggaatccacaatgctggatattttcatcctgatgttctttgccatcataggcctggtcattctgtcctacattatctatctgctctagtggcctggagctgcggccggagcctgctggagaacagctcagaaggaaggatggagatgaatggccgagtgccctgcttgctgacgcaccggtggatttttgcttctgctgttatctcggctcctggtctctccagtccaacaagaggcctctcatccacagaagcagtcctactgcccagcagacctctttcagagccttccagacatggctgacccctggcaagcaaggggctttttgagctgagaggcacttggctgggacttcaggaattcatggacagggctggcagatactgcatatgtttgagctgtagatgggattgagaacagaaagttgaaatggagacttattaaagttaccgtggagaactgctcaaaaattcattttgaattaaggaaacttaaattcattttaagtttccttagatctaaatgcaactgcacattacactcaaatatgttccttccttctcacacacaggactcccttgtgaaactcaaggggaagttcaagttgtccatcttcatctatgaagtagtcactttatcactgtctttacagattgcacagtctggggttttgtggtttctcttgtctcactctccagccaggaagaacttgtcatttgagtttttaaaatgtatcatttcttccccacctcaaaccacttgtatcccagtttctcatttaaagggagaaatggttatatagtcctctctttgcacctgattgaattataaatgatagaaacaagatggctatacttatttaggaaaaatctcttaccccaaaatgagtgtgtgtgtgtgtgtgtgtgtgcgtgtgtgtgtgtgtgtgtgttttaatcaaagatcttttctggaaaaaactttccacatagttctctgacccattagagttgaagaaactatgtattttgggattcagagtagaattggcctgcaaatctggggtgtttattccttttacaagtctatcataattgttctacatttaattttcctttcttgcttaaaagtaaacaaggagagtcaggagtggtggctcatgcctgtaatcccagcactctgggaggccgaggcggatggatcacctgaggtcaggagttggagaccagcctggccaacacggtgaaaccccgtctctactaaaaatacaaaaattagtcaggcacagtagtgcgcgcctgtagtcccagctacccgggaggctgaggccgaagaattgcttgaacccgggaggcagaggttgtagtgagccgacatcatgtcactgcactccagcctgggagacatagcgagattccgtctcaaataaaataaaataaataaataaataaacaaggagaaagattagtttttagtaataacattgtgtccaatttccatgttttaaaacaaaaattgaggcattatatgtcacaactgaaatggaaaagttgtgtttaaaaattatggacaaggccgggcacggtggctcacgcctggaatcccagcactttgggaggctcaggcaggaggatcacttgaggtcgggagtttgagaccagtctgaccaacgtggtgaaaccctgtctctactaaaaatacaaaaattagctggtgtggtggcaggtgcctgtaatcccagctactcaggaggctgaggcaggagaatcgcttgaacctgggaggcagaggttgcagtgagccgagatcacacctctgcactccagcctaggtgacacagcaagaccccatctcaaaaaaaaataataat

SEQ ID NO: 655 - DNA, 922 bp, Homo sapiens
ggcagtgtgtaagacgctcacgggcgcgcggactatcgggcggctaggctctctgaggaggctgccacagtgaagcaaccgtgacaagtggtgcccgaccagggacctgaacgaggaaggtctgccagagcagagaaagtgaaactgatcagacgaactacgaacccctggacgggagagtctgccggcggagaatataaggtgtgtgtgaccatggaacgggagaccggagggatccatggtattcaaccgtgggcctgttacctccagtacgagccatgagccagcggaatctgaatgcaaagacagaacaagggccgaccggagtcacaatgacatccaaccccataacatggggacagatcaagaaaacgacacaagaagctgagaaactactggagcgccagggtcaggcaaaaacccctgactccatgttcttggccatgctagctgtagtgtcctgtgcgtctataggatcgggtgaaccaccaaccggcaattgaaagctgcacagcctgaaattacctttattcaattaatgcaaaaacaaaaggggagatgttggaggccgaaggaatgagggtcgtgaccaactcagtataccactggaggctctgtgagcaaacagcaaactgttctcatgaaagcaggatgttggcgaactgacaaactctgtctgccgccagaaggaatgctgggggcagtcatgtcccaggtcccgtgctccttgaggttatccacaggaacatccagaacctgttgaacaaagaaaggaatcatgtgggcctgtgttaaatcaaatagctgaccgacagttatcccttcctccctattcactctacctaataaatatgaagggctgtaaaagctcaggtccctgttccctaatatcaaggagccccctgaccccttctttcaaaca

SEQ ID NO: 656 - DNA, 2177 bp, Homo sapiens
caaattgtgatatattcatgtgttggacggcagtaaataagatgaaacctgaggagtcagatccaccttcccccattcatagaggcttttcagcctcattttgaggtacagttacatatcttttgccttttgcccccgtgcatagctatctacagccaatcacagatcacagagtcactggactatagagctggaaggaagctcagagacaatgccaagggggcagaaaatttatcagaagccagtcccagtgcgtttcctccatttccttctgcaggaagactattttgggctgcctgaacattgtatcaaacctgctacctatactatggtctacctttcctccagtggaattacaaaggcactaactgaaatgccttctagaaacagagaaaacgaaactgtacttatttactcttgatacacagattatttataaaacagattgaagtaacctgttaactggcaaaaagagaatgagatcggatttaaatgtatggcagtaagtcctattgatccctccagttatctcagtatgactgcagtatattcattcactaaaaccactcactagataccaactacacacctggcactgcagatgtaaaggtcagtcacacatgttctgactttacagagttcacagtagcagtggaggatgatatatgtggaaacaaaaaaggcattgattctattcagagcactgttagggctcaaaggagagaggggtctttccacctaagaaatgaggaatagggtcatcatagaagtgaccttaagtcttaaaaattaagaaggggattccaagctgcttcagacagagacacatcgagctaaaacacagaggtatgaaagagcacagggactttaggaattgcacagttcattctaacaggaacaaaaggctcaaggggggcaagaaatgaggctgtatggaaagagattcaatgtaagcactttataaaatagattaatttctgattcaatgaagcatttcttgatcattgtgtacaaggcactacatgcatcatggaaaattcattaggatgcattgccagcactttgcagaactgatattattcagcctcaagctttccagtggccaaagggaaatgctgactgcttttcatatatttgagtcaaagattttttatatggtcaatgaagactaatataagggcagtgggattttcacagatgcatgccatgttgtcgagagcctcttagattttctcaactgtgagaaagaaaaacgaaaatgttgaagacgttgagtctggagaggggatactaatcactgtccagttgggcactggtgggaatggggaaatggcacaggaatgcaagcctctccaccctaccccccgaactccagccatacactcatcgtttcacaaaatataaatgagttagcattaaatgtttcagagtaaataattccttttcccgaaatgcatgaagatagagtaacagacttctcacactgtatttttagggtatggagaatttagaaggttaaagaattactgcttcaatttttcagttaaaaaaaaatcaggaagctctgttcattcaggctatgcaccatgtgcacagtcaagaattagcagaaaccctctgcatttacaaacactttgtgctataaaaaagtaatttttaaaaagccacgtgtgtgtgtgtgtatatatatatatatatatatatttaaagccaaggttttgatacttttttacaaaaactacaagagaaaacaaatatacctgtccaaaccatatacttttaaaagagcatttttttttccatacaagctgttgttaatttgggggtaaagtgctgatttgcaaacttcatcaaattgttcccaagtggattctccttgtttgtctccccctaccaaccccaaagttaccatatttgatgtaagaatcaggcatgttagaatgttgtgtcacactaactgattctgctctttttgtcttgtcattcaagttccgttagcttctgtacgcggtgccctttgcagtctggtgtctcttccagaggcgagggggctgaggatggggtgctgcatctcactagctatactggcatcatcttggtaaactgaaaaccaaatgtggacatttgtaaaatcagtgcactgtttctagagagagattaaattcatttaaaaaaaa

SEQ ID NO: 657 - DNA, 873 bp, Homo sapiens
agtcaatgactcagggtagccaccgaacatgatgctcgggcagtgggtgccacctggactccactctcccctctctctgggatcatagagtccaaggtgttctgtggcctctcggccaatcccagcagctcagcgtgcagaagaccgaggagccattggtcagtgtaggaggtgcctggagttttggagatgggatccacaggtctcttcacaccgaacgcctcttcccctcttgtgccagcttgatgctgacttcaatatgtttgggctgctgggcccatgggaggagaaaggctgggggaattcaacacaacacgaaataatcaacaaattcggggaatgttaatctgaccatcaccagttacaaatgatgtttcatgctaccttctattcctgccttcataaatcaagctctaaatctccaggaaaaaatgtgctcaggatggccagagaaatgtccttccaactgtgcatggaaaggtatgattttgtgcagcaggtgaaggactggttagagtaagtgtgtgctgagcttttgtgtttgaaagcgagcctgtgcacttctaacgattggaaggtttccttgccttctccgatcttacacacagcaaggacagcaaagccttccagacctgcctgtgacatgcactgcacattctaaagatgcctatgcaatggaaaacaccactgtctgctccagcacagctgccattcttccatcttatcgaccttaatgcaacaactcctcacaggcagagattttaaaatgtgttcttggcagaagagagactcaaagatgggacaaatgtgtcatttaaatgcctgttaaaatggaaacagacatagtatagtcagaggattgtggcagctaag

SEQ ID NO: 658 - DNA, 174 bp, Homo sapiens
gaggaatcctgagcagagccccagctcctgtgactgccgtagcccttgcgtgcaagagggctggccagggcttgtgggtggacttcaaaccaacacttgagtgccctcaccaagtcttggcccctgtgtgaattcctgcctttcccagaaatgagtccagggtgtctgacctca

SEQ ID NO: 659 - DNA, 3505 bp, Homo sapiens
agcggagccctccctgctcccgggcggctctggaggagctcggtgtttgcctctagcccttcgctaccggaggatcaggttcctcccctcctccccctccagctccggccgccgccgccgccgccgccgcctccttcttgcatgacacagcagaaccgcagctgctgcagcaatttcaagccatccgcccaggaagcgccgcaaccgggactcgggaggggtggagggggcgaggcagaggccgcggccccaggggatccttggccccactgtgcaccacacactcctttcccagcccaggggcacgcgaacaaaatgaggctcaagctgaccaggccgagccggaggaacgctggggcttggcagcagaagggatgggaccagagagaagggtgtggaggagaccccagtgagggccaggacatttcaggtaaagagaggtcatatctccgtacctcacttcctgacacaaacaagttttcactgttgtcagcaacaaagccctaatatagctgcggaagagaaaaactgcattgcattttgcctcctgcaagcatcatcaacagttactggaggaacgtaattccagaaagcttgaaagccgtggtgatggtaattatgtatcaaatgcctggttctatttctgttattattgttttgtcatttctgttttcccagcgatctgactgaactcgcagagggacaaatccagtttttctttttgacttttgtcaaactaaatcaggcctgatagaaaactcattgctctccggggaaacaaagtaggagccacgaaatgtcattttaacagagcgtgggtttggtgactgtaggaaaggatttgaggacgctccttctgttcggcttcctatgtcatgagcacaggctccacgcacgcacagacaccacggctcccggatgctgtggctccccgatcggggctcctgcagcgccagaagcccctccgggatgcttcgaggggctcccggtgggtggaggtacggacgccgctgcggccgccgccgccagtcctgctgctgttgttgctgctgcagtcacgtgggagcccctttaagtttccatagagaggcctctctggtgtcacatgatggacatgatataatgaaacaacattgtggagaggaaagcattaggggagcccacggctacaaaaacaagtgagtgagaagaggtgggaggaagagaaactacgccacctcccctgcagccgagtgcacgcagcagcctggcgtgacaagtgggcgacgccggggggcagggagccggggtccttggccctggccggggaccccaccgcccaccgcgcggaggacaacttttagccggcagcccagaccagcgcggcacctgtctccggagtctccaccgctcctcccgattcatcccagggaaattctcaagaatacgctctacaaatctacgtgcgcatcattttcacctcgcgtcgcgcccgggaggaaggaacgaggcaaggagctaaagcagcgtgcgttcagccctggggcattttattaatgcttttacgagttagaagagttgggataatttgccatctggagtttctctgccttgctgatctgagctcagacctgccaatttaccagagataattgataacaccctgtaacagctgaagacagagtcttaccctgtcacccaggctggagtacaatggtgcgatctcggctcactgcaacctctgcctcctgggttcaagtgattcttctgcctcagcctcctgagtagctgggactacaggaggaaaatggaagaaacggagatacttttagtgaagcagaataaaccactgaacaggaaaaatgaggaagctgtgagtaccagtggaaggaacgagccaggaagagggactggaaccatctcagaagccatgcccctcaggctggaacttgccctgtctcctcgcagatgaggtaggaggctcagcacgggctggtgggagcagcccacagcagcagtgagggtcagtgggcctgtgagttaagaagaaggtggcacagagcgagggtctctggatcctgactgtttgacttttccatgattaggataagtagccagggcttggctagttggagagttactcgaacctcaggtgacagttgtaaggcagcacatagtgaaaaagagtcctagcctgggaaagtccaaaaccttaggtctggtttcagttcactcacctatctctgtgacatagcaaagtctgttaatttctctaattttctgattagtagtatagttgcaggaatgaaataaaaatggtcctgattactcagagattcatttactgattactctttttgtgacctgaataaagagtacaacatctctcaaaaggtaacaatatgatgtttcaggaaattagagaagttaagagactttgctgtatttactatacagatagttgactgacagctgagcccggacccaagattcatttataaaatgaaggagttgagaagtacatactctgaggtttatcctaaataaactgaagtctaggcaagtggctgagctaggtttgccatgaatcaatctgctgagtatatttcttggtaactagttcatctttccttaattcagtcaacaaatatgatatcaagtttagtaagatgatgacagttgtcatgtaatactccatctggaagattgtatgcttctcagcttccctaacttttcttaatctaccttaagcttcctttctgaaaggtttctgtctttcctaacagtctcttctttccgccagctacctcttgtgtttaagaattaaaggaagatgagctaggaatcaagaaatacgcagaactgattcctgtcactggcgccaccctgccacttgcccagagctgtggtataaatttttttaataggctgaaataaaaatatgaatagcattttggtattaagcattaaattgataaaggctatgagatacacctgctctcaaccatgttaattttttattattggtattaataaattattacttactaacatattaacaagaattgcattgagaaacaaagcatccacaggccaaatcttctgaatttcaaatgtttatattaatgcgttgtattctagaaaagtagaattgtcttaagtagctttgtaatataaagtcatctatcagcccattacacctattagaatgttttaacctttatttcccacttttttgtttctagactgagtgtacttggtctggtatttgtggcataacttacggaacacataagaatgatacagatactatttaatgatgacctaatacaagcttagatagctaaggtgaaagcttctatggccttaacattttcctcttgaagaatgtattttctgtaataaaatacagtggctacttgaaatctataaacttatgtgaggtctggataaatctgagcaactttcttctttgtgctccaggaacctacgcactatatatataaataaagcttaagtaaacatc

SEQ ID NO: 660 - DNA, 837 bp, Homo sapiens
tggtttagcatgctggagctggttttctgcttggtagccctacaactttggcccaactacttggcctctgggactcagattcctcctctttaaaatggtgctaataatagcacccaccctctgtgaggaggatgctgtgaggacaaaatgagatcatccacataagccgtgaaccctgttcctggtaagctcctggaaagaagtctatggattatactcaacctacactccagttaaaggaacatctacacacagaggaaatgaataacatgaagtgaagtcttcatctccattcccaacagtccccattctacttgcagaaaggttgcttacactgaaaatcagtttattttcccctggtgcaaagaacagtcgtttctccaaaactgaagctggaaattatctgaaatatcaggtcctccggaaaagggacgtgaagccccctttgtaatttctgcattagcgtgctctcctggcaagcaggaaacctcatcagagaagtcagccaaggaaagtctttaaatggaaattgtgcaaacgaggagcaaatgcattaaaaagttgctgacgggcatgaaatgctttgatgtgaagacggaaaactccaagcaggaaggattttaacattttgaatctgattgactctgtggtttctcagcacagttattccatgggctaaaataaatgcagaaatggtactttcagaccacagctgcagaggggatcgtggtgaatttcaatgaaaatccatttgaatcttgaggttcagatcttaaaaaagcaaaggacatgagagaagtaatattgttgcttgaaatttcattgcttatatctaaa

SEQ ID NO: 661 - DNA, 238 bp, Homo sapiens
tggcaagaaaaagtttctgtgaagatggcacttcttagcatagtcctcgcccttattattaaaagatgcatttccactttgacagtgatttccccacccgagagcctggttgggcagccctgagccccttagccagtatctttcccatcagctagcattagctgccaccagtcctcccttctcctccctcacctcttcagggtgtacctggagcagctattaaaactctttaagccgt

SEQ ID NO: 662 - DNA, 3482 bp, Homo sapiens
gtgctgaccgtggtggctgagaggctacaggaggcactgaggggtgctgggggcttgatgccaccaaggaccccagaccaagtcatcttttttttctcgctcagctttgaagggaagttaaagacaaagaggaagaggctgtatttcattctcccagatggctcctgccagcctccagagaaaaggcagctttcttctttagaaaattggcaggacaaaagaaggaagtcgacttggaaagtccagcgacagacctcgtgcccctgctctgggaggccgcaggtcaatggctccccctggcttcaggggacacagctcaagcctggaaggagcccatggccagcctgaaagccttgctcacacccagcatccgcagctggggcaagagcggctactcccaagacaggaaaagacacacagcctaactttgccactgtgaagggagacttctctctaatgcctaactagacacttatcttccaacctcctcaaaatgccttcaatagaagtcccaggaagacacggagccccagccgcccactgactcctacaggatgcagctgcgccaggcagcccatcccagggggcccaggccaaagaggggccagggtgcttcccctgagaatgaaaagggatgtcgggtagagggggagggtgatgtgggactcgctggtggctgttaaaggagctcgcgtctcggttcctgcaggaaaagtgctttgagcactcgcctggcctggtgaagaaggaaggcagttggcgggcatttttggaagctctcaccccccatgctggtcctggtaccccttctccagggatgcggggcccacattcatcacagtggggttccatagatgatggtcctgtcatatcagggttcccattgaagggggccctttttggcactttcttttattccattagtctgtttgcctggtcacacattttattgctttttcccgcaaaagaatcaatgtgggaatttatttatttatttattgagacggagtctcactctgtcacccaggctggagtgcagtggtgcaatctcagctcactgcaacctccgcctccctggttcaagcaattctcctgcctcagcttcccaagtagctggaattacaggcatctgccaccatgcccggctaattttttgtattttttgtatttttttttttttctgagatggagtctctctgtgttgcctaagctggagtacagtggcgtgatctcagctcattgcaacttctgcctcccaggttcaagcaattcttcctgcctcagcctcccaagtaggtggaattacaggtgcccactaccatgcctggctaatttttgtattttttagtagagacgggatttcaccacattggccagattggtcttgaactcctgacctcatgatccacctaccttggcctcccaaagtgctgggattacaggtgtgagccactgcacctggctgattttttatatttttagtagagacgggtttcaccatgttagccaggatggtcgcaatctcctgacctcgtgatccacccaccttggcctcccaaagtgctgggattacaggtgtgagccactgcgcccagccaggaatttatttttaaattaaatttgatttatttagtttcctaacccttttattgtttttaggcaattttttgaagtataatatgaataagaaaattatggtgaattgttacagcatcgagacctccaagaccaggacatagaacaatcccagcccccagaaacctccaccccataaggctccacaacccctcttctaacacacagattaccttcagctcttcttgaacttcatataagtgtgaaactcacccatgctgttgaacacagcactgtttcattcatgtaagcggccttatagtattccattatgtgaacgcagtttattatccgttctgttaatcacagtagtttttacctgttgtgagtaagggtgtcacaaacagcctcatgtgtactttgtggcagatggaattcttgtacagatgtggaacatacactggatttgaagtgctgggttatagagtatgcacatgctcagctttatcaaacagggcttaacagcttttcagagtggctgtgccaactcacactctccaacagtctatgggagttccagttgccccacacccttgccaccacttgcaattgtcagctgtaaattttagccattttgtcgggtgtatattggtattttattgtgtttttgatactcgttgctcccgcaatcgttgaagttgagcacggttgtatatgcttattggcaatttggatactgtctttgcgttttcaaaaattgggtttttgtcttttattgatttgtagaatttctttattctgaatttgagttcttagttgtgcttgtgtgtgtgcacatagtaaacacacacacaggttaaaataattgggagatcattagaatgagatgaccccagcgccttgggtttcaactcaagcaaaccaaagtccatctcagtgtacatggttatagttcaggtaagcagaaaccaccggctgatctctaacacggggcttttgactggaatgatttctttccctttctttctctttctttctttctctctttctctctttctttctctctttctctcttcctttctttttttctttcctatctttctgcctttctttccttccttccttccatccttccatctctttctttttcttttctctttcttttctttctctccctctctctttctttcctccctccctttcttccttccttccttctttccttccttcccttcctccttccctccttcccctccctccctaaaattcatagaataaaaaaatgcctgaatagccaaagtaatcctaagcaaaaagaacaaagctggaggaatcacattacctgacttcaaattatcttacaaggctatggtaaccaaaacagcatggtatttaggattgttttcccaattctttgaaaagcgatgttggtatcttcataggaattgcattgaatctgtagattgctttgggtagtgtggtcactttcacaatattgattcttccaatccatgatcatgggatgtatttccgttggtttgtgtcatatacaatttctttcagcagtgtttgctaggtctccttgtagagatatttcacctcttggtcaagttatttctagttattttattttactttttgcagctattgtaaaagagctcgggttcttgatttgattctcagcttggtcattgttggtgtatagcggtgctactgatttgtgtacattgattttgtaacctgagacttcactgaattcatttatcagcaattcattcatttttagaggatacttggtccatgcacatgtcagagattgttgtaatgtttctttcttgcaatgatctcatcacattttaatcacaaagtcaggctagtcttttaaataaagttgcaaagcattaatc

SEQ ID NO: 663 - DNA, 637 bp, Homo sapiens
agttctggaggctggaagtccaagatcaaggtgctatcagggttggtttcggctgtggcctctcttcctggcttgtagacagctatcttctcgcagtgtcctcacgtggcctctttgtgtgaagttaaaaatgaacagatcaaccttttactcttctctgaaaaatatagtgaaattaataatcaagaacgattttctgaaatgaaaacatccgaacagcatactgcaaagacattcaggggaaaataaaataggttttggcaaacgtctaatgacacagagccaccattgccaatttcaccactgtctttcaccaagttgattcattttgaactggctccagcaatctactcagagttgacctcagagcaaaaaattgaagtgggaagctgctaaagaatgtgcttgactaaaacaaggcaataagcaaaaggaagtcatagcatccagaaaatgggatccatcatgcgcacaaagaaaaggtgaagaaaatttccaggatgttcagaacccaccaaaaacgaaagattctggtccagatcagaagagagggaaacactctgaaaaagtccctcaaatacaaaattaaacagagtttaaatgatgtgcttgaccacaataaaaggcttcttgctct

SEQ ID NO: 664 - DNA, 525 bp, Homo sapiens
ggagttgccagtgcttacctgttccctcggtatacagggcagggaggtcctccgatgggacttgctgctgcagccggacatctcggcggacacgacggagctggaccgcctcctcctcttaaacaccgggatatcttccttggtcccagcaatcagctgggaccccaaatgctcccttggagccgcctccgcggactgcggcaagatttgttccacgtacctggccaagaggatccccagcacgccggccaggtacgccaggtaaggtctccaggcgaccttgaacctctctaaggaaatgagggacacggtcctgaccgcgctagtcaaggcgatcatgaggacgcccagcctcagcctcagcaccagccatgtcgcggcggccaagcagctgagcaccacccccgcggcggggagtgagaaccttactaaaaagtcaatattcctacccaactggatcaagattgtagaacacaaggatgcatccttaaccttataaaaatgccttggaatttttaatgagca

SEQ ID NO: 665 - DNA, 646 bp, Homo sapiens
gagaagcatgggggccttgggatagttccagaatgaggatgtgcgtttctagctgctttgcgccctcctcccccaaaaatctgctaccacaattccaacccggcggcacgcccccaagactcctttgtcgccccaggggcgggacctgagctgtcgatttcaggagcccttcgtgacttcaaaagtcctgggcactgttgctcatgagtgctgcacaactgtcgccctctaaagccacctccatccctcactgggctggcctcctgagccttcgaaggaagcccggtgccagccagccttcctgaaagaccaagcccgcgccatccggcttcctccagtggacgcctgcaggacccaggtgagacacggaaccggttggggacgcgagccagggatcctgaccggttgggggcggcgagcaagggatcctgacttgggggcgttgcctcccggaatccaagcggccttttgcccgggtctcccgagatgcatcgaaattgagctcgtccacacagccccctgactgcgtgatgcccttttctgacttaaaacattccttgtacctttatttacacgatccaagttgcagtgtgcctagattttcctccaaggacaaaaatgtgaataaagcaatattttagccaaa

SEQ ID NO: 666 - DNA, 1704 bp, Homo sapiens
ggaggttcagaagaaatagcacagagtgaggacagcagaggtaaacatgcctgcagaaacctttctcttggcatgcagagcaaatactataatccaggtgtctcagccaatgaggcatttaaacagatacagaaaaatcattaaagaggatttcagaagggtatgctcacctggacagattgcactccatccttccagtgtctcctgaactgctctccaggaatcattttcatcagaatcactggggcatttatgattcaaaaatgctttgaatgtggcagtgcctgaatctacagttttccatgtgatttttagatatactaatgtttgagaaccactgctgtcaacagcataattctgtaagattcaaaatactagttgtaaagagttaatttagctgaaatgcaaattttgatttgacctgctcccaattccagacctctgaaatcagtaatgacaagaacctttgggcattttcaggctcagtcttcagaggcttatcctatagagaagaggaataatttctgtagccacatcccaaagtaggggagatgggccactaggtacacagctgcctttgtgaagaagcagagtaggaaatatctaccctgcaatgattggggcacaggaaagctggaatccaccttattacaacagctggttaatgtcatactgtgaactcattgagcacctgctttgtgagtattcattttctatttttaaattttgcatcaaccttgtgaggtttttggtatgtttatctccattatacagatgaggctgctgaggctaagagaagtcaagtaatttgcccaaggtcatattggtagttaatagaactaggacagattccagggttgtggtttgaatcaggggttggcaaactatctggcccactgcctgtttttgtgtggcttgcaagcaaaaaaaaagatgtttacattttttaattgttcaagaaaatcaaaaggagaataatattttgtgacaagtgtaaattacataaaattcaaatttctatgtccatgtatttagttttattggaacacagccatgtccatcatttatgtattgttaatggctgttttcatactacacagcagagttgagtagttgtgacagtgaccttatgctcttgaaagcctaaaatatttggtaaatagccatttacagaaaaaagtgccacctcccacttgaaccattatgcctgcatttctcaaacttcagccatttgaattctactccttcatgattcttgccaccttttcataccatctggaacattaactgtgtgacatttttctttagatcaattaattttccttaaataaatttattttataaagaaacaaaaatgaaagcgaaaaccagtaccaattgcaagaaatagaagaaaactgtaaaaacaaatacaatataccaagaacagtgtattcatattagatttcagctaaatagctggaacagacaatgttggtgttgcttcatttccctgcagatcccctgaccatttctctgtaagccatcagacttccaatgatggacctgaaacatttttggagggctgctctcagtctactggaatcccctttgcacacaagcacaataaattgggggtgcctgagaatccaagttccactgtggatagctctaaccaacaaattgtgggtgcgggagtatccacatcccaccttcctatcccct

SEQ ID NO: 667 - DNA, 533 bp, Homo sapiens
tcatgtagcgccagccacaccaggaacagaagggtgccgggtaccttccgcatgcttggtattctccccgcggggctctgaccgctgccgctctcaggcacctgtctttcctctccgtcccagaatggagccaagacaagggaataaacgaaattcaatagtacacggagatcgggtgtctgggcagcgtcttggaaaaactatccactacagtacaggtcaagtgaagttcttctgctgatatgttctgctactgcataagagacggaatctatgttgcctcgactggtcctgaactcctgggctaaagcgatccttctgccttggcctcccaaagtgcgaggattataggtgtgagccacccaacctggcctttgccagtatttttaaatccaaacacctatgcatggtgcttactaataacacagtggtattctaaacatttttcacctattatttaatctttattattatcaccatgttacagataaggaccctggctaaatagcttacccaacattactccgttaata

SEQ ID NO: 668 - DNA, 539 bp, Homo sapiens
ctggttctcctgcaccagacgccgcacctgcgcccgcagcttctgcttctctgattctacagcccccaggtggctcgacaatgccaagatcacctgtgcaaccagcccagcctctgctgccacagccagtaggttactgctccctgcctcagggctagcgcttgcccacagaactctgctagatggctgaaggaccacccaaagactccatccccacttctgctgaggggccacagcatcccctgcctttctgcagctcccaggtcttgctggacctacctccagaacatccagaactggtcccttttctccaccgtcatagccaccccttaattccaagcaccagctctcatttgaattccagcagtggcttcctaaccactcattggagagtgattccatcctcgacccactgaggtttattctccacatctcagccagagagagtttttagaaactcaagtcagactgtgttgcctgcctgcttaaagccctccagaggctttctgatttcctgagaataaaacccaaaccaacca

SEQ ID NO: 669 - DNA, 478 bp, Homo sapiens
ctccccagctggatgaggcagtggctgaagcccacctgggcaagctgaatgtgaagttgaccaagctaactgagaagcaagcccagtacctgggcatgtcctgtgatggccccttcaagccggatcactaccgctactgagagccagccctgccaagcaccaatggccagagacctgggggttcttggtaaagctcatccctgtgaaggacagtgaacacagatcaagaagtatcagctggaccccagcatggaggagcaactgcagacttcagcagactcattcaggtcaatcacttgatgtggcctcttactggcaacattagccatggattttgtacccttaggagctatgatgaaaaaaacaacacaagattaaatcaaatgcgagagaaaataatgtgcaaacaagagatgcggtaaacatgaaatatatgaggatactgtgggtataacatgacatactgttttacagtaaa

SEQ ID NO: 670 - DNA, 930 bp, Homo sapiens
atttgcttctccttctgccatgatcctaggatttagaacctggacctggacgcctcactgcttcctgcttccttagtgccttgtggcctggagtcagaataatctagctcaaacttgggagtcaaatgctccagggtcttgaactggtcagagctctcaatgccgcaaagacactttcagaagaggaacgaaggcctggaaggaaaagcatcaggggaacgacgcttacgtctctcctcctccctccggtctcccaccagtgctcccattggctgaagccaaccagaagccacaggcagacttttcaagttgtgctcccaagactggggaagactttgatgtagatccagcatcacttacctgtgcctccaggatgaggcatctgcagaaccaacgtcaattgacctggatccaagaacagttatggtgattggaaattgatcaaaatacggagatcaacgatgctcaataggaggaagagagagatggcaaggtctgggaaagctcgttcctttaattctcagggtcttaggatggaggagaaggagcctggagacaggactctggaagtctagaactcttcccaggggtatctgggcaatccccaacagagcacttggtctctaatttctcagagtggccacctgctttggactcactcaggaaacttattaaggatacagatgctttggtgcccttgtccccaaccaaccagggtcccagggtcaggactcaggggttttgtgagtcacaaggtctccagatgattctgagactttcaaccagagactttaaagtagggaggagaaaccaagatgcctgtccttcggctttatgtgctaacacttgccaaatgccttcaaatctgaggaaatgggagggaagagttcagttcaagaagggaaaacttcggcgatgacctggggtttt

SEQ ID NO: 671 - DNA, 2610 bp, Homo sapiens
cgcgggggcgcccccctcggccgggcgctcgggtttcagccgccgctcctccgcgccccgcccgcgcctggcccgctcgccggcgccgggagagacctcgtaacggaactgggacgccagcgctgcattgtgggagcttttaaagcggcggggagctcggcgcgaccctcgggcccaccgggccacgctcgcccggcccgcgacgcccccccgctgtcgcctggcccgcgacgcaccgaggcctgaggacccgaaagccgggcgcggggagatgaccggtggctcgtgacggtcccacgggcaaaatcttccatcgcccggggctgagacttgtcaaactgccctctacggtcacccggaaagtaggaggctttttctgcagaggggaaaaaaatcaaaaagagccgttccatcccccctccaaggactgggtttgaattgcttttcatctgcagtggctgtgattcagcgtccctcttagcagcaggcaatgacagaggcaggagaggggaaaaaaaaaaagaaagaaagaaaaaacacagcaaatgaatcaaacggacgtagcaggcaagagtgtggttatcgttggaccaggattcaggatctgactgagtagctgactcttaatccagtttgtgttgatcaccaggaggatctggacctcagtattaccacatctagagctataatcacatccctgttaagccttcctgagatcacaccaaatgtccttgatgggaattgtaaacaacccttacttctggtttctaatgatattccaggaaaggagcctaactagagtcagtgatatgccaactccacctttgccttccaccatgtttggaagctccctgaggcctcaccaggagcagatgctcgtcccatgcttcctataagcctgcagaactggaaaagaaagctggataaagtatttatagaagatagaggacctgtggtggctcatgcctgtaatccaaggtggaaggattgcttgaggccagaagttcaagaccagtccaagcaacatagcaaggccccatctctacaaaaaatgaaaataaaattagccgagcgtgatggctcatgcctgtagttctagcttctagagaggctgaggcaggaggattgcttgagtccaggagttcaagattacagtgagctatggtcacaccactgcactccagcctgggtgatggagtgagactgtctcaataaaaagacaaaaaggctggccaggggcagtggttcatgcctgtaaacccagcactttgggaggcaaaggcaggaggattgcttaagcccaggaatttgagatcagcctggacaacatggtcaaggaagcttttcctgatccactaactaaggacaatcaaacccttcatgatctagaatctggagactgtgtcttctgggaatagtatcagagaaagactgcccttactgcccacatgtagcaaaactttgagacgttgaattatgggtccataatctcacaactcagaggggcacctctagactcttggaactgtatatctattggagactttaaggtaaagctgaacagagagacgtttttctccagaagcagacagcaccatagtcatggacagctttcccaagatcacagatcaagacttctctgccgtcatgagactcataacctcttaattttttcttgcttatgcttctgtgaacaatagaattggaaaaggggtggtcccgcgtgcacccatagggtatacttttatttgtggaggattttgctgccaaccttatacatgggcaaacttatgccttcatggatggaagataaagggctaatatgggttagaaattttaatggtacctttgtttctccataatcattcagaaacagaacactggtccactcttgttaacctacatcataggttgaagagaacattgccaggaggccttcatccttccagatgggcaccatttgttgggtctttttccgtggtatgaagaaaatgaagcaatgattagaaattggtccctcggccgggcacaatggctcatgcctgtaatcccatcactttggcaggccgaggcgggtggatcacctgaggtcaggagtttgagaccagcctgaccaatgtggtgaaacgccatctctactaaaaatacaaaaattagctgggtgtgatggtgcacacctgtaatccagctactcgggaggctgagacaggagaattgcttgaacctgggaggcagaggttgcagtgagccaagatcaccccactgcattccaggttgggcaacagagcaagactctgtctcaaaaaaaaaagaagaaagaaagaaattgatccctcataataggctgtatagcagattctactgcaaaggctatggttgcacaacagacttctttgaatttgcttgctaaacttttactggataatactgggattacaggtgtgagccactgtgcccagcctctcctgtttaactgtattcattctaatgtttacttacttctttaatttgtaaaattgggtcacttagagtttttttagcctatcttgccatttagccactgttactgataatttggatggaaaagaaaaataaattatatcacctctc

SEQ ID NO: 672 - DNA, 874 bp, Homo sapiens
cagaaacagaattccactcttaaccccctcagtttgcagaatgtctaagtgtagtgactctagactcaatgtgagatgaaaagggaaaaaagaaactgcgtataaatagtactagagatttgggttataggattggtaattcagcgtgaagttcacggatgcctcttcaagaaacagaagcttcactcaatctggctttcaaaatggtgagaaaagaagtggactcacataattgaagaggcttgagttctggaagcttagaagtccatgactggggtcccagcatgcttggattcaggtggccttcagacacttcttccacaaggaaattgggcagcttcctgaaatgaacaacccgtaaagccatgggaattatggatcagctcccagaccttccgcttcatgactgcaagcctttgtgaaagtttctgacctctttatgcttcaggaatcttagcaatgaaacaaggataatggcacttgctgtgacgatcatgcttccaacagttcaaaaagccaagggaagatcagaagcttatcttccagccaactggggtgggttggtgggggttggtggaatttgacagaagcttgtaatcagccacattggaggatgaggggaaggcctgtcatctgttttgaaacgtgttacgacaagatgttacatttctggaaacctgggtgcagaaaaagatgcacttttctgagagtttgtgcggattgagtgaatctgcttcatttcagcccgaagttgctggagggtccttcgtcaggagacagtatatatagacttgccagaagtgcaataattattcagtctctttctcagtattaagccaatgtacaaaataattacacatctgcttctatagta

SEQ ID NO: 673 - DNA, 5278 bp, Homo sapiens
ggataatgcaagtgtttaacagatgcttcactattaaaatattttccccccaagtctcaaatattgaagaatctctaaccagggacaccagtccctacgaagaccttgggcgattttgaagtgcgggcacctcgattccccgaatctgtagtgtggctggtatcggtgttcccctggtttaactagcctgtttgaaggcacagatcattcatggggatgtataaccgaaaccagtcctctccaccgcctggggatcttcactttcgcagtctacgactgcctgtgactccagaaagacaaactgcagattggccaaggtacatctcagatcagatccctctgggaaaagcgcgggaatgcttggctctagtagttaggagctctggtgagagcgcccctagtgccattttcccatccctgcccttgacagtcccctttggtctaaattcacggttctagacagtcaaagtctacctgctgggtgtccactctcaagccataggttttcaatcctaaaagggattaggaccttggctcaaaatgtggtcaacgcagtgttcaaattaggagggcagctgggagatggcagcaggggatgaaagtatgactcctacttcgtccgcaactgtgggtctggcacctcttgacttgccagtatgctggcaaacaacccatctctcttggagaatccacacttcgtttcttctaggtccagcctaaatgttacctcctccagggagcctttccagatactgcttctcctctctcccccaactccctcccacaaatgaagttttctcttctgaattccttgctggtactgtcacttatattcttttgggtagatctctgggcatgcatatgtcacctcctgtgactgtgggtttcttgacaacctaatcaatgcattgaacaaaggagatgtttagacaacccatataaaatgaataagagaaatagggtgaataccgtctaccccaattgcaatcagattagtttcctttattttgaaaacgattagaactagtagaggagttagatgtggcccactagggaacaaattttcatctccaagccgtcctctggctcgatcgggtctgcactgggtctgcatcaacttgcgctggctcagagggaggctcagccccagcctggccttcctggtgcccactcccaacatcctgagcagggccgactctaggcaccccacgattagctgagtgatctagggcaaggacctaggcgtctctaagtcttagtttccccatctgaacaatgtggataatgacacgtacctggggtgggcaggctagagtaaatgggaaaatcaaagcgccagccagagcgggtcgcactgttagttcctgtattttctcctcctgcctctggtttcttccgttccgttctagctgcctgaagacccagcccgacagcgatgcctgtcagcccgcgtcgcccaccagggcagctgctctcccaactcgcatggggggcaccaccccgcctcggtgccctagagctgagcgcagccgcggctccacggggatcgccagggcctcagccctcgcggccggcggcgcgggagtgttgcggggcagggaccagagcgcgatcagagcggccacccccgatttaggtcgccagctttccagtcactgcgatggccactggggcgccccttccatcctggttaaattctcattgtgatccccagccctcttctcggttccccacacccaggaggccggttctccgccgctcaggctgggagaggtcaccgctccgggcagggtggacccccagctccgtctcggaggacctttcgccggaggcgagcaggaaggggttaaccatgagcctcccaccctcacctcccagaccctggtgccgggctaaggcctccgcttccctcctgaggtctcattaggaaaccctcaccgctattttcaacatttcctcaatcaagtgcctttaaatagagctgcacaaacagattggcggcaaaagcgtagatcttgtcacgattgagaccaatccagtatttcagccttgtttgctttgcaattacgggttggcttgtggctacggtgccaccggggcaaatctgcagccgctcgctttctcctctgcgctccgggcgggtggaggaagcgacccgcggagtcactgcagggaggagagggggacgcgcgcggggggaggcggcggagggcggaggagactcgcttgcaccccagggccgcgggcacgcagagctgtgttgaaggacatacttttcaggttcctgacagtcactgagctatacgcaataataaagtgcgtgattcgcgtgtggaaaccagtgtcgtgtccttaccagcttccttttctgtccaccttccctctctcttctacctccgtttcgcttttcttcagtgcatgttagcggtttgctggatttcccttctccctcgctgttcaactgctagcatgatttgttacattttccacagctgtttattcttgtttgactttttgtacaaagtcactttaaatctgctgcagaaagaataaagcacctagccctttggatggactcctgcaggcgtgtggctgtccctggcccacttttaattctttggagatggctcttctgtgtaaatcagctgctgggtgcgttcggtcacctcgtaggccagcctagtttgtatcagcagaacagtagtggactcgactcaggtcgtaagccttatatttcacagacaattaaatcttggctgctgttgaacaaaactgtaatatttactttgttctataccgagaagcacttttaaagtaaaaaagaaaaaaaaaccaaatactacacttcaaaaagaaaatatgacaatgaatctctttttatggattctctctgcataagtggaaacaatatgatttaaatccccaacaccccatcccccttttcagacacagctgaagtgatacagatactgtcttctaacacataatctccctctctcgggagaggcacctgcctgtgctacattcgatttagtttgtaaggtttcaggcccctccccgacccatgtaatatgtaacaaggattatcaaataataaggtcttggatgtgaagtctgctttacacaagaattcaagaaagataggcaggacttgagtaattatgttacaacttcatattactttccaaatgaatacccattttcttctcatgtcaacttctagagatgggatgctgaggcagagaaatatttttatgagactctggagtacatactaaaatgtgcttccttattatttaagaatgtgtaaggtatggacctacatttgtttgctggtggtcataaaataaattcatagccattgtggccaataagcaatctccttcacgctttaaaagtttttggtttataatcccacctggattgtattttcactattctgtatcaccctcctattgcaatattttggttctcaatcttatgtaaagcaaacctcagaaatgatcgtttccataaaattgtgcaatggcaaagccacagaataatattttgagtccatatagccgtgcatgctcatctatatagctcttatacagttttctagctgattgctttggtatttcaagaaataggaagcagtagctacctattttaatgaaagggtaccatttcataagaattctattttcactgaaaaaattggtctggcacattattcaatgcaaaagattataatattactttcacgtgtgttaatctgtttagtataaaactgctagggtgtcttaaccattaacgcgttttgccacactactttcaaatggtgatctgagataattacgaagattttgatgttaatcccacgttaaatgaacaactatgaaaataatcttaaagcattattactcccatatacatgccagcaaacccaattgtggagagaacatgattactttttatctgacattatcctataaggatatggctacatttatttcttttaaaattggagcagttttcaattactttttaacagaattgttttcaacacagcattttgcagtgcccataaaccatagcaactttgtcctgatcgatacatatttttctgcattattattcattagcctctttgcaaactcactaaaatagaatagtattaaagtatgaatatatagagaacaattattaggttctacatatttatttaggtaaaccaatgttattaaaattaaaaacatgtgcctggcatataagtgcttcttcaggaattcttttttggatgcatagttattattttttaaacaaactcagattttcaaacactgattttcttctctgaacgggcattgcattgttttaaacagtagctcctggaataatgccacctttagtattttagactttcaaacaacaattggaattggataaatgctttcagctgggagcactttcctaatacctttgtaggtaatgggattctctatttgtgctgggtgacaaacggacagtgccctggacagactgcctaccctctgcagaatctaccaaaaagtagagttttcccatgagactgcttgtggtccatctaaaaatgaaaaaataatcagagaaaatgcgcaaagccttttctaactacagttatgaaatgatggcttaaagaggtatttagaaaataagagtggagtaatacagaaacaaaatctgaagaagaaagtttgcttaggagctgatgctctttgtctacaaacaagagggtaaggagctggatccaattgaattgaattgtttttgtttgcttgtttgttttcttccattcagtgcctttcaaactgttttttactggatgaagaaactcaaccaagaaaatatatgtcgattcttgtatatgggacaatattagctgctgtgatttttaatactagcataaaatataagaatctttttattactgtgatattgttttttcctaaatgaatgcatagtgtaacaattggtgtcaaaaagcattgaatttttttcagatggattaagctggaataataaagtatatctatgagatgatttctgtaaactctgacttgctgagaaaaaagtgaaaaagctttttctggaagaaacatggcaacttaaccgttattaatctggactaaataaaacaggaaactgcttctttacatttctagtaattttttctgcttttccaaacattgttaagttctatgcaacttgtgctattcaagtaaagatgatgtcagtaataaaattacagaatcta

SEQ ID NO: 674 - DNA, 547 bp, Homo sapiens
aatcttctctcacctcctagacacacacacacagaggcacctccgggaggctctggccaggcctgggtgtggcaggatagaaatgaaagttgtcctggcaacacacaagatttcatcaacatttccatccccagcagctcctgggccaagcctcatcttgcccagtgtggcctgtcaagatgacggcctggaagagaagccagactgggcagccaggcctctgcccctccccttgcctggtggcacagccagcactggctcactggtgagttgactaatttcctccgccaccattagttgtccatgttcattgctgcctgacacccaacaccagtctgcaagggcaccaggaggggatggaagagacagggtgtctggggaagggtgggtctgagtgcgagggggtgggtgagcttgtctcagagcctgacgctggctggtggtatctgcgttacccaggctgacccagctctctctgatgcagacaggcgagggcctcacacacttcagagaattcacacccacatgatgaggctgagaggagcag

SEQ ID NO: 675 - DNA, 493 bp, Homo sapiens
gccatctttgttaagggagagtgggcctgtctcatccattgaattcacaaaagaaaaggggcgtgagggaggaggtctttagctgcaaagacagagactctaacacgcgtaacaaaggcccagagatccgatccagacacagagcaaggcagagacccacagaggttggatgaggcaataagagagctgggaggagagggagagtggggaaagtgaaggatacttttttttcggacagttacagagtcagagagacccagagaaaagcagagatataaacaagagaccaaaacagtgggattgagaatgtgcaaggctggagtgcagcgcgatctcggctcactgcaacctctgcctcccgggttcaaatgattctcctgcctcagtctcccgagtagctgggattacagtatgaggatcttggcttttagatggtcccttacctggtcctgctgctcctctgcttcaaggtgtccattcatctgctggtcct

SEQ ID NO: 676 - DNA, 200 bp, Homo sapiens
ggcccactgctggataaaaggtgcagcacccactggccacttccacggtttacatcttgcttcaaggccttgtgcccgatcagctgagcccctgtgccaaccctcaggttagaagctgctaagacaaatacgagatcttctgagcgtgccagcccatccatctgcaccagtaactctgtcttcatccgcaggcttccttc

SEQ ID NO: 677 - DNA, 459 bp, Homo sapiens
ttcaactcctcctcctcctccctctaatgcctgtaactcacatccgaggctgggcgaggaatccggaggggagattttcctcatgctcacggttgttggaaactggaagagtgagaggaaggaggaaggggatttgtggcgctctctacctactacaagactgacaaggggagggggcacctaaatttgcatcttttcttcgtggtgattgagaactgcaggttcaaaccgatcccactgagcactggcgattgattataaaaaaaaatcgacactgggagaagggaggctctgtcttcggctgtcagactcaatctcggaggtggtattgggtgtctaagctgctggattgcttttcgcccaaatcaatgtggtttctttggaacattttcagcaaaggaacgcatatgctgcagtgtctttgtggcaagagtcttaagaaaaacaagaacccaactg

SEQ ID NO: 678 - DNA, 4733 bp, Homo sapiens
tctgcactacttttatcttttattttctttccttttcttcttaccttccttcctactctcctttatttttggaagctgcattcaccctactggaagaacctattctgaacataaagtaatttgcctcatcctgcttatccccatgacaaatagtttaagtagcatctggtgagacaagagaaaagagtaactatacatttacccttctgcaccctcatcttctacccagctgtctctcctcccttttcctctttatcaatattttccccttctttggaccaactatttaaactgttcttaaaatttattaaatagaagtggacctccagcaatttttcttgctcctataatctaaagtattcaaactcctcacttgaaacatgaaagaaaatcaggatgtaaacgttcccctttttaaacttttttattttctaaaccatcttcctctgcataaagtcagtctgccactctaaacagcacttgtcaggaatgtgtgaagttattaaaagagaaggaactttagaagatctaaattcaaattaccttgactaccattctttagtaataaaaggggagatagaaagaagacagaaaccaccagattttctaaaatctccagcaatattcatccatctaaagcatctgagaaacaatgacccaagttatattgggagagatattttagctctcttgcctgaatctaactcacagaaactggggaaatatcaaaaatcacttattctaaatgtttcggtcaagaagtgttttggatttcagattttggaatatttgcatatacatagtgagatatcttaggggtgggacccaagtctaaacacaaaattcatttatgttttatatgccctttaaacaccatagcctgaagttaatttaatataatatttttaatagttttgtgcatgaaacaaagttttgactgtttgactgtaacccattacctaaagtcaggtgtggaattttccacttgttacctggagtgcatcatgttggcattgaaatagttttggattttggagcatcggatttcagatttttggattaaggatgttcaacctgtattagatagcctggtgcttttctcctcataatcactccaataataatgaaaggataatcataaagatgacaacaattacaacaaagatgataaaaaaaattaagccacttggcaacactatttgtggcctcatgaaaatgactcccaatgtcataattccctctgagatccccacaataaaaaactattggaactagaactgcataccgcagttattggtcatttcacatggtgccatgttcaggcatagctggtatgagtgctatttgctttcatccaggggagccattctcagtaagcttcatctctgtgctgatgagagcctgggtctgttcttctagcccaggatcttcacatctctcaaaggactgcagctctccttagatattctgtgtaccacaggaaggggctgtaccaatttacagcaatctcttttcaacatggtaactaatgcaagtattagaccacaaggcttctctttggaaacttgtccaaaggctgtcatctctgctattcattcattcattcatttagtcaacaaatatttattaagcaacaaacgtgtgcaaggcactgttcttggcatagtgaacaaaacagattaaaattctgatcttgtggaacttgcattctaataagggagacaatttttttttaaaatgaagtaaaatagatagggcgatagggagtgctgggcccaggaagaaagggttacaatactaaatatgatagttagggaagccctcaaatttgaacaaggatctgcaggaagtgaagtatgttgatatctggggaagagggaacaacaaaagcaaaggaattgatacaggaatgttgctggtgtctgagatatggcaagcaggtctgggtggccagagaggagtaaagtaggaaaaaaggaaaagtaggtggggttggaaaaataatggggagccaagactgggtaaggttttgtaggctattgtaagtacttagacttctactaagtgatggaaagcaactgataaaagttgactttcaattggaaagagccatgaaagttgatggatggtcaacttttgacctgaggaatgacatgacctattgtaggttttagaaaagtccttccggtagatttaatgaacattcactgaaagataaaaaagagggtaattgaaataatccatgcaagagatgattgtagcttggataaggatggtagtagaggggtggtgagaagtggtaagagttttgctgaaggattatacatgggttgtaggtaagaaacctcaaggttgataccaggatgtttgatctgagcagctagatggatgaagttgacatttatcgcaggacagttccctgaatggccctggacccacccagttctccccctttcttgtttacagttaccaagaataactgtaaaatgtgctgggaatgcaatgtcctgagataaggaagaactgcctgaaacagcctggatcttattcctgtacttcctagggaatgtaacatctcaagttaaagaggaactgcccggaacagcccggggattgttcctctctcctgagaaggaagattacctccaaagctcatccactgagtcacactgcccctgtggtggagggcgggctgcctttccaggttcctcagctgtggtgtaactgaagcaggcacaatcaagactccatctgctcgaggcagctttctcgaaccttggggaacctactcacaatggatcacaggcttcttttgttttgtttcttgctgcctatctgtaagtaattaacttgcttcatgtaacgtgttgcatatgagtgtgttctgtctcatagactcagggaattggtaacactgcagctgaggacgcagtggacagaagtgttcagactcctgttccttgtggttgacacagtgatgatgatctcttctgtcctccacagagtggaagtcctctcttgggattggttattggtgaaaccacttcgcaatttattaagatggcaaaagcttacggagggacagatttgaggggaagatcaagatttttctgtcagtattgcaaatagtcaagaatatgtggtccaagaagtgatcattatctttggcattgtgcaagtcattagtgaccttcacatgaacagtctcagtggagtgttggaggaaaaagcctaactgaagaaggttcaagagtgaatggaaaaagagcagtagtatgtggagagtacagacaagtatttccaggagcctttctgtaaagagtggtagagaatgggacatcatttttggatgggggaagagttatttatagcatgttcatatgctaatggaagtgatctactcatggggaaaatcttgatgatgcaagaaagaaagggatttgttggaatcttgtcctataacgggtgagaggggatgggttctagaagaaaaggcatgggtctttgtttgagatcaggcaattcatctgtaggaaccagtaggaagatggttaagtgggtacctgtggtagtggatgtttgtgaacattcttttcttttccattgtttctattttctcaataaagtgggaagcaaaaatcagctgagtgaagatgaggaagaaggtgttaaaggtttgaagaaaaaaggaaaaggatatactaatctaagaggacaagtaagtagaacatagataatgaaaatgctggcccttaggactgttgggcctaaatgctcatattatattggtagtcacaaatttgaactttctctagagccaatttttgcatgtgtgtgcaggcctggagtagttggagagttggatttaatagaattgagggtcaagcaactacaaccagggaagagtgggacaagggagataaaggatattggcaggggagcaattataaacatggaccatgatcaaaactggacaggaaggaaaatagagataagaggggtggaaggttaaaaatagtgaaaatgagatagaatgaataggttgtaggtccctgtaaagttgaagaagtattattatgcagtactcgttattgaaatgaggtcactatgcttaaggcacagtgaatcctagaaaatagtggttttgtttctcattaggcaatacattcctccttgctccagaatgcaacatacatgtatccttttctgtactattttttattaagaattcatacttaattccactgactgccactcaattttaatgtacagtagggaattcctgtactatgtattatgaatccattcctttgaatttcatttataatacttcatgactgacacctggctttccaccaagactcaattttcatagcaagcctcatcatcataagcccccaaattaacaggatgaggaggaagaattggcaggctaaagaagatgattatatcaattaatgcagaaaaagcatttgataaaatccaatattcatttgtaattaaaaactctcagcaagttagggataggaattacttcaacttaatgaagagtgtctttaaaaaccttattttcatcagttataacaaatgtaccactctggtggtgaatgttgctaaggagggaagctatacatgtgtggggaaaggagatgtgtgagcaatttctgtaccttctactcaatcttctgtgagactaaaattgctgtaaaaaataaagttcatttttttaaaaa

SEQ ID NO: 679 - DNA, 2843 bp, Homo sapiens
aggctctggggcactccctctgttcctagttgaacttgggtaaggaacaggaatgtggtcagacagggtcagtgggagggctttggccattctgagccaacggtcctttgttagttggcctgaaagaagccatgacttagaacctgaagctgtcaggtggcaagaggccttagtcctggtgtttgatcctggcatagttctgggcctcagtctccccttctgtgaaatgggaataataacctttctacctctgacccttctcctgagtggctatgagggttgtgagagtgaggtgggccaccagagctccctgtccaagccaccgggagcctctcttctgtaggctcttcaagaggtggacctagagtatcactgtgccagggggattcctaagctctgaccctgcctgtctctgctgctcctgccccatctccctctgatccttctcctctgcactgtcttccttttccccttatgccttttctaccctttctgctctggcttttccttatactctgaggagccatctctggaaaaggccccactttcccagacccaggtgtcctaccaggccccaagttgtatccctcgtgctgcttaggccacgccctgcaggatgttctctgcggcctcccagcctttggaccccgatgggaccttgttccggcttcgcttcacagccatggtctggtgggccatcacttttcctgtgttcggcttcttcttctgcatcatctggtccctggtgttccactttgagtacacggtggccactgactgtggggtgagtgccagctccccagcccctgggtcagggccaggtcaggaggtggcagttagggtagaattagatagtggagaggaagtggaggatcagagagagggaaagggacaaggggatgggggaagggtaggtaagtcagagtcagagataattcatggggggagactcagagagaatagaatcacagtcctccctgagttggaagatgatgatagaaatgcaagggagatgacgggcgcagtggctcatacctgtaatctcagcacctcgggagggcgaagccagtggatcactcgagttcagttcgagaccagcctgggcaacatggtgaaaccccgtctgtacaaaaaatgcaaaaaaattagctgggtgccctggcatgcccctgtagtcccagctacttgggaggctaaggcaggagaattgcttgaggctgggaggtggacatttcagtgagctgagttcacaccattatactccagcctgggtgacaggagtaaaaccctgtctcaaaaacaaaacaaaataaaaaaaaaaaaacagcaggctgtgcactgtggctcatgcctgtaatcccagcactttgagaggccgaggtgggaggatcacctgaggtcaggagttcaagaccagcctggccaacatggtgaaaccccatctctactaaaaatacaaaaattagaggccaggcgtctgtaatcccagctactcgggagactgaggcaggagaattgcttgaacctgggaggtggagtttgcaatgagttgagaccgcaccattgcactccagcctaggcaacaagagtgaaactccatctcaaaaaaaaaaagaaaaattagctgcgtgtggtggcacctctagtcccagctactcagcaggctgaagcacgagaatcacttgaacctgggaggcggaggttgcaatgagccaagattatgccactgtactccagcctgggtgacagagcgagaccctgtctcaaataaataaataaataaagagaattcataaacaccctgcaaggtaggtggtgttatacccattttaccaatgaggaaattggagctcagagaggtgaagtgacttgctcaaggtcacccagctaataaaggcagagctgggatgcagactcagctttgtgcagttcctgagcctctatgctgccccttcacattactcagagtgcatgtctgagcctggtctcaagctatgatatctcaagctatggtatctcaagctatggctttgagaccagcatcttctctcccagagctctacatttagcttcctctgacagtgcagaagggaatccatctccttttttgtggaggctgtgaagccccatggctagtcttgccccaggcctacctgtgggctgccctatgagccgcctgcagcattgctcaccttctcagcagtctggcatctcattgaaagaaaggaatgatggtccttaagaactccacttccgaagactgtccctccatagttagagcaaattcattcccttgctgggttgctgggctctggcactgcgctggccctcgttggaggtctgcagaagtgcacagaaagtgtgggcaatggactggccatttccacagttttggaaacttttaaaaatccatattcttgctgggggtggtggctcacgcctgtaatcccagcactttgggaggccgaggcaggcagatcaccagaggtcaggagttctgagacgagcctgcccaacatggtgaaaccccatctctactaaaaatacaaaattagctgggcgtggcagcaggcgcctgtaatcccagttacttgggaggctgaggcaggagaattgcttgaccgcaggaagcggaggttgcagtgagccaaaattgcgccactgcactccaacctgagcaacacagcgagactccatctcaaaaaaaaaaaaatgcatattctggcttggcgtggtggcttatgcctgtaatcccagcagtttgagaggccgaggggggtggattgtttgagtccaggagttttagaccagcctgggcaacatggcaaaaccctgttgctact

SEQ ID NO: 680 - DNA, 470 bp, Homo sapiens
ttttttctttataattattcccctatttgaaaaatcaacttgtatatgaggcagcaaacaccttgcagagcagcattcccttttagtttcaggacgtggtggtggatggaaccactgtaacctggcctccctccatgagaggagggaatccaggtggccatgttgaaatgtgcctgtgtgcagcaaggcttctgaaatgacaagagagcccagcagcttccaaagcagctgtgactctggatctcacccatcatctctgcttctcactgttagaggagtgaatctgtgctgccttaggaggcatggaacctgggacttttcttccttgtttaatgtttaattttattaaaataatttgtaagtgatagatgttgatctcgtgacaaaagagagattccctctttataaaactattctaactaaagatcttttgtaagcccatgtgttagaaataaaacttgaatatcccc

SEQ ID NO: 681 - DNA, 556 bp, Homo sapiens
aggtttaacagtggattttgtacttttacagctgctctttgataaaagatgaagatgaaaataaatttatattgctagcttgatgagctcaagagtctaggtgaagatttacaatttctctgggccaggaatccaggcacacttggctgggccctttgactttcaaggtgacatcagggcatggactcacaacatgcatttcatcagaacagcaagtaaggagaaccagaaagagagaatgctatcaagatggaagtaaccatcacttacaacctaatctcagaagtaaatccatcacttgagccatattttattgttagaagtgagtcactgtttctagccaacacatttaagaggaggagattatagcggggcaggaataccaggaggcgtggatcgttgggacccagcttagaaggttcacaaccacactgtctgatgaattcttggtgctctaaacctgattttatccacctctctgaaggagattctgagggtcagctacaatatggcattgggtgttttagtgtgttaacgtcttaaatttacactttat

SEQ ID NO: 682 - DNA, 543 bp, Homo sapiens
aacaaagggttgggacacaaagtcattctcagaagaaggaaagcctggaagatctttcaacagacttcctggtgctgggtctccttgttctctctttagtgtgaccgagaggccagatgaccacgtatatgcctaagaggagaagctgccacctgttgctgtaaatctggtggagaagtgaagggccagaggaaggaagtgaattataatcgccatcattacaagttgctgagtgctggctaccttgtgacaactacctctttcaatccttgcccttccaggggactggaggaggaattctctgaaaaatgatctaagaagatagcaccttggcagagatctggggatcctgatcatccgaaggccatctgctctatgctttcagctggtcttgaataagcagcctggacaccccgatgatgtttgggacccattcactcatgcatccattcattcatcctacaagcatgtgagcatcgtctgccaaacactgactgagcctgtgctgggagttcaaacagcatgaagcctctgtccttgccc

SEQ ID NO: 683 - DNA, 495 bp, Homo sapiens
accccacccaaatctccgcaccgaggaagctggaaaaccaaactgtgccccagcagctccaggtctcgctgaacctgttactatggcagcgtctatgcttcacttttgaggattgcttctgctttgaaatagccgtgtggaagaaaaactacaaagttttgagggggaaaaaacccacctaactttagctgccgttgtgtcttcatctgtaaaaatcttcttcatgtctcatggatttcaacatgcagtttatcttggtttgttccataaaacatcagatgcaactttaatggcctaaccccaaaaagataacttggcagccatcaagcattcagcagcgttccaaatgccctcttgctggagccagccttctacggggccatgtggatgtcaggcacacacaatttgagtcacgctgacatagctgggatgcctggattgcactggaatctggggggtaccaatcacaggccagagagaagccattggctggaa

SEQ ID NO: 684 - DNA, 1494 bp, Homo sapiens
ggtagcgacaagaagattaaaagagggaagcagaggagttgggagctggcggtcgttcccggggaagaactgctaaaacatgagaccaaggcacagaccttactgtatgagaagcaatgctcctcaaaccttctgcgtgctgacatagaccttcccagaagcaaaactgttggcggcgacctgagcgctggaagccgaaggggaagaggaaggagacgcgaagccagggcggccggcacaaaggcggcggactcgcggcggcagcgcctgcccggccgggagcacaacccacggccctactccagcgaagtcccgcaccggcttctaggaataaagtttacgttctcctgaggccgcaccccccacctcccacccaggacggcacatctccgtgtcctcctcccccaaactccactcgggaccccgagaaccaccccagccttccggccaccacaacaaagagccgcaccgaccggcgaggataaacagcggcggagggcgagagggcggcggggcgagcgcctccacgcagcaactccggagtcccccgcttgcccgagcgcagtttctccgctgctgtttccaccggctttgtaacactgggaatttacatcctcacccgcacccctcacgcccgaggattttaaactcacctttactctcgaactgagagttgcggtagatgggatttttgccttttccccagatggttgaaggttaagatttttggaaaccccaccacctccttatttctattattatttctgcaagaaaagtataaagagagttgtagtggaggtgagatttgtgatcgggaaagccttcgactccctccttctccgtcttccgcctctctctctctgattagttcctatccagcagcagattgaagcaggagatgattcttctcaaggtttgttcagcagcttcacttctaggcgaaggcttcatgaaccaagtgacgtcaaccaacaaggcttctctctctctcctctctctaacaatgaaagttgctgttaacaagggaaaaaaagagagagaattgtttataccatttcagttccaataataaatgacctatcagctcctaaaggagccaagggagggggttgcttcttctttccaagaatactgtagctttgagtttgcaccgttccttgtcccaggaaaaagttaagaaacttaaaatgttttgttttgcttttaaagaagacaggacagaaaacgggatttaaaacttagtttttaaaaaaacaaaagctacagagtagggagcataggtcaaccatctccacctaaattttttttgttcctaaactcagaattctacaacccaactaaattaatatgccaagattttgcggatgttaaaactcaaaaaaagcagtatgcaagacggtcccggggtaaaattctactgcctttccacggacaagttaaactggctgtaatgtttatgcactaagttaaaataaaatttaaataaaagacgtt

SEQ ID NO: 685 - DNA, 846 bp, Homo sapiens
gggcccccaggattcctgagaaccctccagctgtgtgcggggcagaggtgggggcctccacacctctgctcagggcagcctggatggctggaccagctcgtaccattgaaaaacttgatgatgtcagtgaagtccatgttgttgtcacggatgatctctcgcttacgcagcccagtcccatgtcccgccatccctcaccattgtcgagggtgaccaggagaggcgccagcagatcgcacatgccctgcacatagcccacgtccaggtgctcccacacgtagctgaaaggcagggggagagtcactgtggctgtgccccattcttccctccctcgggatccctgggaagacgtcctccagagccacctgccgcccagaagtcagcctttccacgaccctaaggcttgactggatgcccgaggccacggagtaattgcgagaggagggcagtcctgagtctggagagtcgaactccacggaatgctgctgctccaccacggcggtgcccggagtcccgggtcctgcttcctgctcagcctccaacactgtggccacggggcaccaagccagcttctgacccagccagccaggcggagagaaacaagcctctggccaaacatgaagacacgtcttcagccctgcttgaaggaacagccccaggtcttcctgtggctactgaagggaagtaggggagccagggggctgaacgctcaatggccagtttgaactcagtctcattctagaaacgcctgaagtcatgagaccgggagaatggccttagtgttttggtgtggctgggtggagagaagcctagaggttttaggaaaaacaagttttgccttatttt

SEQ ID NO: 686 - DNA, 745 bp, Homo sapiens
agacagagagggcaggggaaactgccatttttaagctatcagatcttgtcagaactccgtcactatcacgagaagagcatgagggaaactgcccccatgacccaatcacctcccaccatcccccgctcaacacgtggggatgacaattcaagatggaattgtgtggggacacagagccaaaccatatcaagtacctacaaaattatggtgactcttcactaatttgcaaactgattatctgcaaatcttaaatagggaataaaacacaaaaatatcattatccctccagaactgaggacgcaaattggatttagaagacttagctttgacacctagatatgttttcattgatttgacctaacttgatctcagtttctcttttatagagttagttctttagatcagaggtccccaaccccaggactgcggactgccactggtctttggcctgtcaggcacccggccacacagctggagtgtgaaaaaaaaggaaaaaactgaaaatctcaagaggattccaggaaatcaaaacaatgaattattgaatcaagaatttgaaagagaaaatagatgcatactgaaaaaagaattttgtttagtgagatagatgtaataatgaaggcatgttgataacgggggagctatgtatatatgaggggagggatatattggaaatctctgtatcttcctctcaatcttgctgtgatcctaaaactgctctaaaaaatattttgagaaggaataa

SEQ ID NO: 687 - DNA, 1609 bp, Homo sapiens
aacaaccaccggaaggcagaaagatctaagcagcagtctcagcagttgcccagcaccacaaacacagaggtcgaagttcaaatttggaggggcttggtaaacactgttaactttatggtgagatccaagaagggcatgtgtagaaattaagaccatttctaagaccttagggctgtttctagagccaactacaaaatggaaattgaccacatctaataaagtggctattttattgattatttttgaaaatagtcaataaaaagcagacccactagtgacctagatgttggaattggcagacaaattcttcaaaataagtatcagtgttttaaaaatgtatacagagaaatgtggatataataagtataataatgggaagtttcagaagaggtctgaaaacggggaaaaaaatcctaaaaccaaaaaagtatctaaaatcaaaaactcattgggatttacagcaaattggacacacacaagaaaggatcagtgaacttgagcacaggtcaataaaaaatgtccaaactgaaccacagagaaaaaagataaagggattaaaaaaaaaaaaacagccttgatgatcaaatacatgcattgacctggaaggagagaagatagagagtggaggctctgaaggagactcttattttctccattctgtggttgctggtaattcttggcttgtcagatgcctcactccaatctctgccattgtcttcacttggcattactctctgcatgtttttgtgtctttcttctctgcctcctcttataaggacactagttacattgaatttatagcccactttaatccattatgaccttatcttaactggatctgcatagactccgcagtgagtcgaattgtgtccacaggtaagaaagacatgtttagtcctacccactaatacgtcagaatgtgacattatttggaagtcgggtctttacagaggtaagcaaattaaaatgagatcattacggtgaaccctagcccagtatgactgatggccttattaaaaggggaaatgacacagacacatagagaaggaagatgatgtgcagatacagagaaacaccatccacaaaccaaagggtgtctgaatctaccacaacctaggagaggcatgaagcagataacccctcacaatcctcagaaagaaccaaccctgccaacaccttgattttaggcatctaacctccaaaacagtcaaaaattattgtggtttaaaccactcaatttatagtactttgttacaacagccccaggaaattaatataaatcatatttctaaattgagtctcatgctgatattctgaatagatgaaattcggatacactattcaacctaatacatctactaaacgtttaaagaagaattaacaacaatcattcacaaactcttacaaaaagaagagggaacatttctcaatttattctatgaagccagcattagcctgataccaaagccagacagacataacaagggaaaacaaaacaagctgaagaccaatatttctgatgaatatacaggtataccctcatcttattgtactttgcagatactgtgtttttttaataaattgaaggtttgtggcaacccagcatcaa

SEQ ID NO: 688 - DNA, 3793 bp, Homo sapiens
gcatttaaagaaagtcagaggcgagggggaggctacaggaaaaagtggaacatctcctgaaaggtgacaagtcgtgatcaaaggcaagtctccaggcagagagttggcaggtttccgaagcaaaggttacttagaagtggaggctccactgccagcttccccccgctgcaaaatctgacactcctcaccctcagggttcagcaagattctcggaaaggccttttctgattctaggaggtgctgcagcaggagctgactcggccatttcctggcctctttagttggaagatgacagaaaggcggaagcagggactgctattgtgaggcccatggcagccttcctgtaaaacaaattggcaaattgtcaccttcagatggaccacagctggccctctgaacagccctccttggcctttccagagtgtacatgattgtgtcccatgtccagggagaggacagagccaccaggagggtcaaggtcgtggagggaaacatggcttgtttcccattgcaacaaggcctcccactgcaagacagagaggaagagctctgccacccatgtgtgtaaggccatgtggatacctcatgacatcctggaaggccacagggctgtggccgccattcaacttaggttgacatggccaagaccatagagctaatgagtggcaatgttgagcctagaccctaagtctctagattcctcctgcagggcgctgggtgttgtgggggcgtctctgaggtgggtcagagtgaacctgcaggggccacttaaaacccttgcaggccttggctccttctccaaagaagcccaagccagaatggcagtagaagtatctcctgtgaccgcaagccaggcactgattcttaggttgcttcctggtccttctgtatgtattgctaagagcagcagtgttctttcttgccacagagtgagtcctggtgcataaatctgtgctcatgtcacccagtgctttcacctgcctgttcgtgataatcctgggacaagaccctcacctgcctgcacgggggcggggggggcgtgaggtctagagacccaaatgaaggcctcactgaatggacttccctgaggtgtcggggccactgatgtggtgccagggcctgtctattcttcctgctagccaaaggctggcttctcaagccgctggatgaatggggagcctggagatgttgaacaagtcacgtacgtctctgattgcctcgatttccccattttggccgatggcatcgctaaagcatttgatgattccaccgtcaagtgtgagagctacaggagataaaaattttaaattactaatcacccatggtaatgcatggtaatgcatgctgaacaaacagtgaggaggccagacgccaccgcattccaaaacaggaagcactcaggaactctaccagagcatggctgccctctccacatctgcactactggactgagggcttagttgatccatctcttccacagatttgcagagatatgctcaagcgtgacttaagtgacttaaggctcatgtgttgcctccctatgtcaagcttttcacccagtgagctctttgagaacaggggctgcattttaggacatctcccccagtgtcttcgtagaaccaggcaagacacacggccttgttggaagtgccaaacatctattcttcatcagcagaatggatgagcccctgaaaggcatgagttgagctgcgcagtctgaactcagggaagtcctcgcagcgggctcccaattcctgcctctcaagaagcaagctgagccttaaagatggctgaaaatgtgaacagtctcagggccacgcagacccacctgagcagttgctctctgatgtctcaccgagccatccaccatcccagcgaagaaagggcctgcaagcagaccagaaaatgccccattcagtcatgctgcttagtcatggcccaaacctgcagcgtttaattctgctcactgtgactttattgcaatggcacacacatttacatcactttatgtgcgataacagtagagaagttagttaggtttttctgttttttgtttttttaagataatgagaaaagtctgtaatattcagccaaaatgtatccttgtggctggtgtagatttttggcgaaatgacactgtacataatcagaagaaggcaaacatgcatattatctccatctccttataactgcacgagataacataaaactgcaggaagtatcaagcataagaataaaagccgtctattgaagtctacgtggcatcccctgcgtgccccaggaacacccttcggtggattaggatgagcacgctggaaaatacacaccctgccgctgcatctggctaatgccaggccccagcccctgttccttaagccacagatcccctgagtgtctgtgttgtgtctgctggaatttagtttaggcaggtgacgtggctccaaagaaagtcacaggctggtttctgctgcagagatttgtgtccacttcatgcatgtttattgcccgttaactctatatgaagccacagcaaaggggaagtgatgttagagaggtcacaatctagttagtggggtcaagacaagagatggagacagcaggtcttgacactctggaatcattctgatttgtaaatatgacaattgatgaaggggaagagtgcctagtctccaggagggatttcctgctgagacccaccaggtatacagtcggtccttgtctgcagtgaccccagagacatttattgcaacacctgcacatcaggttgcagcaactgtgttctgcctggcccaggacagactctgctccacctaagagtcagcctctccaaggcagcagtggggttgggaagaggggaggagggacctccatgctgcaccagctcctacagagccagctcaagctacatttcaggacatcttggaggctacttctggacaattgtggattagctaagtgacagtccaggaacctggatcccatcctggccagggagttgtggcttctgagataaggactttgtgcattggagataaactgaagtgtttctgcctctgctccctccaggggcggcttatggcacaggctcaccaaattgcaggccccagagcacctgcaacctcagggagctcaggggcttcccagcatgggcaggggaagccacagattcacttctcctacagatgcacagaccctggggtggatggtctaaagctcaggatcttataatgcagagaagatggaatagagcaggaaccaggcccctgtctggaggaaggaaccaataacaacaacaacaaaactactgacaatgtgcgcgctttacaattttcaaagcgctctcatctcagtcaaggaaggatgcattctttccacaggctgacgttcaaaacccaaccaccagaaacatgaagataaaacaaaaggaaccaccagaaacaaacaagacacctgtccatcctccaggtttgcaaatcagatcaagttctgacaactggtaaagaggaagatgagaagatcctgccagataaattctctggtaccttcattgatctcattctttcaccatcaaaggggaatgcagtagtgccagcaggagcagaaaaaaaaaaaaaaaaccctaaaaagaacaagagagactagtcaaagctagtacagtgtttccctggtactgagtcatacttttacaatgacccaggcccacggcctcaactgatgacaaataatgagaatccaacaatcattctttctcgcatattcacttgtgaataaatgcaagaactggtgtatttgt

SEQ ID NO: 689 - DNA, 234 bp, Homo sapiens
ggacctcgcgctgacatctgggaaatgccattcatactggaacctccgacacactgccatgaatgtgagggtttcgtgactgatggggagactgcagtcaaataaaacagatactacacgcactcgtcggggcagccgtactgcagaagcacgttgatgcactcctggctggaggcctgccgggcgtaggtcagcgctgtgttcccgtgggcatctcgggccatgacgtccacc

SEQ ID NO: 690 - DNA, 4656 bp, Homo sapiens
ggtgaggatccccagtttgaagggaggggactagggtcaggtaggaaaatggggcctttatgaagaaaggggaggttatttgggccactcctctggagggatagagggctccaggaagatctgcatccccaaaacctggaaacaagactgttctttaagaataaaaatccacatggggcttgaggccaagaacagcccttgttgccaccaacatggagactttgtaccatatcccattcttagtgctcgagtgttccaacctgaagttgaagaagccaccctggctgcacatgccatcagccatgactgtgtatgctctggtggtggtgtcttacttcctcatgactggaggaataattatatgatattgttgaacccccaagtattggctgatgaacgtgggcatcagaggccagtagctttcttggcctacaaagtaaatggacagtatattatggaaggatttgcatccagcttcctgtttacaatgggaggtttaggtttcataatgctggaccagtcgaatgcaccaaatatcccaaaactcaatcgattttttttcttctattcattggattcgtctgtgtcctactgagttttttcatggctggagtattcatgtgaatgaaactgccgggctatctgatgggttagagcgcctttaagaagaaatcagtggatactggatttgctcctgtcaatgaagttctaaaggctgtaccaatcctccaatatgaaatgtgggaaagaatgaagagcagcagtaaaagaaatacctagcgaaaaaaacaggaagcatattgaagctcggactagaatttcttcttggtatcagagagacaagtttatcacagtatttttttttttcctgctgacctattgataataccaacaatgttgagtggcattttcttcttagtttttaatttcttaaagaaaatatactccatatctgcagggaaaaaaataaaaatccacacctgagaacagatccatacaacctgcttacaaagaacagctcctgtgctacctgaggctgatttatttgaagaacaaaaggaagagagacaatttagtgtagacaagtgctattcaatagaactttttgcagcagtggaaatatccataaatctgcagtatccaaccaaactagccacagacagctgctgagcaattgaaatgaagctggcacaactaaggaactgaagttcttattttaattcaacttcaaatggtcacatgtcactagtgactaccacactggacagtgcaggtgtagacggagttcagatcagactcctgaaacttaatggctctaaccttaggcaagttacgttaacatctaagcctcaatccctccaagtagaatgggtgcacctaaatcatagggttgtcctgttgtcctgagcaacattatgtaaagcacttagcccagagcctagcacatagttatctagagttgggaacgtcactcctggtgtgcatgtccagaccctacccgggagaagggcctaacctatgactttagaaccctcagttgcaggtgtgcatgttccagccaacactccactctgagtgcaggctcatcaggacaccatatggttgtaaactggctgccatgtcccaatccttccagctcttgagggtcagttctcaccttatgaacaaattaacaggctctggacctataagatcaaggaccactgcgccccctggccaccccaccgcccccccccaactttgatctgattgactttggcttccacctactgtttaaaatgtgtatgttgggggagtagggacagcacgggggaggggtttactttcctgactctagcccaggacatttggtgtttttgaataggcaccattcagccttgcttcagtattaggaataagatactttttattccatcctctatggagacaaaaagctgctcctcctttgagtactgacctacatagatttccatttctctcttcagcctcaggccaaacaaacaaccggacagggcagcagaacaaggctgtctcctcaggatcctgccaaaggcactgtcctctccaacctggacccagccccacttgcccttattggttgcttacacccagagtgcacactcacaggaaagggcctctgctggctgcaggtgatcatcttgtcccttctctgccttagtgtgtgttattgccatttcaatgtcagtggttttttatgtattttcttccagtctttgctgctgagatctgactgtatatactattttgtatcctttcatgtatttctttcatgtatttcaatgcagccctcaacatcatcatcataaatctctccagcagaatgctggaggcctccctcttctgaacctctacatgctgctggctggcatcaagcagaggtcatcactgggtgctgaacaggtcagctccctagggcaatgtgagcaaagtgttgtggctcatcctcgatcctttatgcccttttggcaagattcctttctcttctcagtcacagcagatggacacataatcttgttctcccaggggctgcattctcagtagtcttttccctgctccttgggcgcctggtcagggaggtttgtacaagcctgcgcacacacagcagtctgtcacgaggctgggccaaccttttttttttttttaaacagactcttgctctgtcattcaggctggagtgcagtggtgcaatctcagctcactgcaacctctgcttcccgggttcacaagcaattctcatgcctcagcctcccaagtggctaagacttaacaaacaggcacacaccatcactcgcagctaagtttttgtatttttagtagagaccacgtttcgccatgttgtccagactggtctcaaactcctggcctcgagtcatccacgcacctcagcctcccaaagtgctgggattacaggcgtgagccatggcgcccagcctgggccaaccttttctgagccatagtccagctgtactacagctgtatccaaaaggtaccatgtatctcccagggtaacctgaagacctaactgggcatactaactgtcctcagatttcagttctttaaggcccatctcttctagatcagtgtaaatatctgaactcacttggtgcttcaacccaattggtcttgggattcatcctttacctacccagctctcattctcttctaggttgttccatggcctcttccatatattacatttgtggtcttgagcaagttagttagttacaacaacactgagcatcttgaccaaggtcacttggcccaaccacaggctaatcccaggccatgtgcacatcccaggattagcttgtggtttatcagttgtcaatttttttttttttttaatacagggtctcactctgtcaccctggctggagtgcggtggcgatcagagctcactgcagcttcaatctcctggctcaagtgatcctcccacctcagccttccaagtagttgggactacccacatgcaccaccatgcacggctaattttttggtttttttgggttttttgtttgtgtttttttttgttttgttttttgagacagagtctcgctctttcgcccaggccggactgcagtggcgcaatcttggctcactgcaagctccgcctcccgggttcacaccattctcctgcctcagcctcccgagtagctgggactacaggcacccgccaccacgcctggctaattttttgtatttttagtagagacggggtttcaccgtgttagccagggtggtctcgatctcctgacctcgtgatctgcccgcctcagcctcccaaagtgctgggattacaggcgtgagccaccgcacccggcccttgtttgtttttttaagtagagacaaggtctcactacattgcccaggttggtctcaaactcctgagctcaagcagtcttcccaccttggcctcctaaagtgtggaaattatagcatgaaccactgtcaggctcttttgtcagtcctatcaacctctaacatcctcgcaccagacaggacaggtgtctgtattgaaactttattacaaaattataaagcagagctctgtaacaaaataatacacatttgggtttgctttaacctccaagtaagtctgagaaaatcttaataaaagccacttgaagtaacaattcacatccaagagatttccacaaatttatacaatgtatattgagcactagttcctgtacagcttattcttattagtttggatccaactattccaatgtattatgaaccagtcagctatctgtcttttgaaacaagtcttaactgaaatctcagagtaatcagcaaaagctacggaataattctaagaattagatgtttccatatcattaaaaccaaggatccatgaggggcagaagggaggattcaaagatttaaaaaaaatcaaattttagaccttggttaaatattaactggaatgggatcttggaactcccaactttaatttggtgtaataaaaatgatgcaaaaaaaaaaaaaatcagggttgtttgacaccttttttcctaaagggaaaccttcaccaaaaggggataaaagatttaaaggcaaaatgagtaaacaacctcagttttaattcttactgaggttactaaccagctatcagtatattattttcgattt

SEQ ID NO: 691 - DNA, 229 bp, Homo sapiens
tgaagatgaatcctgactgcctggacatgcctgggcgggtgtacccatggcctgtggttgaaccagccacaccttgtctcttggccagaggctgccctgaggctgagggctgtgagtcctgggatctgctggggaagtccaaggcatatcgcaccagctgcccctagctgctgcctgcagctggaggccacaggccccccatgttgaagaagtgtcaccttcaaaggga

SEQ ID NO: 692 - DNA, 130 bp, Homo sapiens
atcctcctgatccctttcccatcggatctgaacactggtcttggtggtcgtaaaaggaggaaaagtaatagtgaagctggcctaaatgttgtaatctggtatatggcatgtgggctagtttcagacaggt

SEQ ID NO: 693 - DNA, 470 bp, Homo sapiens
ctttcacattcgggaagcgtcgggattaggtgaaagtcgccgggcgtccacgtgcagccctggaccctgaaccccggcgtgcgtgggccgtgggccctcggggaaaggttccgtgcactcggggactccggtgaagcctgttcagccgtctgtgtcatgtggccatcttgagtctactctgtcgctcttgtgccctagcaccccgagaaccgtcagtttgagccagatggaagctgagctgaacacattacgatggatgatggaaacataagactatcaagaaatccaagtggtaatgggcgaagtttattcagcatccggcaatggacttatcgtagttggggaaacgggtgttccgaataatatcctggaagttatcaggacacctattttaaatataggcctgaattttgtaaagtaatatttaaggtggtccgtgataattaaataaaatgcttaattcatgtggc

SEQ ID NO: 694 - DNA, 612 bp, Homo sapiens
cgtgtctgcgtcgggttctgttggagtgcgttcggtgcgccgtgggtccgcgctgcttccacccaacttcctgttagtttctctcctgtcacaatggcatgatctcggctcactgcgacctctgcttcctgggttcaaggattctcctgcctcagcctcccaagtagctgggattacagtttccatcattatcttctatggagttcttcattcccacatctgtggaccttaaaatcctaccgttgagtgcctgccttggatcagcagtcagttcgttaccttggttctcagacgatgcttgcaacaacgccatgcgattcgcccactcttgggttacattagttatacactctggaggtgacttgacctgtcattgtgaacaattattgctcttggacgacccaggacataggccagccagtacgtaccccagtgtgttggagaatcgcgctcggcttcttcctctgtgctgagtcatgaaagttgccggagcaggtgcagttacacaacctccaggtatgatcctgtttaaggactggatttaggataactacttagaggttaaaagtcacaagggtgtatggatgaggctggagtgatctgggaccaaag

SEQ ID NO: 695 - DNA, 1574 bp, Homo sapiens
gggaggacctgatttttcttcacccatagttagggaggcgcaatcgccctggctttggggctggggcctccggggaggttccggtaggggcgttggagaggccgctctttttgcaaggcccgagacggcgggccctgcgcaggccgccctattccgcgccctcagggcgtcagtatccgcctgaggccggataccccagctgggcccggatgccgtcgatgggcccggagcatcctcggcgctgccctcccagagccccgcagaggctgaggtggcgcggggggcgggcccggctccgcgagaagcagcggcagcgagggctggaggacccgggctacggggctctggggcgtctggcctgggtgggactgagcccattcggggggactccggggttctggtgtaggtagatccggggcaggctcaggaccaagtccctctccttccaccaaggagcgcccagaggccggcgggagctccaggttcacctcctcctcctccaggaaatcccacttccaactggatgtctggatgaactactgaaagctgctgagtgtcctgcagcagggtcggtggacctgggtgtctgtctggacacatcctccagtggcctggacctgcccatgaaggtggtggacatgttcaggagctgtttgcctgcgtgtgctgtgaacttcaagtgagccaagagctggttagagctgcaaggacaccgcctgcacaggatgcccggggctgggcattacctgctgcaatgacaacatctggctggatggcagagagctgacagaccgtcgcgacgtcccagtccagctgggccactgtcaccctggggctgtctaagttggcagtgatatctgcacctaatgagaggccattgagaaggacattccctcagagctgctagaggacccagctgtgacagtccctgaagatgtatgcccgggggtggcacatcttgcagatggccaggcctgtgaggccagcaccactgccaagctctaggacagtcctggtgggaggaaagggggtcatgtctgcgactgcaccagggtaagcctgcctcggtgccctgccctgtgccctgaggtcacctatcagtgaaggctgctgggttctcgatggcccattctgcaaggtagagggcggcatcccatgtgaccaggactgtgatgccgtgggagatgatggctgtgctcttggagagtgtgactgagcctcccgagggcagcaccaagagaaggcgagagagtcagtccagcgatcagaaggcaagtggcttagaagacaagcagccatccaccacatggctgaataaaccatgacaggacaaatcgccactcagcaatgagaagcagctaactgttgacatgccaacagcttgcacaggcctcaagggtgtcacgtggcatgaaagacactcatctcaggccacacaggattccattcattgaacattcctgagacaatggaattctggcgatggagcacaggtcagttgtggccaggggccgggtgtggctatgaaggggtggctgccttgtgatgattcaatatgctatgtttttcctttg

SEQ ID NO: 696 - DNA, 559 bp, Homo sapiens
tttttggatgcacaacagctgaagattgtgcctggattcccctttgcaagcattctggagtcacaacatcggcatagaaggtggccagccttcggcttttgcagtcgtttgtggagtctttatggaagagcagcgtggtcaagagaccacggctgcgtaaccccgtctgcagtatgtgaggccggagtgctgaccctggacctgcccagtcatgccttctcggtcagctgttcatctcatctgctaccacgttttgtgtagatgaacaacaagcctggaatcacgcgtgggaatgccagcctcacatgacatagaagacagagaaggaggaggcgggcacaagcgggaccccacagccagcagcccccttcagactgctgggagatagccaatggtttgcagcaaccaagtgaaagcccagctaggacagaggcgaccaagaccctcgctgcagcctcaactgccctccttggcgaggtggctgctcccatgcctggggcaaatacttggactcaagagcaaggaatgtcctgaagacttgcacagggaaaagtattgg

SEQ ID NO: 697 - DNA, 1060 bp, Homo sapiens
tggggcagagtccagggcagctcaaggctcctccacacacacacccgctgaaccctgagcaccctgagctgctgagatggggcgggccggggctgccgccgtgatcccgggcctggccctgctctgggcagtggggctggggagtgccgcccccagcccccacgccttcggctctccttccaagagctccaggcctggcatggtctccagactttcagcctggagcgaacctgctgctaccaggccttgctggtggatgaggagcgtggacgcctgtttgtgggtgccgagaaccatgtggcctccctcaacctggacaacatcagcaagcgggccaagaaggtgccagggactcccaaccccagcactccccagggaaggagccctgggaccccactccagcctggagagacccagaggaatggctccctgagactgagtgcatgaacttcgtgaagttgctgcatgcctacaaccgcacccatttgctggcctgtggcacgggagccttccacccaacctgtgcctttgtggaagtgggccaccgggcagaggagcccgtcctccggctggacccaggaaggatagaggatggcaaggggaagagtccttatgaccccaggcatcgggctgcctccgtgctggtgggggaggagctatactcaggggtggcagcagacctcatgggacgagactttaccatctttcgcagcctagggcaacgtccaagtctccgaacagagccacacgactcccgctggctcaatgagcccaagtttgtcaaggtattttggatcccggagagcgagaacccagacgacgacaaaatctacttcttctttcgtgagacggcggtagaggcggcgccggcactgggacgcctgtccgtgtcccgcgttggccagatctgccggaacgacgtgggcggccagcgcagcctggtcaacaagtggacgacgttcctgaaggcgcggctggtgtgctcggtgcccggcgtcgagggcgacacccacttcgatcagctccgtgagtgcgggagtgggtatggggttggggaggg

SEQ ID NO: 698 - DNA, 1616 bp, Homo sapiens
cctccgcgatgcttcaggcacgtaccagggcagcctgggcagggctggtcactgtgatctcatgaggtgtgaacttgaccccggccttctttcctgggatgccggctaaggacacaagttcagtgtttgccctggcttgtagcccagcgggggctccgtcatcccctggggaatgcctcggcctgcaagaccgcataccgcattggaacagggaaaccacctacttcagcacctccctcagcaaggtggcaggtcccaacaagccttgcaccacgaggaagtggcagtggcattcgggatatggctccctggccagcttgtgaagttcaaggggctcgttacttcttacagctcacagtccctcccgggtccagcacacctgagggctgacctccctcttgattagtgcaggggaaaagcactttaaaaagctgtgtcatgcgtaacttgcacatcttctgattctgacctgaaactgcatcccaggtcggcacagacgcaacccagtctcctcccacctccgagagtgcagtgtcctgaatggagaaccccagcacccagaagcatccactgaaggacgtacttctttgatagtgcctccatgcatgcagaagatgacgtggagagctccgcgcggcacagggcaggaagctggtgtgcactctcatggatccgaagccaacacacgcctctcaactgaggactctgcccctctggcattcttccagccaccagccctgggggccaggagccactgagtgggtcacacagccttagagggcaacgagggcaggagctcgccctggcggtccccatgcagacaagagggtcactggcttccttgctttgctcttcctggacatcttcctcgacattcatctttccatcctaccaagagcgtggaaaccacagggcatgaggacaggcggagacaacgctggaccatctcacagccacatcaagaggctgcccacatcagggctttctacgtggttgcaaggaacacaaacctgtgtgctccatttgcccactggcactaggcctcctgcccaccacccgcttctaggctattcgagccgcaggagctacaggctgctagagaaccctgcggcaggatgctgggcgcggttcagcttttgccagggagcagcatgggactgggatttggaaggtgtacagtggctgcgggctttagcaggaggagtgtctacagcaccttctgctcctccagaaataaggaaactgaggcacagctataaagcaatgtcctgagactggcacctgggggctgccctcttcctgccagactgagtgcctcagagtgctacaactgaccagaggggagaagccaactgaggcagcctgtttacttctaagggactaacccacatgaaaagacccaggcctcctgcgccggcctcacggcccctacacgcgttatcaagcttggagtcaactggacgacctgctgtccctcagacagctgtgagtgccacacttcaccataccgggacaatgtgcctttgcatgtgtgtcctctgcccaccctgggcccatgaacagctcactccccttgcaaaacttgactgtaactccctctagaagaatttttggac

SEQ ID NO: 699 - DNA, 1284 bp, Homo sapiens
ggatcccagcggtggtcgtgtagctgagcaggcctggggcttggttctatgtccctgtggctatgtttccagtgtcctctgggtgtttccaagagcaacaagaaacgaataaatctctggtgactttttgaaaaaatagtatctcttgttgaaagaaatgctccatctgtgatttcaagtctctcacttgagtgaattggatggaagtggtgaatttcagccaaagtggccaaagaaatcctgttcctgtgataatgacgccatcagcctctgcacctctgtcttcccttctgccacatgttgtctgttctccgtgactttggctgtctcttcagtgctggtgggatatatcagaaagtgatggaagatgtggcactgtgccctcacccagaagctggccatgtggttggctcctccaccagaatggatgctctgggtgctctttgagccagcttggctttgcctagcatgcacaggctccgggtaccgaaatgttgctctgagtgagcttgtcctgccttgggccaaattctgttaggccagggccacaaaaggccgagtcccacgggtggtaatcctggctgctttctgcacttccacataaagacctcctgaagatggcctgtggtctacctctttgcaaccaagaagcccgcagtgccatatgaatcctcaggcatggactggagcccccgaggaagcacacaccctgctcctgagcctgctgctcattttctctgtgtggctccatttgtgtcacagttgttgcacagacttgtgcatgctgggcaaggccaagctggctcaaaaagcaaccagccacctctgcaaggttgtgccaggagccggtggaccggccaccaacctcactcactgctggtcaggttacatcagttattctaccctagaggtagggccccagtgccatatgcttttcctcaggcctctgctctatcagtcatcaggcggcaaccactcaggctgtgggaacctggccatccctccttccttgagtagctgaggttgctggcttgtccgcctactacaggcacagccttgcagatgtggctagttgctctgagccagcttggcctttcctggcatgcctaggccccaggtactgacactctgctccgagtcagcttgtcctgccttgggtcaaattctaagtctggccagggccacagaaggcccagtcccctgggtgctaatcttggctgctttctgcacttgaacataaagtcctcctcaagaaagcctgtggtctgcctgttggcgaccaag

SEQ ID NO: 700 - DNA, 503 bp, Homo sapiens
tgggttagtgaaatggctcctttgccaagcgtcaacatgtggtagatctaatttgaaatgagttccagagctgaggcaaggctatgatagaacacaaggcaaacagctgaaaactgtagtcaaaaggcagggaagctgagaaagtgattcaaagaagcccatctgaaatcggaagcaacagggacgcttttagggaggtcctgggtgcttcagaacacgggccttcagctgagacctctccaactgcctggaccctggctgctggcagaccaagttgctcaacacccagaattaacttgggactggagtccccatgtgaggccacgacaggaggcacacagcaggacctctcagaagggcctggaggggaaagatccctcagctccagcctgtaaagaaggtgcactgggatgcccacacaaagaggattcccttggcagcaaggaaaaccattagccctgtgctgtttatagatagcagagaataaagagaaataagaagca

SEQ ID NO: 701 - DNA, 2339 bp, Homo sapiens
gcagttggtggacctggtcgcgctgtgccgggtgtgacactacggagagcagattacattatcaaaagcaccaagttgaaacatttgcaaggtaggtgagaaaaaaagcattcgtcagcatattttggattttatcattttgactttattgcctatggtcagttctgccagtttttgtctccttctaaaaattgtttcaatctgctgaatctatggaaatttaatattttccatagtgaaggctgataagacatctgaggaagaattaaaaacagatgatctctaatttaagaaacatttgatgctaattacttcttaccttttcacacaacttaaatattggttaatatataggattacattactttttaagtgagattttaaagctaaattgataaagtagagatctagtgagataattagatgttcatacaagatttgaaaaatacagacattcttagtcacacaaaaataccaaaaagcattgtgataattcactttttcttattctaatttgtaacagcattttaatatggtcagtagaatggcttcagcatatttacaatcttaaagtttttaactagaaaacagtttgatgtatagatctgttactcagcaacattttagatttaaaacttaatttaattttatagctaatttaattttatagcaaatttaattgtatagcatgtaaggcagtttacatttgatttaataaaattaacacttaggcttttatgatagctttctaactcaggtatcagtgattttcagaatgcagagattttcaaactgaaattttttttgtcatgatgctcttgtggctaagtttatacttgggttatttcttctttacacacacacacacacacacacacacacacacacacacacacaccccataatatgaaaaaataaagtctgaaagaaaatatacaaatacattactattttttggacagtgtatagatttgagtgatctgtagaaccttctttattgtattatacaggcttaaatttttaatgattactttataattcggtagagtatagctattttcattttcaaaaacatatatatgacaatcccagtataggtgatacattgttttcacaaaaattttataataaatattgacaataattttttcctatcctcttgaatctgtaaaaacctgccagagcaaatatcctgttctttccttggcattactaatttgttcatggtattgatataaaccactcagtggaagttacagtgtaataactgtaaactgcaaggggtatgttatgcttaaaggatcccaggaatgatccaagacaaaccacagacatggtaaacagaaattatacctctgcaggatcttaggactcctctacactgttaacaattattgaagacccttgcaaagaactttgtttatgcaggttatgttggtatttatcatattagaaattgaaacagaaaaatttaaaaaatatttactaaatcatttaaaaacaatgaaaacatattacatgttaacatatgtaatatagtttttctgaaacaaaataaacaaatatgtatgtatacatatatagcgagaagagtggcactgttttacatttttgtaaatgtctttaatataaggcttaatagaagacagctgaattctcttacctgcttctgcattcaattggatgcaatatggtattttgtttaaagtaaaatctgtctttacacaaatatgtaattatagaaggaaggagtattttaataactttttcagttgattgtggatattctttaatattacagtgaatctcaacaaatgatagtctgttacagattagttgcattgtgaaatctgaaaccatataaatcaacttttcagacttttgaacctagcctgtttcttaaggaagatttctgaaaggtgtctaacttttgctttaaaaaaataaattgtaaaatttaaatcatagtaagacaatctcaagcacattctgaaggatattttaagtttacttttcatcaaagttactttataaaatattcaagcactgcttaagtctctgatcctgatttcttaatgtttagattaattgaatttaaagtttattatttattagatgttctagctcttaaagtctttgctttgtgactttctggaggtaagtttttgtatattaattaagcagatgtaaacagcataggaaaaaataaaggtttgattagtgattttttggcatggtgctccactattctagatttctgttaagtactaaagaaagtaatttccaaacaaaacctttgcttgagcttgagaaccgaaatactgatttcaaaaaaaaaa

SEQ ID NO: 702 - DNA, 723 bp, Homo sapiens
gggaagcagactggacagaaaggaactctgagcagctaaactctgactaatcccagggtatacctgcgttttctcttcaccagatttttcctaccaggaagagcatgtgctgaccaacagacatgaatttcagcctggtagttacaacattcacaggagtttcactcgttgcccaggctggagtgcaacggcgcgatctcagctcactgcaacctccgcctccccagttcaagcgattctcctgcctcagcctcctgagtcactggaattacgggcgcctgacaccacgcccagctaattttttgtatttttagtagacatggggtttcactatgttggccaggctggtctcgaactcctgacctcatgatcctcctgcctcagcctcccaaagcactgggattacaggtgtgagccactgtgcctggtccattaaaaacatttgtaaagctatggtgttgataaagtattatgaaagactgcaaaaaaagatggctaatttttagttattattgcacatgtttagaggagctaatgacattttctatgattaataaaagacattatttatgtttttatttatgtattccacaacatttattttattttctccatttcaggaaaaccactatgttgttacaataaagattttcatgtaatttgtgttcaattgatagtaataatgtaacaagttaaaaatgaaggtaattgtgtttaaaattt

SEQ ID NO: 703 - DNA, 1654 bp, Homo sapiens
aggcgggcggatcacaaagtgtcaggagtttgagaacagcctggccaacatggtgaaaccccatctctactgaaaatacaaaatcccagctacttgggaggctgaggcaagagaatcacttgaacctgggaggcggatgttgcagtgagccgagatcacgccactgcactccagcctgggcaacggagtgagactccatctcacaaaaaagagaaaagaaaagaaaactttgcttcactaagtttctcttgccattatctcattaattcagatctgtacctcattgctgctcacacatatatgtttcttaccttagcctgaaccttctcaggccttgaagtcattattctactctttttttttcttttccttttttatggcactagagaatgaaaacctaaggtcttagaaaatcttaacttgaaaaagtctctaactggcatgatttgattacttttttcccctgtggacaaataattttctttcctatataatagatttttagtaagtgaaacctttgctgctgctttcctgggtttacattagttttttcctgcccttaagaataatttatctgtgcttctctgatgactgttaatttctaatagtgcaggaagggatgagcttttgatttcttctcactcccctcctcaccctacttccaaattacacactaacttctaacccttacagcctgttggcacatacacaagatccacgagaccatgctcctcagaagctacccatgtcctttctcaccatggtgtggctcttggagccctgagtatctgtgactacccactccaaaggttgactgtaagaggagagcggccttcttaattttgcatttcttaattttgtttttctccattcctgttttatgacttggccttcagatgcttcctactctggcctcctccttttttctcctaggaattgtttccaggtaacctaccatgtgcacttctcagctgctctgctcacctttgcccaccttcccgtgaccctgagagtacagatccgaataatgtggcctgtgcagagctcagagaactgtgaggactacccatgcctgtcagactctgctcagggacagagatggatgggtaaatggtgctgttggagacatttttatcttcataccaggctctgtttcatccctgcaccccgcacccccactcactcccctgagggggtaaaatgcagaggtggttgacctgaagggtctgattccctccttcccaagccttagggcctaccctggagtgctgcagtgtgtgagagctgctgcttgcttgtttctccactaggcctgctccaaatgcttagccaatctctggagccgacacagttgcctacggggtgacttagcaccaggttccattagctctccaagtgactgtttccacccagtacttttggcgcttgaggatggggggagggggattatttaaaataaataaaatccgaggtggcagtagaggattccttttgctttaaaaatctttggactaaaaaaaaaaaaaaaaagttttttatatataaatatataaagtaaattgttatgtaactattattgtttcttgtatgttctaattttgttttatgatgtaattaaagaaagtaagctgtgaagacttttcattttcctgtg

SEQ ID NO: 704 - DNA, 487 bp, Homo sapiens
gagctgcaagagaaagaagactgaattcagtctctcttgcagaaaaattgttttccgtcaagttgataataatgatcacactgagaatgaatgactcaagatgaatatccaaagatatatcaaaacctggtcagcagtcgtggggaaaggaagaaagcctgagttgagtttatgaaagttttccactaaagtcagcaacagcttaaattcaaaccaggcacaagacgcttgaatctccatatgagttgttcatcaaagggctgaaagaaaagaaatctgagcccgagcacggtctggcctaaaagctttcaagtgactcctttctgttgcaaatgaaagaagtcctgctactctaaagaataactaaaccagactggagtcactgaaactgatggaagaacatctcaggcatgagtgccatggtgacgtcatcagctccgttcacaaccactcaccatgaggccattgctcctgtggaggacactgg

SEQ ID NO: 705 - DNA, 444 bp, Homo sapiens
atgaacttcctgagcaagaaggccatccaccatgcagtgtaatgtcttgctaagagaaattagtattcagtctgctcaggttccagcaaggactttcttcatgaagatcttcaagtggaatcaagcagccttgcccatgaagtcatgcctgtggctccactgagaaattcgattaagtattccaatactgctgtgaaacgaagtgatctgattccggtgagacaatttatcttgcaagcatagcccatctggattctttacactaaggcaagaggcaagcagaagacaaagagagaaagcagaggacctccgggaaaggaagcccccttttcagtcggcctaggcagaagtagatttactctgaggattcactccaagggtgaagttttaagggtgcttcacttgctctggtttcataaataaattttgatcttcttaaataca

SEQ ID NO: 706 - DNA, 627 bp, Homo sapiens
caggatatcggccatgttaatgagtctgatgttgctagtatcacaggcaccggaaaatatgcacattatgctggagcattagaatgcaacagaaagagccctgggcttggagtatgcagaactggttcttgttacaactcctcttactagtgggctgctatggacctaaagtggagggctttgaaatttcctgcttaattgggctgcatgtcattgctgtccttagaagttgctctgggatgcaggtgctggtttcttggatctcctttgctggaattttgcatgtcttgttttgttgttgtaccagctttgtggatcagccaacatccttggcttgccctgtggggagtggggtgggacacatcttggattgctctattccagggatgtccaacattttggcttccctaggccacattggaagaagaagaattgtattgggctacacataaaatacactatcactaaaatagctgatgagctaaaaaaaaaaatcgcaaaaaaaatctcataatgttttaagaaagttgatgaagttgtattgggccacattcaaagctttcctgggccacatgcaggctgagggctgtggattgaataaacttgctctattccctttgcagtaga

SEQ ID NO: 707 - DNA, 1515 bp, Homo sapiens
gcgggtctggctgcgagagaccatgggggctcagctaagcggcggccgcggcgccccggagcctgcgcaaacccagccccagccccagccccagcctgcggcgccggagggcccggaacagccccggcatccgccccagccccagccccagccccagccccagccccagcccgagcccagcccgtgggggccgctggacgacgtgcgcttcctcatcgcctgcacttcctggtactgacggcgtcctccgcaggatgtcgcccgtctgtccgccgtcccctgtggttcttgcctgccttgtctcctctccccacgtccctgcgtctcttacaccccctcccacccgaggctccccagagatagcagagaattcgaagaggtcgccggggactggaaagaagtcccggcagggccgccttcgcagtctacaccccagcctgcttcccagcctacacccagacccagctcagaccttcgtgaccaccccatccctttctccggctggctgggtcgggggcatccctctctgtcgctggcttccagaggcaggacaggcctcctggtcatgtcccaggtcatggagaagcccgtgccacagtgaccctccccatactcctgggggggctgctctccatcctggatcgtaaggaggcatcatcaggctgtgttcctggaaccccaataaccctgggcccccagggccagcctgttgtagagggaggctatctgaccgccggtctggcagaggagatgggtgggcagctcccagacaccccaaaggacccggttctcttcccagagcgtcctaaggttactcttggaacctgatctttgttccctcatcccagggaaatgacacactctgtatttctgttttatttagaaatgatttaaaaaacattatacaaaggctgatcagtttaaaatgtgactgacactgaaatgctgtgatgtcccccaggctgaggggaagctaggctctggggcccccagtgctttgcccctctgtctgccctgtcctggggtgatggacaaacagatgaccacaggcaggagaatctgagattggaagcctctaggctgagccctctgggcctggccccacatccctcacctctgcagcctgggctgcctgcctccatctcctgttcattctcagctggcctgccaggagccaatggggagcctggcgggaggcgggggtgcctagagctttcaagaagtgagagcaccaacctgaggagtggacagggaccaggaagtgggggaagggaggccaggaagaggtggatacaggagacacttctcatctcatctcagaccctagaggggtccacagatggggacacaagacccagccagcccactggatggcccgggcaagtaacaacctctctgtgcttcatctgagggcacggtgagagttaccgtcggcctcccagggcctaacacgagtttcatgtgagtggacaggtgtgagctaataaagtgctttgcaaagtataaaacactgta

SEQ ID NO: 708 - DNA, 2494 bp, Homo sapiens
aagactaatgaccgaagcttcaagactttgacatgtgtgaaaacatgaaatgacccttggctcttattgttcttgctggtgtggtatgttcacggctgaaaagatggtcagaaggggaaaggaggaagtgagaagaaagaaacagggaaatgacagagtgttgctcagttacccaggctggagtgcaatggcatgatcttggctcactgcagcctccacctcctgggttcaagcggttctcgtgcctcagtctcccaagtagctgggattacaggtatgcaccaccatgcccagccaattttgtatttttagtagaggcagggtttcaccatgttggctaagctggtcttgaactcctgacctcaggtgatctacctgcttcagcctctcagagtgctgggattacaggcatgagccaccaagcccggcctgaaatacatttaaataaatgaagatggagaatcagacattactttcatttatctgaatctggtgtagtttaattaatctgtaattgtaagtctttgaatcatatgtcaatattctattttgttagtcatgatttctaagtgttacataactgtggccccagccactttatattttggtatcatgacagaagactctgattgtggttattttctacctatgcatttattcttagtgatatatgttggttaaattatggcatagttttaaaatacatgacaaaaatagctaacagtaaagaaatgtctttgtttctggttgaataaactgaccacgcaaggttccaatttaaaataaattctaaacgaatcatgttattttccaaaactgttcctcctctcagtaaatgaaatcaatatccacccggttaccccaagacagaaatctcaagatcatctgtgactccttcctcttcatctgccacaagaagagtagcttctatctccaaagctagtctctgatcagtctacttctcttcctatagcctctgctttagttcaaatctagaatcctgctgtggtggtgctgtggcttccaagttcatcttcttccaatccgttctctaaactacagtcttgctctttctaagactcagatcttataattttacttcccttcataggttgaatttaacctgctaaatcacataaaatttttctgaagataccagcctttctgccttaatcaaacacattagccaaatccatagcattactgggataaagcctgaagatcccaaattgataaggcatctggattccctttgataacagtattcaataacaatgaacacctactgagtatactattccaagcatttaaagtgtatcaactcttttcacaaaatcaacaataattattattgctaccatttattgagagtctactttaatccaggtgttacatattcatgtattcattattattacctttttttttgagacgaaatcttgctctgttgcccaggctggagtgcgatggcatgatcttggctcacggcaaactccgcctccctggttcaagtgattctcctgcctcagcctcccgagtagccgggattacaggcatgtgccaccatgccccgttggccaggctggtctcgaacaccttacctcaggtgatcctcccacctttgggattacaggtgagcccagcctattgttacctttaaaaccaccctgcagggtagctcttactgtctccatgaggaatatcagaaaagggaaaggacttcctggagggctggttctgcctcaagccaatcagctgacactaagcagtgaagccggaatctgaggtccctctgcctgccctggtctttgctcaccctgacaaccagacacctcactgtgtcctgagcagcatagatgccacacgcacagtgccacatagagaagggtgatgtaaatgaaaattaaaacactgtgacaaagtcaagcagggcatttgtttttgttgttgttaagttatttttggtagatacagggtctcactatgttgaccaggctggtcttgaactcctgggctcaagcaatctgcctgcctcagcctctcagaatgttgggattatagacatgaaccactgcacccggccagtgtcagtctttgttccctacaagtgaaatcaaaacagcctcacgcctgtaaacccagcagtttaggagcccaaggtggaaggatcgcttgagcccaggagtttgaaaccagtctaggcaacatagtgagaccctatctatacaaaaataaaaatagcctgggcagggtgactcatgcctataatcccagtactttgggaggccaaggtgggtgcatcacttgaggtcaggagttcgagaccagcctggctaacatggagaaaccctgtctctattaaaaatacgcctgtagtcccagttactcgggacgctgaggcaggactgcttgaacctgggaggtagaggttgcagtgagccgagatcgcgatactgcactctagagcctgagtgacagagtgagactccgtctc

SEQ ID NO: 709 - DNA, 2472 bp, Homo sapiens
cagaataaaaaaaattagattggatagaaataagaatctagataatttctattcactcttcatgtctctaaactttctcttatcgtggtgcttaccaagctttatattgtaactacttctttcattgtatgtcttccacaccagactgaacttagtgaaagtacagacgaaacatgtctttttcacaactgtcaataacctaccacaggatctggtgtgtagtaggacttagtaaatatgaaatctgaatcagaaccaccccatccccagtggcatttgtttacattcagaataaaattcaaggagtcattattactatggcctacaaggcacagctgtcattgccccttctttggtctcatttcctgttactgttcacctccggttctgagctccagtcacagggccttccttgctgtttctcagacttgccaaacacatacattcccctcagagaggagtcataggtcccctcagagaggcctgtcctggctacccccatcattctctttctgtaattctgctttttcttcatagcacttactttattgtctcctcacctcctatcaccacttgaccataataagcatttggtttttgtttactgttatgttcccagggctttggacggtgcctgagttctagtaggcactcagtaaatatttgttgaatgaattaatgcatagggttgttcgaacactgactccaaaagcccctctggagagtagtcttatccaaatcataatatcagtagtaatatcaaataattacatttgtttagggcttttgagtttataaaataatttcttttttaataggtttattttttgagacaggatctctgtcgcccagccaatatattttttaaaaatatttcaatttttcagtttttatatttttggcgacagggtcttgctctgtcacctaagctagagcctagtggtatgaccatagctcactgtagcctcaaactcctgggttcaaacaaccctcctacctcaggctccaaagtagctaggactataggtgcgtgccaccacacccagctaatttttgtatttttagtggagacggggtctcgtcatgttggccaggctggtcttgaactcctggcctcaagtgatctgcccgcctcggcttcccaaagtgctgggattacagacgtgagccaccgtgccctgccagactcttgtattatattattaacatgatctaaattatttattcatcaaaccacttggttttatatactttttttttttttttttttttagtgtagagacaagattttcatcatgttgcccaggctggtcttgaactcctaggttcaagcaatccgcctggctctgcctcccaaaatgctgggatcataggcgtgagccatcacgcccagccatggttttatgtagttttgttatatgagttattgtgaaggtgaccaagtcaaatgacttttaggtgtaaaagggtgttttgatctactgtagagtttgcttcctattccttaagtaaaataagtttgatccaggccagtgtttttggattaaacttctcagagcatcccaaagagcagtttgataaaaccctgagtctaaattatagaaggattaaaagttgaaacttgctgttttcttgagctgttgtggaaggtgaaacctggcctggcttcatgtgttggcaaatatttcctctgatctgcccttccaccgatggatgcaaataacttaaattttttgagcaccagattcattcaatatatttttttaacaacatacttaaagcctagtttaccctattcccctgttgtaccacctgctagcagacatactaagatcgtttatttaactgaaggaaaattaatttacagtgaaaaaactgcagcgttagtgaaggcatagagatctcttgtggacaatatttttgagtctttattgattagacttcattgtgacttaattaattgtaatactgcatgagcattttattactgggaacgcaaaacccaggcttacataatgcttctgatggagaatgtaacctgcagctactgccaaaaagcttctacttagaggcaaacaactctgccctgataggcttactcatcaagaaccacacagcatcttgcttggctaaaagcactttgtttagaaccaatggggcaagggattaaattggctcacccaccaagtctccatataccgaggggctcagagtcctcaaagcagttttctcataccttttgagacacactgcaccgccagagagaaaaatctatgtagtgctttcatgtcagtgaatgtagaaatcacagctgatgtcagaaaagaggttaagaactacttcagagtgaaacaggccagccgtgttcattcccatgacctaacataactaaaaaccagtagataaatagtggtactgccctatttattattagccttttcaaaccagctgtctcctggcttatggcaaccc

SEQ ID NO: 710 - DNA, 553 bp, Homo sapiens
gcattcccgacatcataaacgactcagacggatgcggaaaccgagacggcctggatggaaaactctttcaaggaagaccccagggccctgaacggaattccggatattttctctaaaacgtactacacctgccttttcccacgaagtatcattccttgattcaggatcaggctcaagagttaacccacctacggcagaagatgaagcttgggagagtggcctctgctcttctcatccagcatgtcaagaacacactaaagacctttgaggagctactccagagcaataactttgaccactatatggagcagcactactgcgagcagctggccaaaggaagccagctggcagagagccttgccagaaaattcagcacaggaagtggaacacccatgtcagcatacgatgactgtgaaagcaaacttgaaaaactgggctctgtgtgaatatccaatgttgaagcaccttcctggaatgagtgaacaaagttaaggacttgcagagagagttttctactggaatgtaagaggttttgaaggctctcttttctgca

SEQ ID NO: 711 - DNA, 524 bp, Homo sapiens
ctctgtctctcctgccaccatgtgaagaaggtgcttgtttcccctttgccttccgccatgagtgtaagtttcctgaggtctcccagtcatactgctggttaagcctgcagaacggctggtcttgaactcccagcctcaagccatcctcccgccttggcctttcaaagtgctggattacaagcgtgagccaccgtgcacagccaagacacaattttaaatcgagcggtcaggaagcctcctggagaaaatgacgtttgaacaaagacatgaagaaagtggagaatatttggagaaaagcatttcaggcagaggaaagtgccagggcagaggccccgaggtgctgctgacagccatcgtgtgctgcggaggaagattgcctgagaatggagccattcaggaggaaatggggcagagaaataaagagaaatcaaatcccatcttttcagtcccgcttccctcactccctcatccattcttcctggcagactattcagttgtgctttttaagatttattctgtttttg

SEQ ID NO: 712 - DNA, 479 bp, Homo sapiens
caaacacttgttgcttgactgatacattatggcgggcgggcaaggcccccgatcacgtgataccgccccccaactccgggcggaagaggccagcgacagcgctgcacgaagcgagtgggcgggcgctcgtgcccggctaaaagatggctgctggcgcctggcagccaccgcctgggaggttactgtaaggcccgcagctcccgccagctcccgcggactgctgccgcctccttaccatgaagccagtaagtcgtcgcacgctggactggatttattcagtgttgctgcttgccatcgttttaatctcctggggctgcatcatctatgcttcgatggtgtctgcaagacgacagctaaggaagaaatacccagacaaaatctttgggacgaatgaaaatttgtaactcttctggatttaattatctgaaaatacagttctttccctcatgcttatgtagatataaaaataaaattcataa

SEQ ID NO: 713 - DNA, 553 bp, Homo sapiens
gtcccacggtgggggcgcgccggtctcccggagcgggaccgggtcggaggatggacgagaatcacgagcgatgtggccctggcgttgagtttgtggctgtggtcgcttcggggccccggtggcgggaccaggggctcgtgagaaatactaggctttagaatttcaccatatgaattttgggagagaggagcacagttcagcccataactaacacacgacggaatgaagttgataatagtgagaccttgttggtacaagactatgtaacataacctgcgcttctcaacaaagaattgcttttctgacttctgcactcaatagcaagacaaatctctcctctgccttctccttatcagactactcaacatgaaggcaataagaatgaagacctctatgtataataattgacttccacttaataaataaggttacttggtacactggtcgacaaaaccttgaaatgttgatgtttaagggctgttgattgctggcagcaaagaagtccaactgtgctggtacccgagatagcgtctccacattttcttccaggatc

SEQ ID NO: 714 - DNA, 695 bp, Homo sapiens
tacgcttgatgcaccactacctttctaacctcacaccctcacctgtttacccctacgtcctcaagacctgcttctttgtttgatcaccaataaataatgtgggctcccagagctcagggccttcgcagcatccataccagcgttggccccctggacccaccttatgcactcttaacttgtcttttctcattcctttgactacgctggagtttgtagcccccacggcctggtgttgggtctgatcaccccaacatttctggcacccaacgtggggctacgaacactccggtgaaggaacactagagtgtgcggaagcggaggacacattgtcagaggacacccaaggacgactgaaagaagcttggtggaattcatataaagttgcgagtttcaggttggttggctctgactgatcacctgtattatggaccatctgtgtgattatggggaaaagttcaggacaccagcaacctacattggataggaccacctctgactccagggattgccactcaatctttctgagattagcacccacatccaacaaggtgtgatcctggtgatctttgaaaaaaaggcactgaaacaaccatgatttaagtttttggtattatgaatgcatgagaaattttctgggaaaaaatcataactatattaagaataaaaaataaaaaattcctaaggaaaatacttga

SEQ ID NO: 715 - DNA, 526 bp, Homo sapiens
gatcacaatcaagagtttaaagacaaccggtctctgctccagccacacaggacttcttctagtacctttactacatcatgcctcccctgcctcaggcttctgctgggatggatcgagcacattcaccctaaaattctgattcagaagatctgagccttctgaaaaaaaagcattgagagcataaaccactcagaagatttatagcttaaagcagatcaccttaaggtactggaatcagtcagtgcttagatggaacattttttgaggcctacatcttcactgagtgcccttcttctctatttcctatacttccttgtttctttctgttcccactgcatcccttatggatttgtacaaataatgctgggttcttttcttcacccacatgcagcagttgctgctggatcataaccattccttctattggttttaaaatctgtttttctcagattccttacacttgaaggaaaaaaaaaaaggacatttagcctgtttttcttttaagcaataaaaattcttctctcac

SEQ ID NO: 716 - DNA, 3533 bp, Homo sapiens
aatatccagtcagtgtaaactcgtttataatttggtcctttgatttcaaggagctatgatgcagttcgttgtggggatgtgttgtctccatgtcatacatgtgactttgtccatgtttgcacccagttcaaggaagacacaaccctagggaaagacaaccctccccgccaagcctctcttcccattcttaaacatagggtggcgttattcaggttggaccagtttaaaaagactaacgcatttgtcctcgttgttgggtgttttttttctttaaatttgtaaaacaggaataattgtgttaggatgaagtatgatactaggagaacagggaaaactaacccatcgtgttaaaagtcagaatagtgcttaactctggcaggaggtgagatggttagtaattcagaagggggtgccaggagagcttccagagccattgaaatgttcagtagcttgatctgggtgatgatttacatacataaaaacatattaaactttgaacttaagatttatgccttttactgtttgcaccctataactccaaaagaaaagtagaggggaaaaagagtccctgcaaaaggcagtcttgaaagaaagcaagtctgtgatgtggagaatgcattggacagctctcagcaatttgctgtagcttgggcagagagataaaagctaatgccagcatcaggttgcccaggcgagagaaggcctgaaagaagacagcgtggagaaagtgtcagcaagcttcagcaacagcaggaggcagatggtaggagagtgggcctcaggtgtggtgtggcagagcagagtagccacacttaggccccagagacagtgtcttctcaccctcagttgaaggggcaggaaatcaatcgctctagtcacccctaagctggaggacggacctaaagttgccacagctttgagaggcaaagaagtttgctcagtggcttttagagacttctagggccctgggaccctgacactgaggaggagcaaactgaaggggagagtgggcacattccttgttggctgctgtggtgagcagcagctggtcgttgtcagtcaagctccggaccactctgatgatgctcactgcattttgatggagtaagccagggacattaccactgtgtttgagccatctgaagtattcctgggtgggtctgcagttggcagcccgtgatcctttttccattcaaggatgatgcaaaggtaaggggccaaggctgagctctgtagatgcctgtgagagcctcctggtctcaagaggtcataccaagggccttggccaccaaggtttcgtgaggaccttgaggtggtttcgccatcacaatgtcagacgtgtcacacaccatctggtatgtcctcactgtatagaggaagaagggcccaagtggtgaattatctacaagtttgtagcaaagctaatactcagactccctctacagccttgctactcagtgtagtctgtggtccggcagtgtcacaccactggggtacttagcagaaatgcagcttctcaggctccactccagctctcctcaatcacagtctgtttttttgtttgtttgtttgtttgttttgagatggagtttcgctcttgttgcctaggctggagagcagtggtgcgatcttggctcactgcaacctccacctccctggttcaagtgattctgctgcctcagcctcccaagtagctgggattacaggcgcccgccaccatgcccggtggcgtgcatggtaatttttgtatttttagtagaaacaggatctcgccatgttggccaggctggtcttgaactcctgacctcaggtgatccacccgccttggcctcccaaagtactggggattacagatgtgagccaccacgcctggcccacagtctgtattttaacaagatccccacctcagtcttaggcacatggattctcctcaacccccaataccacagagtctattaatttttacccaatagggaaggggaaaaagtcaagaaagaataatgaattaagtaatctttccccctccaggaagctctttatttaatttcgctcccatgaaacacaatttgaagagtctctcaaataaacaaattccattttctgataattatttaattgccccacttttgaaatttttgtcaaagacgactgtcactccctgtcagaacttctattcagcacagtataccaagcgtttctccatcgagttgttataatatgatcaaaaagcagggagagatgctgcttggttaccctgtggggccttatcggggctcagtgcagtctttccatgtaggcattctcaaatactcaattgaaacctgattgaggatcatttgatctctgttggccctagtgcagtaggctgctgagaaccactgatgcaatagactgagagactaactgcctgcttccctgtcagcccaggctctgctaaggccgtcttagttacagaagaaagtggggcagagagccctgcaaggattacattccattcctaacggagacaggcaagcgttcagtgcccgaagcagggcaggcctttgtatggctcacttttccctgtaccagcctcagccccgtacattcagaaagccctgtcgggaacgtgcgggatcacagcacaagacagtcattcactgattgattgacgacgtcaacattgcggaatacctatgttaagctgagtacgagggatataaaaagtaggccctggagagtgcctctgggatgcacataaccagacaagataaagaaaaggcagatcacgagatcaagagatcgagatcatcctggccaacatggtgaaaccccatctctactaaaattacaaaaatcagctagacgtggtggcgggcgcctgtagtcccagctactcaggaggctgaggcaggagaatcgcttgaacccgggaggcagagattgcactgagctgaggtcatgccactgcactccagcctggcaacagggcaagactccatctcaaaaaaaaaaaaaaagaaaaaaaagaaaaattagggcagcttttagacatgaggccccaaagtgccaactagtgcacctaaacttcaactctcttttgagtgttttatgtatctactcagcatccagttgtaaatatgcaaaaatcaatgcctactgtatttaaaaattactaaattcacaataaccacacagaatctataataaatagaatcaatgtaataatgactcagatccaggggaagaaaattataaaattttggaaaaaatgatgagctattaattaagaaaatagtttgttccttggtgagaagactcaatgtaaatatgtcagttttctcctgacttaagtcttcaacacaggcctaataatattgcagtggcaaatgattgccaggggcaggaggggatttggggaagtggtaaaaatgatctgtgtcttggtagtggtcgctgcacaactgcatacatctgtgaaaactcactgaactgcgcactttaaaagggtgaattgtaatatacatacctcaataaaccttacttaaaaatta

SEQ ID NO: 717 - DNA, 708 bp, Homo sapiens
aactgacataagctgacactctgctgtatatcttggcacaatattgctttcatctctggagtcgggtgtcttacaaatttaacattgtcagttgggaccgtccaaagatatttacagtaatgctgaggtcaagcaatggcagtggaactgtacaggatgtgggggctgggccaaagccgtgggactccggatttattttgtgagttggagaattgtctagtcatcagaccaacagaggagcaaacctctaacagcatctccctgcttcttcccaccctctcaacaggaggcattggagaaggtttatctaatgactgacatctgacgcataaggtgcaggcacacttactcagggtgcgaatatttactgagtgtctctgtggggccatacactactctaggcactggacatacaccagtaaagagaagctgtcctcatctgtcttattttctggtcttaaatctaaagccaagaggcatttagcagcacaaatcctcttcagcagtcaacactcccaaagtttcaggcactgaggaaaataaaaacaaaactgtggccctttcccaagaagcgcacagtgtccacaagaatgtgaaagccatctggaaactgataaactgcaaaaagctcagccatcttctgttggcaaaataaaagaatggatgtccttggaagaacgatgtccttggaaagtcatcaaataaaaa

SEQ ID NO: 718 - DNA, 2282 bp, Homo sapiens
aagagcaaaatgctgtctgtgtctcactcaatgtggtggctgctacaggaggatcttcccaggccttctcagggaattcccatcaggatcacaggaatggtacctggcagacacaacccagtctgcaccttccatgggccacagctgatggtacgaggagaggtgtgacatctgcctgacctcagaaatctaaatcattccttttgcaacaaaacaataacagtggagtgcgttccctgagtttttggagagaaaagaaaaataaagttcagaggcaaaacttggtagaaattctgaagcctggatgacagtgatgactccgcgcagcaggaacgtcgcgggccttgcctggccacgtcctcttggctggaggcatgagtgtttatgccaggctgaagaagtcacttgaactcatgtcctttgactgaacattttttatgagacctgcataaatcatttctttaaaaatggcatcctgggcatggaggcagtctgctttttgcaagaattcttatgggcaaagtctcttcagatgagaatgattctgctttaattccctctgccttctgcccttgggtaagctcactgtgtctccttaaacactctggctttaaccagtttctgcgtatcattcagaccaacattcctctcagttatcagtcaactgagagactgagaaataaagtcaatagaatgaaaagaaaatagtcatatacagtaagctcgattttcttcctaccgcttcctcatatctttgccaagtcaaaccaaactacctccttctagaaatttgtcttataaattatcttcatgaccttcaggaagctaatatattttaaggtgtacaaagcactaaaaatactgattaaaagatcaattggacttcagcagaatttagaacttctgttcatcagatgacaaccttaagaaagtgaaaagataagtgctttcattagttcccacaacacaggaggaagccctagaaaatcaatcagaaaaacacaatccaatttaaaagctgagcaatagcctgtgtgggcacttcacaaaacgggatatcccaatggccagggagctatgaggaggtgatcaagatcatttgttttcaagaaaatgaaaattaaatccacagtgagggagaattgcacactcaccaggatgcgtaaggctaaagagactgaaaatgccaacttctggggaggacttggtgatgagaactcacctattgctctgggaatataaagtggttccaccattctggaaaaattcttcagcaatatttactaaatttaaagatatgcctatcctatgacccgaaatcctgctcctagctctaactatgggaaatgagtggcgcagtccacaaaaggacatgtgcaagaacatccatagcagctttatgcacagtaaatccaaactggacacaacccaaatgctcagaacaagagaagaaataaatacatttttatagccttgcaatggaaaactatagtgtgataaaacaataaaccacgagtgtaccaagaatattgatgtttgtttcacaacaaacatgtgcgtgaaagaagccagacacagaagagttcccactgtctggttccatttccacaaagtccaaaacagacacaactaactgataatgacaaaaatcagaagactggtgatctccagacggaggtatagacttaaaaggggccaagggaaaataaggggaatatgaaccccactcaaaggtttcacacacaaagaggcagagtagatacagagtgaataaatacattattttcatgtgcatacaatagatcaagtaataaaattctgagagccgcacatatgttatttagttcatacaaaaaccctgggtttattctgaacccacctatgagatcacatggagagactggctccacctgtgagatcacatggagagactggctccacctgtgagatcacatggagagactggctccacctgtgagatcacatggagagactggctccacctgtgagatcacatggagagactggatcctgaaacacaagggtgtgctgcatttctggataccatcgcagacctttgcaagcagttccatgaaacaagaaaggagcattaggatcaatggcatgagatttaattaaatttgcattggtttttctacgttgactttcactttgcaaccaaagaacaccattctccctggcattgtggtaatttaaaagtgccggggaggtgtggctcactaagctaaactcaacctcatcagataaaataattagttttg

SEQ ID NO: 719 - DNA, 1519 bp, Homo sapiens
aggaggcctggggaacaatgagtaaggcagagagggaacagaggcttgtaggccactgtgcggactttggcgtttagtctgagctggggacccactggaggattctgagcagagcagtgacatgattgcgcttacatttttaagacttactctggctgctgtgttgagaacagatgaccatggggcatagacagaagcagaaaggttggctggaggaaacggagagaaaatttacatctggtggagcataaagaaaccagctagaggactggccttgtcattatctaactgtgttgtgacgaactggcacttcctcatctctaaaagcagggccctgaactagaagaccgccacgtcacatgatgaaaaacactcaaactaacacttcttacccttgtgagcagccctactagcagatttaatgtgggaggaggttcacactacgggataaaaatcaagttttaggattccattttatctaagctgaccaccacaaggcagaggatcaagacttagctaaatacagccctcaggcaagcttcacttccccatctgtgaagggagaataaatacacatgttaagataaatgagagagctggtcaagtgtttcgagctctttggcagacaagcctgactttccaaaaaaagacaaaccacaacttcggagccagtgctatttcttctgtgcatggtgaggtgacttccccagttgtaaaggatttagagctgaaattccatattgtctggagctataattacaagtctcttgcactaaaacagaggtcagctggcctaaagcatgctgaaagaaggtaaatgtctggtcacatttccatgtggtatactcctttcctaactttttggcacaaatttcatgttgatagaacattcattcactccacaaatatctggcaagtaggtgctgagtgctgtgtatagacgagtgaacacaacacagaccctgccctcattctgtgtagaggacagcagaggagtaggcacagggctctcagctagggcagtaccaccctatgtctggggggcatttcggacatttgggaggtgctgtcaattgccaaaatgaatggggaaactctgctagcatttaagggtgggagccgtggtgccacaatgacctgtatgaggaaaaccagctccaggcccgcatgactagtgagtgtactgctagacattcataaacatgaaaaactcttttgtgggaaaacagcctgttgcatagcaagagtgatccatcttgaagtaaaactgccatgatgaccaatgtttgacgcctacaattcaaggtggtccagtagcacagataagccctcacaacctccccgtggtcatgagtttctaaaggaagtcagggatgatgagcttcctgtgtctttaccctaaaagcttgctatataaaggatactttctggaggttggttgtgagaatccaccatctcttggcctacctagacatcgtttctgtttctaagtctctattaaatatttctttctgagaaa

SEQ ID NO: 720 - DNA, 1922 bp, Homo sapiens
atcttcttcctgccctcgccgtggcgggcgacggtttctcgcgccgtggctggctcggccggccggggcaccgcgccgggctccatgcagccgggctgcgcggtcccgcagagcgggcgcctccggggctcgagtcggggacccggcaggagcgggccggggatggcggcggcgggcggcgggtcggccgtggagccccggagaggcggccgccaccaccgctgcccgcagtctgcgaggtgtccggcggtccgctcagggcctcttttgcagactcggtgcccggagtgcgccggcgccgcccgccaggtcttggcactgctggcgcggccgcggcggcgggggcccggctccagatcaccgacccccacgagcgccggccctgcctgcccgctattttggttccatctcttctgcatatttatgcttgcctgttacattccctggcctctgagtgtcctttggcagtttccaaagcatttgggcaagaaggagcttgggcagcttcacaacaggtggggacgcgcaggggaggggccgcggccggaccggcagagtttcaagggctggcgcgccggcggactttccacactgtctttcgggactggggttaggagacagcccttggccaccactgtgtccttactttgtcgctttacttggggctggacctcccctttccagctctggcgtgtgaccccgcaacgagcgtggtgtcgagaccaccaccagctggggcggtgggagcgaaggtgccccaggctcggggaaggtggaaaccttttccccgctccccaagtgattgttgcgcgctccggtgaggggacagtggtacctcgatttcccgtgtgccagcttcgggactcagctgtgcttttgtgtctctttgattagcaaaagcaaaacgaattcctccccgaacactaagcttcctggaaacttccctagacctaaacttgagaaccgcatataaatgggccttgagggttctgtcgtcagtagcgggttacgtgattgcaaacgagcaagtttaaaacggagtgggctttgggctgcagagccgcctggcattctgacagctgagcaggaggcagaggtgagagtccaagatggactaaaaatgtcccagcagctgggagcccaacctcggcccaacctcgttgaaaggaggaacattcggtgcagccgtcggaaccttattatttatgaaaggggacagctcacaggattacatttttctaagccaatcctgtgaccatcctccatgaaattctctattttggttgcatgtggtcaaaactgagcctcactgaaacaattgaaaacaaatactcccgacaaatcttaagaatcgttttgaaaatcaaaaggtggggaaaatgttgtggcttctgagctttcttcagcccatattctattattctctgatgttttatggtgtaaaatcatacccattccattatgtattgattgtcaagaaggaagtaggcttttattgctatttttatgtcagtttccatttactgtctcaccacatttattgggttattgcctttgcctttgactcaacaggagctggaagggtaggaatcccaaattctgttgcctaaggcagccagttgtcagaatggactttcctcattttctattatgaggcctgaggaaagacattcagttccaaaggctgtgcctatccttttaaatagaagagagagggcccggcacggtggctcacgcctgtaatcccagcagtttgggaggccgaagggggcgaatcacgaggtcaggagttccagaccagcctggccaacatagtgaaaccccgtgtctactaaagatacaaatattagccgggcgtaatggcgggcgcctgtattcccagctactcgggaggctgaggcaggagaatggcttgaatccgg

SEQ ID NO: 721 - DNA, 594 bp, Homo sapiens
cacgtgcgaatccacctgtggagtgcgtcccctctctggggccaaggcctaggggaggccgaagcggagaagttgcctgaagactgggaagtaagagtaggggcgtcggaggaatcgaagttgcagtgacatcaggctcggacagccggcggactcctcgcaaggcctcaaacttcttcatgggaaaagatggcttctcttttttaattgaatgaactagaagaagttcattgttattcatcaacttcaaagagactatatgaggccccttggccaggactacagagcagtattttttaatcagaaattatagccaaaaagaagagaccagaacacatgggtgagtgttactgaattattggttttccttaaatagtctagttttggtgtgtgagaggaagaaagttgcaagtgcttatgtgccaggtactgtgctaggatctgaggatgcagaaatgaagaaaatgcaatccctggccctcccacctgttgggggaagtggacttcgcaccctgtggataaggagtacacagtgtagcactgtggttagaagcaccagctctgtcatcacagggcttggcttgtttcctggct

SEQ ID NO: 722 - DNA, 513 bp, Homo sapiens
ggttaaaagcccagagaagaccgccaggggcgcgtggaaatggtgtccctcgtctccaaggcccagacggagcttagcttcctcttgaaggagccatatctgtatttctggtgaacgtcgtgtttgacatcaaaggaatgtttagagacatgatttcagccttccttacgcagagaatgctcatcaaaaaataaaatggacacaccatacactgacgtcactcagatttctatggctggaagttaacaaatattgttttcaaatgcgtgtagcctgatgctccagagttagtttggcgagcctcagcattttctgtcaggcacaagaaagaaaagactccagacaccatgatgtggaacgtggagtggggatgtttggtggccttgaatgcctattccatattgttatgcaggctggatgtgatggctcatgcctgtaatcccagaactttggaaggcctaggcaggtagatggcttgagctcaggagttcaagactagcctgggcaacatgg

SEQ ID NO: 723 - DNA, 591 bp, Homo sapiens
ttgactgctaccatgtaagatgtgactttgctcctcattcatcttctgtcatgattgtgaggcctccccagccatgtggaactcaatgacattctggactctatgcctgagcctaatgccataaaggaatgaagctttagcagtcttctgggagaggcaatggaatattagcagacgggacatgaacagaagtttataaagctacttttgaacctatggtagcacaagaaggatatgcttagactagtctgctggtcccacaggaggatatgcaacatgtgaggcagagccatgcccaagtgaactcaactggttccagagtatgaatgagaagaccagtagaaccatccatgcaagactgacttggacaaatgtcagccaatctgaagatctgttggataactgattcagcgttttaagccactaagttttgggatactttttaatgcagcgttattttggtcagagttaagtggttaaagagtcaatattcttatacatattacacacagtcagatagacagaccgatacacacatgtgcacacacacagagaataatataggtctaatggcttagaatttacacttta

SEQ ID NO: 724 - DNA, 2566 bp, Homo sapiens
agtgctcctgctgaccttccctgtctgcagcccagctttggactgtggagatgccctcagcctctactcagtggctccagcctcatatttgcgtgctatacctttaacctcaagttctcttgctgctaacttaagctgtgactgtccaggacctgcacacacacatatatgcacgcatgcacacacacacacacacacacacacgcagaaggtgaacacacaggatgaggccctgaaaactcatttcacccgtgtacctcacccaaaaattcccctttgtactcctatctttatctctaacagacagcatgaaggtagcccgaagtcccctcaccctgtctgtcctcctgattctctagcccagttccctctagctccagcacagactcttatctccagccctgactgctgaaaccctccagccccagctccagcccctcaggaggggactgcgtgggaggaatgactccagcaagccggcagctgacccgtgtctggcctgcatgcctccccctgtggtccactgccggtggtcttcagctctctcctcgtcccacccccatggtctgctgacagcccagcccagtgcatccctgccatctctgctctaccgctggtcctcccaacaaccaacttacagcttccaattgtggacaagataaggaccattgcccaggctgtctatggagccaaagatatcgaactctgtcctgaggcacaagtcaaaatagatcgttacactcagcagggttttggaaatttgcccatctgcatggcaaagaccgatctttctctgtctcaccaacctgacaaaaaaggtgtgccaagggacttcatcttacctatcagtgatgtccgggccagcataggtgctgggttcatttaccctttggtcggaacggtgcaccactgacatcatggctcggctggactctggaaagcaggaaattgctggagcatgtttgggcatcaatgatgtcatccgctacgaatgccgggtggggttactggactgagggccatgaaaaaagaaagctgcggccctgccccgtggactcactgccattctgttctttctcacgtttcagttcagctcactttgttttccgtccccctccctctactgtaaaagtatgtactcagtgtttcatttcctgctggatctgattcaggtcagtgatgaagttctttgcgagctcagtggggaggcgtttcctccctttcataccggccctgcttagggatgcatggttggttatatacttgcttcactcggttaggcatggaggagaattcattcagacctcataggtttaaatcaaatgcatgacccttcacattttccagagatttagacagttacagtgagacaattaaacattcaccccccaagctgcacttggagatgtgtaagcagtaatgtagtcatgcgctccccatgatatgagagtgtgcagaatgccactccccacagcaggtccaccaggacctcctcagggagcatcttgcctacaaaatcacccatcccttttcccccactttcttcactttccctacgtttccactcccacacccacaaataaacaaagaaactttgagcttattttacaaaagtctttgaaatggccctcctctctccgatgctcctgggccctggtttggccccatctgtgcagtctctctgatgagtgtgaaataagccaggtttggctcatgctctccctgtgagcttgctctccccgtgagcctgccctctccatctggcctcactttgtttgtgtccctgggtcctttgtctctgatcctgggatcctggtggtttcctcctccccgcccagcttgggtccttttccccagggttcttccctatctctacatcagaatttcctgctttctcccaaatatgcatttccctggcccaggcatccattgcttcctctcatcgtgaggtccctgcagcagactgccaatggtgttgtggccatgccttcctccacaacccagggaaagctacatgtgtgtctgtcccatagggaaggagtcatccctgtctcttcagtgtggcatgttcaggaggaaggaaagtaaccagcgtcattctcaatttacggaaactgtttatcatattgacaagaagaagaaagctttgcgactcatgagaatgatgttttcttctctggtacataaggttatgtaggtccaatccattgtgtagaagatcttttctcccttaatgggatgtacacttatttttagcacaagtataaaactactttaaatgaagtcagcctcagccagggaaatatgctgagtaataatgttgccaggtactataccactgagttgagtttgcaattcactgctattaatccctgcatgttagttctgaatttttactctttgcatacgtagaaaaaatggtgtttctcttcagagtcaaggagggaaaaaagaaaagttaaaagacacttataacacttttgtgtccacccctaaaatcagcatattgatctactatttttctaggtattgatggaatattgactcatatactttcatacaactg

SEQ ID NO: 725 - DNA, 1031 bp, Homo sapiens
aaaaaaaaaaccttaaatgcccatcgctaagtgaaagaagccgatctgaaaagactacatactgttatcagccttttgccaagctgaacacaaggggatgaaaagaaaatctgggctcgaatgtgcaatttcatattttctgttaaggcaatttacaacatatcataaagctgcattaataaacagatgttccacagtctgcagaatataaaataaatgtcttgaataagctacgaagaccaaggcacttttcggagcagatttttttgtcttaaagttttatctcatgcaaacactgcgtataacacaaacttatataatcaatgcttttagcaaaatgtcatagtagaaccaaggcccagttgttagctgaaatctatataaatataggcaggagtagggctgattggagccattgtacagtgtcgggaacataccaggacactgagaatagtgtcatgtcataaggacccagagcagatggaccctgctgtgatgcacaaagaggaccacgcaagatatgataaagatctacatcactgaattttggttccatttttgtatctcagcttccaggaaataaaaaagaattctaacattcatactttcagtattttatgtgagaggttttgttgtcaaaatcaagtctgagagcaatgtttgttggggcctttaattggagtcaccaagcgataaaggggacattgtcctcaacaataaccctataataaacacgttttggacaataaatatatgacaatttcttaaaagcaatttcttgggcaatcaagacagtatggcttgagtatggagttatacgatggtttggattaatccagtattaaatctttggttattacagaaatcaatggagcctattcttccaaataatccttaaatattacttatctcaactgagattttggtgaaaatttagctttagagcttttattgacctgccaatgacctgaagttaagattattcttttctactgaatgaagacaaactaccttataaaaattaacccaga

SEQ ID NO: 726 - DNA, 3597 bp, Homo sapiens
gaattcctacacggctgtgcctctcccaccccgtcctctttgctcggaagggagacctggtttgctctcctccatgacagcccagcccctgctgtgcacaggggtggggctcgggatccctccctgcaccctgatgtttattaactgtagatagtgaatttcaagttgacaggtaccttctcagggatttatatataaatatagttagaggaaaagttgaagtctattttactactttttagtgtttgagtaaattatgctttaactggacagaagaaatatttctcagacaatgtcgatgctgctgatgacaactgagatgcctggagctcacccttgatggagacttccttggtgattggagatgggggactctggtggcagaaatggctttggggtaggtgtgaagttgcttcagtccctctgagttgcctcttctggatggaacgtgtgtatcaacaacaatgaaatgcacctccgtgtgcatggaggcggctgatgagaatacagataggccagtcctcgctcttccctccagaaccggccgctcccggtctgacgttggagcacgtgaactaagagtgacaattttttctacttgcttctgtgaataaagtgttctacagtcagcccagcactaaactcaccagaaaagaggagggaacagcacggagccattcatctggaattactcgatgtgcagaggctgccccttggccgcacttgggaacatcgtggacatcttccttcctctcaggctcctcctgacagactcctggcagcactggagacctcaggactatggagatcagaattgtaatggctttgtcatctcagtgtggccactcctgaggcaagaggctcctcctgggagcaggagagagagagtttgtgatgttggttggaaaataggatttatggatgcaggagggccgtgctaggcccctctgcccgcttctctccctgctgttggcggtgaccaggtctcaggagcggagacgaggctgttgtgagtgaaacagaagcccctggcatagggccagaccctaggcctgaaaaggatgcaaagcctgctgttttcaggctgttgggaagaatcgtgcgtaccgagtgattatgatgaaacgtatcccagagaggaaatgaatgggacctgaaaagtgggtctgccacatccctggtagcccgcctccaagagcactacactccccccagccccaccggccacactacatgacgtgggaaggctgtccgttcatccttaccctggggactcaagtgtgctctgcggagtgagtcacagccctgatgtgcaccctgcactactctttccccaggtgcgccggagacgcaggcttgctcatttccgtcctgacacagctcgctgttcctgcggtggtcagagtccccctgtgctgtgtcagctcctggacactactagtctttcacatgataaagcgcgagcactttttcgcttttgcagtatttggggaaattctaacacatttcccggggatttgcccaggtccctccacctcccacggtgggtaactgtgtggattctgcacctggcaatcggcgctcccctttggaaacacctgggggccctgtttcttccagcctggtccttggtttctaccccagccgctttcagccggcacctgcatgggactgcctggagggccacggtccagggaaggacaggtgggaccctgaccatgacagatctttctaaaacaataaagtcccattgatgacaactgcagtgggatgaatgccattgcagcggtcatgctgggagctgccgagagcttacaacaaaagcagttcctctcaagacactgcttgcatcttccctccacgcctctcggtgcatttggaacttgtttatgcgctggtataactcgagtcagctgcttatttctgtgcccttgcactcacaggttccttcattaacattttaaataagtggctaaaaaaactcctctggaggttgtttttgaaagagacaggaaaaagaaacacacagtacctggattgttttgacttattttcaagcgactcagctgaaagccggtgttgcatacacaatttcctcacgctgacccagcctgactaagacttgataaaaggcacagcccttggcagcaggcagtgccaatgtggacagtgtacactaagctgtgagtgtgtgcacgggcgagcacatgtatgtgtactcatacatccagatgaactaaagggacactgggctttgtgctggcaaaggttacgatgctgctgtagcttggctgtgggccccaggcagtgtcagatggaacctgctttgatggcgtgttgttcagtgtactcagtggggtctcacatggcccgaggacccactgtgagcactccgcccgctgtggcacagaacacggctggggtcatcacagcccaggtctttattgaaaggcggctcatatagaacccatttggccaggtctgggccatctctctgcctctgccctatcttggctgcctggaggggcccaggcccaagaggattctttacccctggaagagctccccaggcattcagcctatggcccttgacatttggctgcaggttaccgtcagaatcaacaccatatcctgaggaagccctggtatttccccaagtctgcctatgtattagacactctaatcaatgctaacacagttcagtttttgagggaactagttttgtcataatactacacccctctattgtttttaaataagaaaaaaaaaaaccccacgaaactttccatcaaagcaatggtccgtgttggcctgatgctttaagaagtttgaggaggtaggtatggaggcaccttaacaccagtttttgagcagaagttctagaagctgatttagaactacacagctatggatacacctgatgaaaaccgcaaaaggcgatgacaggcccagaaatatgaccagcaagcccgtgagcctttggggcatccgactgaatttgaaaataataccccattcagatgaacattaaaagccaatgtactggaattctctttgttctgcccgacatttgggggtgtccaaggacctgtgtttttaacaaagatgactttatgaccgttctaaggattgaacagattcctgcacagggtgccaggtttcaagttaggtcctcttagtataagctctctttttttctgaatgtaaacctatttgcattgtcatttctaataatccagtaggtttctggatattgtaaagatactgagtacagatataactgtgtaaatttcatagtgttttattttgaggtgagagttttgttatagtttataaaagatattttcctattcagacctcagggctattttgggacctacaaataaatgtgattcccagcagcttcaatttttgatattcaaaaagttaataatctttaagctaaatataatgtgatatgattcagaaaaaaatgtttttcccttttaacttctaacaaattatgtatctaatgtttaaaaaatatggaaaaaagggataatgtaaaaatgtgggagaattgtggctaaagaataaaaaatcacttgttaaaacgca

SEQ ID NO: 727 - DNA, 134 bp, Homo sapiens
ccctgtattcgaaagtgatcgtgggctgcctttgccctggtcattgatagtgcagggagaggaatcaatgaaagcgcttccccgtgtttgaagggtccactcctatcccttccaaactctggagctttcgtaca

SEQ ID NO: 728 - DNA, 322 bp, Homo sapiens
cccctcccagaactactgttctgtggctgccaatatgaatgcctagaataagttaagaggaagatcagtacaggtggaatagcaggagatattttagtaacagtttaattattaatttttgataaaaggttctgattggtcatttctcctacgaaagtcataattacaaggacttatacttttccaaaagtacctttttaaaaggtagagacagtccaggctgttcttgaactcctgacctcgtgatccacccccctcggcctcccaaagtgttgggaaatacaggcgtgagccaccgcgcccggcgagaccctgtcttaaa

SEQ ID NO: 729 - DNA, 895 bp, Homo sapiens
ggggacagaagagggtaggcagcagaggccaggtctgtggacaaaagccccacttcagagtggttggaagccaggacaggagggactcatggaggtgaccgcttcacaggagtcctttctccagtcgtgctagggaggagcccctgcctgtccagcactgcccctgcctcttgctgtaccttgccagtgtgccctccccccgcccactaccatagtaggcatctggcttttcccaccaacccatctacctttttggtggtccagacctacagtctccttgcagagcactcctcctcccaccctcacttcaagtgaggtttggatgagattgaccacatccccttggtcacaaatattggctcaggaatggacatgtggccctgttcaagcctatgagagccaggacccccagacttatgttagaactcttgagagagatactctgtcttctctgaaccttgcagtatatagaaatgagcctattgatgcaacaatataaatggcactgagaggggtgtccagagctgctggggtcaggggagggaggtcagcctggcagaagccatcttgtggagcatgaaaatgaaagagaccttgagaaaggccagaggaatccaggcctgtggtgacaacatttgagctgctggatcaaacctcacctgaagtccttcctattcctactagatatttttttccactgtgtgggccaatgcattccctttatactgtgtaagccaggcatggtggctcacacctataatcccagcaatgcaggaggctgaagtgggaagatcgttgaggccaggagttcaagaccagcctgggcaacctaagaagaccctgtctctaaaaaagaattaaatataaataaataaataataaaaatataatgttt

SEQ ID NO: 730 - DNA, 697 bp, Homo sapiens
aaactaaatcttttgttcaccagctgctcagcttttcagtctgggtctgagctgaaacctgctgcaagtctgacggtaccaaattacatatatatctgtcaaaatgatgtaggacctaaagtctctctgtaagttgatccttttgaccccatgattaggagcttcacaatgtggtaccacacctggaaacctccagaacaagatctcaaggaaacacaggaaattcctgaaacagcaaaaccccctatgtgaagacgtctgttattcctttgtgtatcaggagcatcactgttaattaactgttgatacacttaaaacagcttggttggcaatgtcctttttgaataaagaagagccaggtgtgtttttcaggatgaactagacaatgctgtcacaagtttacctctacatcttattgccttggaaaaatttcctgcatatcgtggcacaagatggttggctctccaggcagcagttggcgttgtgaatcagtcatctcagcatgtgtctccaagatcccacagcagggggaaaaagaggtggagggtcacatgcctggtgttacatactttgaggcagaggtggtaggtgccatttctgctcacagctcatggaccagaacaaagccatgcatacctgagagaggaccagaaaatattctgaagcagatggctatttggtgagcagtaaatgtttc

SEQ ID NO: 731 - DNA, 547 bp, Homo sapiens
agcgattctcttgcctcagcctcctgggtagctgggactacaggcatgtgccaccatgcccagctaatttctgcatttctagtggagatggggtttcaccatgttggccaggctggtcttgaactcctcacctcaagtgatccaccggcctcggcctcccaaagtgctgggattacaggcatgagccagtgctcctgacctcaacttttaatttttatctatcgatctagtctattattacccgctacttacctacccatccatccattcatccatccatccatctgcccatccttttttttgtttattagctctggtctttgttatatttgttgataggcccaagtaaattagtatgtgtaaaactcacttaaaacagtgcttagcacatggtaagcataatatgtgatagcccttatgatctagtaactcaccagtatcttgtgtgtattagaacaatgtgtctctgtaatattttaattatatctctataagagcatacataaatgacaatatataaatctcaataacagaatgtttctaaccc

SEQ ID NO: 732 - DNA, 529 bp, Homo sapiens
caattattggctcatcaaggagtgtgccacatgccagatgctctgcagaacccaacagaggggttgctcctccatggaaacaacaagaagctttgatcaaagagcctgtattgactccttcagtgaaattcttgactgaaataatcaccttcttaaaatacacacatggtgaggtttgaagaggggaaattgccatccaggtaagaaaccttggccttgtcccaatttagtagtgctgaaggtgtgttcatttgaacatagatcatgtgctaggtactgggaggatacaggaatgagcatgggaataaactttacatagctcttgttcaagcaggaactttacaatctagttagaataaagaattatctgtgagtcctggttggacagtgtgtatcccagcactatctaggggtaaggatgccttcataccaacctcgtcatgactgtgctaagtggcaggtctgatttggttatagaactggatacatcagacagttttaactttatgctattaaatatttgaacata

SEQ ID NO: 733 - DNA, 207 bp, Homo sapiens
gagacactggtctggatcgggtcggtggagtgggggacttacatccgtgatggccttcttggccttctcctcagcattcctgcactcctgcactgcctcctccacttcagtctggagctgggacaggaatgagcaggggagctgctcacctgggaatgcagcagctgcacccgctcactagtctcaatcagctcctgctccgccagc

SEQ ID NO: 734 - DNA, 460 bp, Homo sapiens
tgcttggacagagaggtctccccaacatcacgaggcagcaaactgaaagcaagaacgtggcgaagtgcaaacaaatccagtccacaaaaggcagaaaacaacatttgccaagcccaggaaacagataaaaaaccccaccagcccgaggggcttttcctacctcggaatcggaggagctgttttgattcgtttctgattcattgactagagacgatttgacatcagctaaatccctctctgccgaggagttttcggagctcttctcctcctgttcgccctcgtctttgaaggaaatcagttcgtcgttggcgcctaggtcatcccctccaccgccgttcagctgcggcatttttttttcacccaccagcagcaattttggaagaaaaatgaaggaggaagaaaagccaaaaaaaatcacccccaaaaagttttgcccccccaaaaaatattgcaagaaaaa

SEQ ID NO: 735 - DNA, 1807 bp, Homo sapiens
atttttattttacagacgggaaagactgagtaaatgtgagaaaattagctgaatagccactactttttttctggcataacctacccctgcttaagaacttccacgggcctttgattggggtttttaaccactttaacaaaccatgtaaccctgagagctatgcttgttggacaacatggtgtaatgtaccacaggctgtagagccagatactggggtttgaatccttattcaacatgggaacataggagctatatgacattaaacaactgtcttgtcttcactaaatttctatcaactcatttgtattgtggggataatagagcctgcttttacagggtaagtgagataaaatgaataaagtgtctagacaatatcatagcatagtaggtattcaatcctggtgagatcctgtttataaggcccactactttgtcttatcaggcagaataacaaaggaacaatatttaaaaagcaactagctcaaatctgtccccagaaggaaaaacatatcttgtccttggtccttaaaaaatttcctctgtcactgtctagaatcagcacctaagaacacaggcgtttagtgttgactggaataaaatggaatcgggtgctggtgcagggagattgagcagggatgaagagagaaaatcacagagtggaaaggatcaggtttggagagttcaatggggggctgccaggacataagcctaatatgtgtgggacaaggaaacccctctgaaactcataaaatggtattgtaatacccatctatgaggtggttaggagaattaataagtaagtagaactgtgctttgtgaattgtaaagtgaatttatatataaggtgtcaagatgaaagggaaaaactaagaaataagttgcccaaagatatcattaggaccaggagaccattataaagtatatccaggccgggcacggtggctcatgcctgtaatcccagcactttgggtggccgaagcagacggatcacaaggtcaggagttcgagaccagcctggccaacatggagaaaccctgtctctactaaaaatacaaaaaattagccaggcatggtggtgcatgcctctaatcccagctactcgggaggctgaggcaggagaattgcttgaacccgggaggctggagtgcagtggcatcatcttggttcactgtaacttctgcctctcaggtccaaacaatcctcccacctcagcctcccgaataactggaactacagggatgcaccaccacacccagctgattttttaattttttttgtagagatgggattttgccatgttgcccaggctggttttgaactcctgggctcaagccatctgcccacctcagcttcccaaaaagctgggattacaggcttgagccactgcacccagcctgttgatcatgttcattaatctgtttgaactccatatattaaggaaattagtcctttgtcaaatatgttgcaaatattccctccaatttgtcacttactttcattttgttggtggtttttctgttttgttgttgtttttctgtgggtttttttttttttttttgccatggacatgtttttagtacttatgtagtagtcagatgtattactcattttttctgtgctctggatcttatgctttgaatggctttttgtgaattccaatattttaaaaataatttacccctagcttcagttcttacatttaaatatttgttccttctggaattttagtgaatgtggacaaggttatgcttcagttgccttaactagttgccttggcatcattaataagttttcttttcctctactg

SEQ ID NO: 736 - DNA, 343 bp, Homo sapiens
agttggcttgggtccattggattaattttggtcaacaggctctgaagaaaaatgacatttcagggaattaagagcacgtgttcctccctctaccttctctttcttcccccagtgaccttggaggctacttgttgataagttggttgaatctgaagagcccttggatacggaaggctgactgtgtatggctactctgaagaatgcaagaaacagtgtgtgatacgcttagggcttagcacattttgccatctatggagcatgtggtatgagtcagaaatggtgtttttgcccaattcagagactagtgcagaagacagacaaagaaaaagacaactcaggtcta

SEQ ID NO: 737 - DNA, 2968 bp, Homo sapiens
agtctgccagattggcaatttgaaacgcactgtctgtgacggctgctgaggctgctgcgggggagtgaagggctgtcatgacgatgacccctggaggattctgagctctgacttccctccttgtcatgttgcctgaggagaattgcagacagaccctcagacctcaaatagtctagattttgaagaccctgctttggctgagatgaggccagcattggagtagaaatgctgcttgcttcactgaagctacaggtagaagctgactaccaaaggagaaggctgaggagaaattgctccatgagataagacatgcaacctatgtattaagtaagacattgttgatgatgaagtctcattctgtcgcccaggccggagtgcagtggcacgatctcagctcactgccacctccgcctcccaggttcaagcgattttcctgcctcagcctcccgagtagctgggactacagaggcaatcagtacaactgtgcagaacttctggaagattggcacaaagcattttaaaaatcactttctagtctatattaaattcttcaagaatacttatgaagaaacaggaagtaactaactttctttaccttttcaagaattggctcgtgagaaaaggatttccagtattatgttgaatagaagcggtgaaagtggacatcctttccagtgttccagttctcagagggaatgctttcaacttttccccatctagtatgatcttgacgagaaccttggcaatatcctgaatttagtactaaaagcaaaggataaggaaggtgttatgtggcctctgtataacagagaatgttctatactgaaaacttatgatatactttctaccttagacaaagccagacagatttttctagtttcaacttaccattatacttcctgaaagtattttcaaaagagtcatttgcttgatgaaatttctgagttcttgtttgcctgagaatatccttccagtggccactaaagaagaaaccttcatctagtctacatcaccaagagagaacagtgacagctaacactgctccagcctctaccaccttcttgacgtggcacagccatagaacacaggaagtcctcttagcttctaatgaaattggaaacatgggaacatgccctataatgaatggtctatatccaagagaatacactatattaaagtgtagtagaaattcaatatttataaactataaacttccattatttaaaacaagtgtttgaaatagtaccagttccaagcttcgttttcttcttcaagtattatatttatgatacaaaaatggattttctattagtctaaccatttttaaaattctcaaattgagtatttttctccagctctaatacttttcagatgcttctttgatgtcatttacagggagttgaggttttttaagtgtattatgaccttccaggctttctggtttcataagaacctggtgtctgggatactatcaaaaataatctgtcctcatttgaattaccctaacattttagctacaaatcaacaggcttcttgagggtagagataatgcatccctagcacttagcctgaagtctctgaaacagtacactttaatagatctgtacctctttaaagtattatacttatttatatttataccatttctgtgactaggtatgttttccaactacatttatcattttgtgttattacaaacgtgacatagttaaaacagaaatgatgaaaatacagaaaaccacaaagaaataatcacttgtaattactgcctatattatagatatatattgtatatttcccacattagcaagccaatttaccaattattatttattggttaattagcatttcatcatatggctgtccatacttatttatacatactatatataacaatgtggtggcaaggaaggtgtatattattgcctatgatcttataggcaagataaacaatgcttcttagtaggtgttcatttagtgtaagtcctttataaaaatcattacattactgattttaaattaaaaagggaataagccagtggatttatttattggtataacaaaactttgtaaattttataccgatattttctttcaccaaaagttcaattcaaatccaggcatggtgtctcacgcctgtaatcccagcactttggaaggccaaggcaggcggatcacctgagatcaagagttcaagaacagcctggccaaaatagcaaaaccctgtctgtactaaaaatacaaaaaaattagccaggtgtggtggcatgtgcctgtagtcccagctactggggaggctgaggcaggggaatcgcttgaactcaggcagcagaggttggcagtgagccgagatcttgccactgcactccagcctgagcaacagagtgagactccatctcaaaaaaaaaaaagttcgattcaaaattattccattataaactatctgattatattatccagaatttttcaactcatatcgaaatgcaaatttttaaatatttttcccaaatagagtcttaatagggttaaaggttgatagtctcacaataatacactattccacaatgtagagcacttagcagtatccataacaaccattattattttaaaaatattttaatagtaatattctttgaaatagttgatgatttattgtgacagaatgaggagaacctaagaaagactatttatcgataaatgaatttctaaccatgctgacggaaaagcagctttatattttacttttgaaagaaggtgatggttgtatctgaagaaaaaagagatacaagctactatttctaggctatccagttaaaggaaagcactatgtcaagcatttgaagtaaaagaatgttgtcttcagaacccaaacagttgtgtctcagaatacaaaggaatgtaatacatatattggtctatcagtcagaaaacaaaacactgtaaaaaattaaaatcatttcaaattagt

SEQ ID NO: 738 - DNA, 602 bp, Homo sapiens
ggcctagaccactaagggccgtgacgtggtgccgctgagcttggaccccgaccagaagatagagattgaaacgatgaggaaaacgaagtgcctaatccccgctggacgctaactgcagggcaagctccccagtgttgtagttgtgtttcggaggccgagaaccgctatcgggcttcctcggactctggccctggaggggggaaacggcgagggagaaggcgaaacgagtctccagtgtgttcttggggcctggtgcgaggcccagagaattctctgcaggcctttgcccgggcactgattaaggctgcgaagagacgcaccgggctgcgggcttagtagcttcaggcttctgaagtcagagggagggctgagagcttacacttctggagctccccgggagacggcaactacccaaccgtgtgggtgtgtttgtgaacatggaggagacatatttccacctatttctctccataagtataaaagaccataaaagaccatctagggacttcagaacccaaataatgacacaatgttaatttgcaggttctccctctgcctgccaccccacccagcaaggaggagaggaagtgttgagaagggaa

SEQ ID NO: 739 - DNA, 158 bp, Homo sapiens
ttaagtttgcattttgatgttttctgtaaggatgtagtatgtttaaactttattaactaatgttcaaaactgcgatgtgtgcatagaatattacgtatgcatgttcatgtctaaagaatggctgttgatgataaaataaaaatcagctttcatttttc

SEQ ID NO: 740 - DNA, 919 bp, Homo sapiens
accggactagagtggatccccataaaatgagtgaagccataatatgagttagagactactgaaaaagcccctcctgatgatgaaggacctgtcattggagaatcgaccaaaactgacagtgataacttggaaggcacctgacattacctggggacagctaaagaaactggaccaacagggaactatctggcttgcatctatgggagcccctgaaactgcagagaaccagtttcttatgtatctgatggtaattgggggagcttctgagaaggcatctgcaaatggctctgtgctgccactcaaccaactatgaccagggaagaatgatagaagcttactttgcattggataatccgcatgttctaagaattaaagaagggggaaatgtgaggggtgtatgacaatacattcaagcttatgtacaaggcatttgaggttgaggcatggaaaaatactgaggcactgtgtgtatgttgtttgtgcatgaaactgtaattccttgaccctgaaaataggacaaggaatagaatttgtaataaggagtgctgaacacagcctcctaagaatgtggtttgagtgcttttagatgttataaacaaggccatatgtgcctcatgacccgaccccaaatagccaccttgtagatgtttcttgtttgtctaaattgtagttcaactagccttctcaataaatacttggcagatgaatcttaaagcagcactgtcttggaggagctgctcccctccctttcagctgtaattgtctgaatacttatttcttggtgttcactgcagagcaagctgcagcacagctgccggcatttattcatgcaagattccagcttgcttatctatgtctgcagctcaattttacaggctgctctttgttaaaacaaaaaaaacaaaacaaaacaaacaaa

SEQ ID NO: 741 - DNA, 447 bp, Homo sapiens
cgctggtggaagacggaggaatgcttgagggaacgtttattgcatgctgaatccagagctggaaaccaggtttgagccaatctaggcacgggctccctgagcagggcaccctctgtctctccacctgatgggttgattagactcacagagaaaggaccgtcttacacctggaaaatcaaaagccaggggcagcctgaagacacgctggtcatgccagtactctaggggctaggattgctgtctcatgacggtgcttggcccgagaaagcacatggagagtttttcgtcaagaagtgttacctcttttatggagatgctcacagactgggcatttcactgtcccctgtccctgagacacagattctttttctgaaatctggtcaaaataaactggcgatgttgctgcagccaagctggcttactctgggcagtgccttttttctcacg

SEQ ID NO: 742 - DNA, 297 bp, Homo sapiens
ccaggactgacgccacagcctgcagctcctccccaagcccagccccagcccttgcccttcaatcctgagaccctgagatgcatgggtggggctttcatccgctggggaggctgagacccggggggccacagctggttcctggactccaaagcccaggacccttccaaatcctgcctggacggcaccgtggccaggaccccagccagcacttcccttttctgcgagggttttctgtttctttgattataaaataacccctgttggtggggggaaaaaattagcaaaataaagaaaagc

SEQ ID NO: 743 - DNA, 791 bp, Homo sapiens
agaaagtgctaggcacgtaggcgttcaggagacagtcacggtactcgtttccagacagaagtcatgaggaacaagagggaaggtgctttcccgtgtgcagcgcttggggagactcacacagacagaggatctggcatgacagggaaaggaggaaatggcttctgttaatctctccttcagcttctcccgcccttcccatgcactcttcctgtttccctttccagttctcacggtgactcaaggaacaacgtgtgaaatgaaagacctcaggtgctgtattggctcttgacagctcttcagaagaaaatacctcctgcctgttctgttcagtcctggtgcaggtggtcctggacaacactttgaaaaatgctggggcagaaacaagccagcaagcatatgggattcatctgctgtgagtgataatttatctagtttctaaaaatagtgttataggctggactgtgtccccttcctgtgccccgccgccatgcatatatggacgcctagtacctcagaatgtgactgtatttggaaacagggcctttgaagaagtaattaagttaaaatgaggtcattagggtgggcagtaatacagtataactggtgtccttataagaagagattaggacacagatgcacacagagggaagaccatatgaacacagagggagaagacagccacctgcaagccacagagagagcccttcaaagaaaccaaccctgcagacaatttgatctcaggtttctggcctccagaattgtgagaaaataaatttctgttgtttaagtca

SEQ ID NO: 744 - DNA, 2360 bp, Homo sapiens
attttgtctcggcagcggtggccgtagctccatcgcattttatgtttctggcgagaagggaacggagttttcatcaggtagattggtttttgtgcggccgtcctccaccgtttcctccaggacagcacctagtcgtggccggaggagtctcagagctgtcagaaagtcacgctctgtcgccaggctgaagtcagtggcaccatctcggctcactacaacctctgcctcccaggttcaagcaattcttctgcctcagcctcccgagtagctgggactacaggcgcgtgccaccacaccagctaattttttgtatttttaatagagccaaggggcttcaccatgttagccatggtggtctcgatctcctgacctcatgatctgcctgcctcggcctcgtaaagtggtgggattacgggcatgagccacgtgcccagccttcatgtgtattttagacaatgaaaatgatgttagacaaaaaagcaaattcgagcagttttcgtttttgagttaaaaatgggttgtaaaacaacagagacaccatatcagcaatgcatatggttcaggaactgttaacttacagtgcagtggtgattcaagaagtttttttgttgttgttgtttgagatggaatcttgctctttcaggctagagtgcagtggcatgatcttggctcactgcaacctctgcctcctgggttcaagccattctgcctcagcctccccagtagctgggattacaggcacgcaccaccatgctcagctaatttttgtatttttagtagagatggagtttcaccatcttggcccaggctggtctcgaactcctgacctcgtgatccgcccgccttggcctcccaaagtgctgggattacaggcttgagccgctgtgcctggcagtttcaagaaattttgcaaagggaaggaaagtcttgaaaatcaggagcgtagtggctggtcgccagaagttgataactaccggttaagagcaatcagcaaagctgatcctcttaaggctacttgagatgttgccgaagaactcaatgtggaccattctacagtccttcagcatttgaagcaaattaaaaagtgaaaaagctcgataagtgggtgcctcatgaactgaccgaaaaaaaaagtcattgttttgaagtgtccttatccgttattttttgcaacaacaaaccatttcttggtcagattgtgatgtgcgagaaaaagtggattttatacaacaactggtgatggccagctcagtagatggactgagaagattctccaaagcacttaccaaagccaaacttgcaccaaaaaaaggtcatggtcactgttttgtggtctgctgctggtctgatccactatagcattctgaatcctggcgaaaccattacatctgagaagtatggtcagcaaatcgatgagatgcaccaaaaactgcaacgcttgcagtcagcattggtcaacagaaagaggcccaattcttcacaatgcccttccacatgttgcacaaccaatgcttcaaaagttgaacaaattgggctgtgacattttgcctcatccgccatattcacctgacctctctccattgactacgacttcttcaagcattgcgacacctttttgcagggaaaacacttccacaactagcaggatgcagaaaatgctttccaagagttcgtcgaatcctaaagcatggatttctacactacaggaataaacaacttaaaaatgtgttgattgtaatggtttctattttgattaataaagatgtgtttgagcctagttataatgatataaaattcatggtctgaaaccgcagttatttttgcatgaacgtaaatgatgaattttagatgctgaaatttctgggcatctaaatcttctttcacatccctgattatttttggaataaactcccagaagtggaaatataaggctgaaggcctggtgtggtggctgaagcctgtaatcccagcactttgggagaccgaggtgagcagatggcttgagcccaggagtttgggacaacatggtgaaacctcatctctacaaacagtgcaagaaatcagccagcgtggtggcgtgcacctgtgttccccgctaatcaagaggctgaggtgggatgatcacctgagtccaggagatcaaggctccagtgaaccatgattgtgccactgaactccagcctgggtgacagacttcatctcaaatatatagaataagactgattttatgggaaaattaagcagatgctccagtttgagaaacctggatctgcgatctgtttgtggtaccagcatcaagatgatttatggtaataaggtactcagtctttgcttaaaataaattttacgtttatcaaagt

SEQ ID NO: 745 - DNA, 786 bp, Homo sapiens
gtggctttgtgaggatggctttgtgtggctgcacattgcccttggccaagccccgctgccaggagaggcagctcggctgccaaacctcctgaacccaagttacctgagcaagcagccctatcccctcgcctgcttctcactgcctcgcctgccttgggcctgcccgacccagggggtcacatgccttgttccccatcagtggagaccagggacaagaagacagttctgtgggaagagccaggaggaccatttgggaaaatacaggttccaggtgtgtctccagaccttgagagttggtgtctcctgggaagaggccctgatgagatctggggagattcggatctgatgagattcaggaagccctggcctctccgtacttgaggagacgggacacacaggacaagctgcaggctggtgagcaggttcaccttctattttgaagacccgcttcttcctcaggtacctgatcttgaaaacgacctcccctttcagttctggaggccagaagcccaaaatcagtctcgctgggctaacgtgaaggtgtcagtcgggctggttccttctggaggctccagaaaagaatctgttttcttgccttttctggctcagtttctcggcttgtggctccttcctccatcttcaaagagcaccactccaatctgctcctccatcaggtcaccttctgcctgactcctacatccctttcagaaggacccttgtgattccatgaggtccacccagatcacgcaggataatgtccccgtctcaagaggcttaatctaatca

SEQ ID NO: 746 - DNA, 468 bp, Homo sapiens
cgacatttcttataggaaatggaactcttcataagtctggccatggaggcatggtatccgtaacatcccccaaaggagctaaagaagaaatccacaatttaccatgagcatttctcgtctgaagattgccaagcgattcctccaggacattcctcaagatcaatttctgttcatccaccttgtcctgggagggacatcaatgggtttccatgtcctttggcttctggttgagttcactcagtggagaaccctggcaagaggcaggaaaaggggaggaaggtgaaaaccatccatttcttggagaagtgccacggtggggttgcaagtcccaggatcaagttttcgatgtgtctctttttcccgtaaagtggctgaaatctgaagctgaatctgcaagtgtcatggagtcattgaatctcacagtctcaactgataaaagttattaaaggtcgtctggttcagccttct

SEQ ID NO: 747 - DNA, 1791 bp, Homo sapiens
ctgcaatttcaggtagcttttctgactcttaaagagatctcaagtataccttcagagaaatgccagcaaaaactgtagtcatttgggaaggaataagcctggaagaaaaagatacaacgaactagcacaacgaggagtttgaaaagttcatgacagctcacagctgatgatggtggcaatcttaaggatacagaaagctcattcctcatgcagggaagaagaaaatattctaaagaagagataagcatattccatgaaatcaaaaaagcgtaaaacgctggaggagaagtcagtagcaagcagctaagacaacatggtacatgtggctagaagcccaccaactgctaacaaccagctggagggtaagtcaaaagctatgagagcccagaaggagaacaattatttagacctggaggggccagttgggaaagtctttgaagggtcttcagaaaatggaccaaaagaaaagaggaaaagtcattctactgagaggtgtttgtgtaatcaaagcaaccgaggcctaagaactcacaaaagattagaaaagggtaaaggatgcctggaaagccggactaggaaaaggctgtgaagggccctgaaggtcacatgtcacatgttgcctgcagcatgcagaatcaaaacatgataaatcatgtcttgaatcatgacatatgaagcatgacacacgaatcatgacatgtgacatgttgaatgtcacatgtcacatgccgtaggcagccatcaagagtatttgaaaggaaagtgtataatcaggcctgtgctttagtaagacaatttgtatagtgttcagtgtggattaaaatggagaacacaggtatcagtttgacatcgacagtacaggaaaccatttgggtttcttgtacaccaaaatattaaaacatacacgcaaacacaccaacacattaaaatcttgagagagagggccaaaagttctttgtcgctggactaaaagtggaaataaatgtttacaacctctaaggtggattaagctaagaatttggagttgttggcaaaactgccacataaaatttcagacatgcaaagaaatgcaatcgtagacttatgcacatacttccaccagagaagggaatctgggcagagtgttcaaagcttaagaaattcctttgctcttcaccaagaagagccaacagagttttcgttgaatcaactcttatattcccttaaaaagaagttgatagtgttgtggaaaactcacccattgaagtgacaacaaaaacagcaacccagtatgagttaactggtattatgttaaagggacaagtaactgcacttttgacacacatcctctaaaaggtagggtgggagtgtttcaaagaaccaagtctgagtaatagaaaagcatataccacttccccatatacacgttcgagcatgggggagcaggaagctgggtaattgaatgcagttgtgcacactggcaattttcccgccacataccatttcttcggtgtctctcccaaaattctcctcctaagtggcacatccctttattgatcatctttccccatactgatcatcctcagcaatcatgtgagttattagtctaagtatttgtttttctcaaatatggtcttttaactactccctaaatattttatatatacatagtttgttttcccaatttaactacaagcatttaaaaaatgggaatatttgtctatatttctgtaatttttcatcatgccttatatggtatataaagatcaacagcaataaaacaacaacagtaataatagctaagaccttttg

SEQ ID NO: 748 - DNA, 3267 bp, Homo sapiens
cacaggcaggccgtacctcgaaatcccagcggggacacctgtcagggagacgcaccctcacaccgcccatgcatgcccgacgcatctttgggatccttagggatcacgtggtgcttccttgaatctccgcttgaggtttcttcaggcaggttcggccttgcccgactcctaggatcgcaggaccatggcgacgatcccgcggagaggggacgcactgccacagacgcctgggggccaagccgctggggccagtcccccggcaacggtggcggttactgtgacgcgagtcccccctcagcgctagcgcctggtgatcgcgcctgggctcttcctgcgtctccaagctcaggggctcctgcttctcagcactgctgtctggaaaaggcgggaacgaggactaaggcaagcccagtgtggggcagagatggcaacacctggaactagcttttcatgggggcagataatgtggagagtgtcccaattacatctccctttattctatcccatactactaaaccccaccagctatttgcctacaaactgtgtatcagtcaggacatcaggacaccaagataaaggactagagtttggtaatcaactactggctcctccagcagctcagaatgtggcctgtatgcatcacttcacttaattcattcaagaaatgctgactgagttcctgctgtgtgttggacactttcttagaagtgggacacactgcagtgtgtgggacaaaggctgggccgctcattgcttatgttctagttgaagagagagtcaatcaacaacattctactttcagacattgataaatgctgtcatgaaaagacaaggaacatgaaaaggtaagaaaagggatggagagagatgggatgaggggtgcctgggcagacaatgcaatgatctggcaaaagagtaggacaatcatgagactgcatgtgttccagtttctgctgctgtaaaacagcatccacaggttacatctttactattctgttacatacatactattatttaaataaaaaatagtactagttaactgtgaaaattgcaattaatagggcagattaaacaaatcctttaaatttaaacaaatgttttatggttttttatcctctgatacattgtttcaactttaaaaaaccctctttatttgatatttaaactctatattaatgtatattcttaagatacataaatttaagatttttttcgagacagggtctcattctgtcacacagtctggagtgctgtggtgcaattatggttcactgcagactccacctctccaggctcagataatcctcctgcctcagactcctgagtatctgggaccacaggtgtgcatcaccacacccagctaatttcttgtatttttttgttgggatggggttttgcgatgttgcccaggctggtctcaaactcctgggctcaagtgatctgcctgccttggtgtctcaaagtgttgggatcacaggcgtgagccaccacatccagcctaatttaagatttttaaaaagcagaatgtaaatatggtcatgcattgtgtaattctgtggatactttctgagtaatgcatggttaggtgacttcatcattatgtgaacattatagagtgtacatacacaaacctagatgatgtagcctgatggtacagcctatcacttcgaggctacaaatccaaattgcctggatactgtaaacaattatactcaatggtatttgtgtatctaaacatgtctaaacatagaaagggtacagtaaaaatatggtataaaagataagaaatcgtataccggtatacagcacttaccgtggatggagcttgcaagactggaagttactccgggtgagtcagtgactgagcggtgagtgaatgtgaaggctagggcagtactgtatactactgtagactttatatgtactgtatgcttaggctacactaaatttatttgaatttttttgtcggtaataaattaaccttagcttactataatttctttataaaccttttaatttttaaaaatgttttgactctcttgtaataaattagcttcaaacacattgtatagctgtacacaaatattttctttatatccttattctataatcttctacttaaaaatttttttaatttttttattttaatttaattttattttattttgagacagagtctcactctctcgcccaggctggagtgcagtggcgtgatcttaactcactgcaacctccgcttcccaggtaatattatttaaataaaaatagtactagttaactgtgaaaattgcaattaatagggcagatcaagcaattctcttgcctcagcctccagacttttttgttaaaaactaagacacaaacacattagcctaggtacacacagtgccaggatcatcaaaatgtcattaggcagtataaacttttcagctccataaaagttggaaaaaaaataataataataaatacaattttataaaaagaaaattttcagctctgctataatcttatgggaccactactgtatatgtggtccctcattgaccaaaacatcattatgtggcacatgattataacaaatgatggatggcgaggttgtgaagaaactggaacccttgtgcattactggttgtaatataaaaaggtacagccactgtaaaaaaaaaacacagtttggttatttcttcataagttaatcatagaattaccatataatccagcaatttcacttctaggtatatgcccaaaataattgaataaggtgtttaaacataaacttgtacaagaatgttcatagcagtacatttcacaatactcagataatcctctcattggaagcaactcaaatgtccaccaactgatggtattacccatgcaatggaatattattcagtcataaaaaggaatgaagtactgaggcatgttacaacatgaaggaactttgaggacagtttgttaatacgctatatactgtgtaattctatttatatgaaatatccagaataggtaaatcattagagactagagacagcagattagtggatgccaggagtttggggaaggaaggggtgggaagaatgggaagtgactgcttaatggatacagggtttctttttggggtgatgaaaaatttctggaactagattgtagtgatggttgcacaacaccgtaagtgtaataatgtcactgaattatacactttaaagtgatttaaatggtaaattgtattatttatgtattttaccacaataaagaagtcacctatca

SEQ ID NO: 749 - DNA, 535 bp, Homo sapiens
cgccctcgaagtagaagagcacattctggtagagggcgaaccacttctcgtgccagcggctcgcctcggccgtcttcttactcaggaagccgcgcttggtgccctccttgcgcgccagaaaggccaggctcagctttctcatcactgaactggagatacaggagttggagacttggaatcccctttggtgcagaaactattccttcatgagaagaagtccttaaataggctctttagacaggaggccacatgttgaaggcagcagggtcacaagatggaagaaccagggtcccagtatcatcgctccctgcttcaagctgccaggggcagcctaacccacatggcattatgacataagaaacaaagtaactattgttttattaaatcaatgagatattgggcttcttgttatagcaactagtataaattgccctgactgatacattatggatttagagtgcactgtactacaactgtttgttgtattttcaaaattgtggtataactgacttacaataaacttcatatatttaaa

SEQ ID NO: 750 - DNA, 1853 bp, Homo sapiens
tgcgcaccgcagcgcagcgcagcggccggggggtgcgggcgccctcgccgcccggctacctaccgccgcctgggcgccgccgctgcctcccttccccgcttctaccctccagcagacgcccgccggagcgacccctcccagggtgaccgggggaaggtgttccacgtggccatagcgtttgcgtcacaatgacctggcggacaggtgggagccacagcgtacaccccagggttccctctgtgctgtgcgtagtgcctactgcttgcttccaggttaaatttctgtagctttagaggacaggagacttcatgacttcactgccaagaaaagttacagaggcctgctgtacctggaaatcaagtttgagcttcgagaataaaggtcatgttttaaaaacagctgtaacaccagtaaggtgctagtgagaacccgaaacagtttctaaggagaatggctattgaatgatgggatcagaaattaggagagaaataaggaccctgggccagggaaagaaatgaatgaagatgccaccttatgcccagaacacatctctcattcaatgataaaggatttgtggttgggtcaacttttgtgatgctcaactctttccttcgtaaggacgggctctttctcaggaggcttttgtactcccaattaacgcactgctaatctgatgaagctctattttgtagctatgccatctggatcacatagcctccaaggccagcagagcagaggaagacaaagagcagagcaagatagaggtggaagttacacgtcctttgtgcttactttctactggcctcatcgggtcgcaagatcccactctgataggtgcatgggggcttggaaaattagaaaaacatgtgaatatttgcaatgctttcagtaacctggagaggtacacatggctggtataacaattatcttcatttaatgatgtggaaacacctaccacaagtcctggcacattgagggtcttgaataaattctgtcagatgaacggacaagcgcacaaaaggttgaaagagtgaatgaggcaggcacaattgtgatattcaacgagagtagtgcgaagtgccactttacagccaaacattcaattcctcctaattcacaagggagagagggatcaagttgtgcagctgggaggtgatgtttcttcccagcagctgtcattgaggagacacgtgcaaaccatagaagtcatttgtcacaagaaccccatccagaatttgctatgtgcgtctcacttgctaacgtgacatgaaatactgaagctttcaaaaatcaagtacagagactttgttgtgttgacatgggcaaaatgaaatgaagagctgaggcaattatgtggataaatcaggccaaaaatatccaaccattgagaggaaaaagttcctttggctcaaattattcagagtgactgtccatgttcatcaatttatcaggataatgaattttatcctatactttactttgtcactatagatatatctttagtctatgaatttgaatgactttgtgatattttacttcactgaaaattataataggggttgaatgagcaagcaccgtgttaaaagattgctactgcagctatgataatagtccaggagattttaaaccccgttattcaatagctagcagacatagttattggaatgggggtagagagggagacacgaaatctgttgagaatcaaatgcttgtaactaatctgtctttcccatttagcatcctattatccaaaaatatcttggtctgtagctcccacctggtttcctggtcatttgactactggttaaatgagcctgaaaatttcatcaggtttcatataaagaataatatat

SEQ ID NO: 751 - DNA, 1649 bp, Homo sapiens
gaggagaagatatgaggtaattaagggtacaagaagttgagattcaaacatcctccaccttcccaccccccactgccagtgggtgataaggaaatgatcacagacgactgaagtgagctaacatgattgtggatatacccatattaattcataccggaaacacagatgagaaggttgagaaggaatagtaaagaccatgagttcggtttagattcacagagtgtggaagtccaagaggaaggtaaaaaggactgaaggcccagagtcaactgtacagtagtacaagctacggaggtggatataatcactcaagaaagatatggcaaaatggtaagtggtggggtgatggtaaaaagagacaagggtctagtgtggtggttgaaagaagcagctgaagtcagattagtcacttaaattacttgattttctgagccttcgtttcaactgcaagataaagcttacaatggcatcaacttgagatggctggtgcattaaagatataattcatataaagccattagaccaaaccctgcatgagagctcaatgaatgtcagcaattcttaccatagtgtaccattataatgttggcataaaattagattttcagaaaaaataagcttattaacatgtattagttatagaggcttattactaaaaatgcatgatgaaaaacctatgggcaagcaaaaatattttagaattctccacctcttctctcaatacccatactcttaagagttatattaaaggcagacttgtttaaatgtcaggacatttaccttagcttctttcctttagttagcctagtggctcttaaattttagtttgcttaagaataacaatagcaacacagtgtttagtacgaagtcatgcatgtatttcaactaagtagatattttaaggaattttctgcagtaattttgaaaaaacttttatcaccataactggtgattttggaattgaattacccatgtgcccatccacctcccactgcatctcccagttgcagcgggaggtgaacgggcacatgggtaaaattatatattgggtacacatatatatatgatgaaatttaacagactaaaacaaggtttaagaagagttatcttgtccaacatcatatagtcgataagaaacaggatttgaactcgggtctgccttactcaaaggcaaggtctcttttcagttttctctatgctacatctgtaggatagggagatcccaagcaggtttagtacggtgcttcactgaaggaatatcaacatttaagaagatggtggagagataatcgtagactatggtgtgcagaagccaacaaaggctgaagtaacatacaatcttcaatttctactgaaatgggaaattttgaagacactaataacccttacaaaggagggtgaaaataaaatatgaggcaaacagtaaatctcaggaatgaggtagacgaaaaaataagcgcagcatattgactaaagcacatttcttcctctatagtttgggaactgtgtcacagtcggaccaatatatggctctaaccaacatgtagcttttcttttcttttctttttttttttttttggtcttcttaatttgaggatttagcattccagttgtcatgtttgatgccattctgaaataaatctcttagg

SEQ ID NO: 752 - DNA, 3684 bp, Homo sapiens
attcaacaatatacctgagagcttactgccacaagacactcatgagagctagcatttatggtggatactctatatgccaggcacagggcgccacgtattttccctcgacagtaacttggcaagcttttcatgtcactctggcatcgctcagattatcagctacccttcagaaaaagagccctgcgtttcgatggctaaggaactctgacaggaagaggagaggtcccgactagaggagggggcagcattcatcttttggcaccggtgagtcagtttgcgaagttggcggcagcgagaccccgaggcatctgggagaccccggagttctgactgccctactccgctttcgtttccttccccccacccctggcttcccgggtattggaagccagctgggtccccggggtcgcaggccgcccagaggttcgagccgcgcgccggggtggggcagcgcggggcaccgcctccctccataccttctctccccgtggagcacataggagctgcggaagaagcccaggagctcattctcgatgagcgcgttgtagataatcttcagattgtaattcctctgcgcgtccagtgtcctattcagcaccaccactaagacctgggtttgcgggtagaggaaaaaaccggctacagggacagccccgaacgcccggtcctcggccagctgcactttctccaccgccactcgggaagcgtgcagcactacgtagcgggtggcgttccggcacgcgatctccacgttgacctccccggagaaggtgaagttctccatgaaggcggtgagcatcagattgtagtgcagcggcttcaggtggcccgacaggcgcagctgcgtccacggctcccacggctcccgctcctcctccgacggcggctgggccgacgtggtccccggactggccaccccacccgcctcgggctgccaggagtccccgcctgcgtggtggttgcgccgggccgatccagggaggctcccgttgccgccgcgctccggaaagcctgaggggccaccgtcggcgcctggcgtggcactcgccccgcactcgtcgaagcgcaggctgagcagcacagcgagcattgtgaccgcgagcaatgccacgagggacacagcgaaggccagcacaagccgcttgtgtacggcgatgtggcgctccgtggtgcggggtcgcactcccactgagtctgcccacgggtcggagagccccctgctgccagcccgaagcgcggcgtcgtcttcccccatcgcggctgcgaaggcggcggcgttcggtcctctgggtggaatgtgctcgcagcagcagtgacggcggccacagcacgggaggcacccgagccatacaccctgcagctggagagaaaaggatggccgaggtgggagagactagagtgaaccagcaggaggaagtcccagggccgcgaagctacgacggagatccgtcctggaaaagccttctccaccctgggcactttaagcggcggtggcggcaaacggcaggaggttgcagacccgacagcgagactccctcattccagtcttgctctgccctccggagatgacaagtgagaaagaagtgtccggccgggccatccccttcagagaagcaaccacttcacaagaagattctgaagttggccatttttgatcccagaacagtttctcatagattagaaatattggagtctacacaaaaatcgatattcatttacaagatcatcactaaacttatcttgcataacgtaagtggcaagctctgacttgtgattttttcataagaaaaatgttttttaacttagtatcatttctacaacaatgtcccatgataattgattctaggtgatttgaaacactgcttagtcctgttttagaaaaagctcccatatctgatttagtctcatatgcagcttacttctaacatcagattgaatttgcattgagttaccttactcggtttattttttaattatgttgcagttacaagggaataaggaaaagtcagtatagtgcattgaaatgtcttttttaattgagacacacaagaaatgtgttataggttcccaaacattcttcatgtattagagatgttataataatcttttgaatagccaagtgaaaaggaatggtttcacctgaacatgttagaatttattgctacattttttgtgtgttgtggtggagaaataaatttttaaatcgcatttatggagtcatttcagaacaagtagaaaacatgtaatctggtcactttgaatgtgtaagtgtttgtatctgaactcctcctgccctattaagagtggaaggttgtactatatgttactcaaaaagtaattttccccggatatgcaataagacctcagatttgacctataagctgaatgtcataagctatccattagctatgctggaagcacaccaccaacaacaaaaaagttttaagtatttttataggcttgctaaaatctgattatagaaccaaggcagtcaaataccatgagtaagactgcagaaaccctagaatttaactccctagttattcttaatgagtgaatcctgtgctttgtgtctaaaagcaatgtattgtgctttccaattcaggaaatgcattttaattgctatactcattgatacatcaatctgtccatgacattctgacatatatccagtttcctatggattcggtataggagcaaattaaaagatgcactagaatggtaacatttaatctataatcctccatttaacctttatgtggctgtcacagaacaagtcctgtttttagagttgaaccaaaaaacaaacaaaacaaaacaaaacaaaacaaaacatgcacacacactagagaaacggcttttttttttttaacctggggaccatgaaaaagttttgaccattccccgacccccatgcttcaactttagctttgatagttaaagtatgtcttccttcagtttaagttgaacaaacttctgcataagaccctccagaaaacctctgaacacatacagttttgggggcaatggggactgaactatgtacaaataggtgatacttcagcacacaattcctgggataaattttatcctcttctcatttttatttttatgaactatatggggttttttaaacaagttacaagaagcaaaacacattttacctttactctgttacatatttcaaattaagcagatcctaattaattgggttacattatgtaacaatagcctttttaatatcaaatggtttttatgatctgtcttcaatttttcttaaaatgagactgcactaaagattttcttgacatttctgagaatttcattttcagtttcaaaaaattatttattcctttaatctttcaatgtggaaaagtaatgaatattgattcatttttagaagcgctaacatccaactaggtaaacttcatgagtgatggctattaatgttctctttcatcttatagacagaaaatcaaagctatttaaagtaaaggatttgtttcaaatcaatgtatgtccacaaattaacattaatgtttacaatactttctgtgataattgtgtcttacttgggtgtatatatgtctttatatctatctgtaaagatatagttgcaagtagatgagagacgaatgttcatgtttctatatggtctgaataaaagtgttatcactatgctaa

SEQ ID NO: 753 - DNA, 786 bp, Homo sapiens
gatttgcagtcggaggcaggcaagaagtgaaatcagaagacgggaagtggctgaggggaacgtcttttctctctcctgctcagcccgaagtgaacaggtagcatcagagatgagatcctggattgaatgactactatggaaagtgattgaccaagattgtctccattcctccctggcttctccacagggccgctcaccatggcagccggctccatcaccaccagccagcgagagggcaagacaagagggctgacgagggacgctaccatcacagaggctggtctcgaactcctgacctgaggtaatccgcccaccacagcctcccaaagtgctgggattacaggcgtggctattagcctcgccaagttaagattcttgatgccaaccaatcacccactccatgtttttcaggattataaacactagtcataaagcatgaactgcctgggggtggtggctcacacctgtaatcccagcactttgggaggcagttggatcacctgaggtcaggagtttgagactagcctgaccaatatggtgaaaccccacctctagctgggtgtggtggtgtgcacctgtaatcccagctacttggagacaggagaatcgcttgaacctgggaggtggaagttgcagtgagtggagatcatgccattgtactccagcctgggcgacagagcaagacttcatctcaaaaataagcattgacaactgcgggtcaaaactgcccctggttgagactcactggctggagccaaaaggctgagctgcctgcccaacagcagc

SEQ ID NO: 754 - DNA, 371 bp, Homo sapiens
agcaccgggaagcaggggccgagccttccccgctctgtgcctgggggctctgggcactgtctacacctgggaggtggtcagcatatgtgcgtgggaacttgctggaaggaaggaatgacccttctagccatggaacggtggtcatccgtgagccacggcctcaggaggtgccttcctaatgtgcaggtgacgattgcctctgagctcaggcatgcagcttctgggatgcactctcctttcacggcaaagcattctgcataggaaaaaccgtctctgcgtctccaagctgtggcctagcccttcattcatcaaatgggatacaactttcatttcttattaaaatctggaagtcactctccatttgtaagata

SEQ ID NO: 755 - DNA, 1421 bp, Homo sapiens
cttctgtcccttccaagacccggcgacaggaggcatgaggggcccccggccgaaatgacagtgctggcgccagcctggagcccaacacacccgctcccctgcagacctatctcctcctgctgctgctgctgagctcgggactcagtgggacccaggactgctccttccaacacagccccatctcctccgacttcgctgtcaaaatccgtgagctgtctgactacctgcttcaagattacccagtcaccgtggcctccaacctgcaggacgaggagctctgcgggggcctctggcggctggtcctggcacagcgctggatggagcggctcaagactgtcgctgggtccaagatgcaaggcttgctggagcgcgtgaacacggagatacactttgtcaccaaatgtgcctttcagcccccccccagctgtcttcgcttcgtccagaccaacatctcccgcctcctgcaggagacctccgagcagctggtggcgctgaagccctggatcactcgccagaacttctcccggtgcctggagctgcagtgtcagcccgactcctcaaccctgccacccccatggagtccccggcccctggaggccacagccccgacagccccgcagccccctctgctcctcctactgctgctgcccgtgggcctcctgctgctggccgctgcctggtgcctgcactggcagaggacgcggcggaggacaccccgccctggggagcaggtgccccccgtccccagtccccaggacctgctgcttgtggagcactgacctggccaaggcctcatcctgccaggcatggtggcgcgcccctgtagtccaagttactcgagaggctgaggcaggaggatcccttgagcccaggaagtggaggctgcggtgagccatgatcgccccacagcactctggtgtggacaacacagcgagaccctgtctcacaaaataaagtaagcccggactgagtgcggaaaggcgggcctggcgggtctggtctccccatgcgggccaccagaggccctgcagccttcagtcgcttgaaggggtaatggcgcttccactcacaaacatggcggacagagcgtgtgaacgagatgaacagcccctcaaaaatatggccgccgaggctggacggccgtgccccagcagcaccgcctccgcgccccacgtgatctctcgccgggcacagcgctgaccgcggaggtccaaccggaagaatgtccggattggacattcggaagagggcccgccttccctggggaatctctgcgcacgcgcagaacgcttcgaccaatgaaaacacaggaagccgtccgcgcaaccgcgttgcgtcacttctgccgcccctgtttcaagggataagaaaccctgcgacaaaacctcctccttttccaagcggctgccgaagatggcgga

SEQ ID NO: 756 - DNA, 5007 bp, Homo sapiens
gagctagttaattttaaattccccgaggtccttttactgagatggaaaagcacaaacagtcaaggaaaaccaaagagggaggggtgagggaaggggaaagtgcataaagcacttaaagattttttaaaagtaggtatgatagataagccacaagaagtttttaagactactaataaccataattctattttaatcagctatttagctggtacctactgctatatcacctagtgtgacatttcggaattaatggaacaatgaaggaagctgtacactggaggttccaggtggtcatggaaggtttccagtttatgcaaacttctgtgaaaatgagctttgttattggtgaagacattggaaattttaccagccaaaacagagtttctctcttattcagggtaagatgtaattgcagtgtgctagcgctggaagggacctgttttatatgttatgtatgttacacgtcagccctccatgtcctccagttctgcatccttggattcaaccaactgtgggttgaaaatactggaggtaaaaagacaaaaaataacaatgaagaacaacaacaaaaatacacagtataataattacatttacatagcatttattttgtattagacattataagtaatctagagatgatttaaagtatatgggagaatgtatgtagattatatggaaatatgagggtattttatttaaagggacttgggcctgtggataccaaggaataactaaggtaaaactgagcataagtggcctgtccatattttgttaaatatcagattattgattagtgatcatcaacattttcccgcattcatgcagtgcggcctctgaaaacatggttgaacatcctatggaatttttttttttttttgagatggagtctcactctgtcacctaggctagagtgcaatggcgcgatcttggcttactgcaacctccgcctgccccacctcgggttcaagtgattctcctgcctcagcctcctgagtacctgggactacaggcatgcaccaccacgcccggctaatttttgtatttttagacgagacagggtttcaccctgttggccaggctggtctcaaactcctaacctcaggtgatccaactgcctcggcctcccaaagtgctgggattacaggtatgagccaccgtgcccagcagaattttttaactatttggttacgactaatttggataatgtagtgcatgcagctttgatttgtgccactaagagtgggcaaactgtcttcctttttgtgaatcagtaaaaattttccctcaacatgtgtttgacagttgtcattcactgctaagttaaggcatttggtaaaccacacagcctctgcatccttcctagcgacagccacaagaaaaggtgggcatgggagggaaaatgctcttgtgaattgaactggaggcaagctccacttttctttagaaaaagatgtagatcaaaataactaatattttcttccttgctcgatttctgtgccttccatggtacatcaaaataataggaccagtaatggccacaatcctgttgactgctgttaccttcgccccaatatttctttaagcatttcttaagcatctagcttgtgttttgttatatttaacagattttcttaaagtattgtatgaattaaaaccagaaataacttcattttcctagaaagggataatttctcccggagaataaatcctgaggatttagttagatgctgtgggtattgtattttaaataatattttaatgggagcagctgattgactttcaaatggattgtttacattaatagtaattctgcagttgttttactattgcatcagtctgccagacaagttccatgtgcatattttaattcagaactaattatacttaaaaatttaaaccctgcatacttccccaaaaatgtttagggcagttaaaaacaactcttttggaagatgactcgcattttaagaaatgagagaacactgtcaaatgatgaatgcatttaaaaaataatttgcaaagtgataaaagcccttagttttaaatcttacaatgacattagctcttacaagaactcagtaagtatttgctgttttttaatgggatagtaataaggttgaggtttttgttaagggacgtttacttatcatcaaactctatacttactactacaaggaaactccaagtacattaaacactatgttttataattctttgccacactgccaataaattctgttcacattttaaggatgacaagtccactatatgtaacacgtaagaatgctatcctggcagtagacacagggccagaataaactggcaagttttcattccacacaagtgtgggaaaaaaatgactacaacttaaactttatttacttgattgagagcttattgcacatgaaatgttttatgtggttgatcttaacttcgtttacattgacttctatgctcaagattgttcaattgctgctgctgccgttgtgttttctttcaggatcgaggtgggtaccttcatataatatcttctttttaatttcttctctggcaattctttcctggattctttgctttgcataattatacctacaatgaaaccttagaagaaaagaatatgaataaattgttaatataaagtcctacagaaattaatttatgaaatttctctaaatcacacaaaacttaaatacagatgactactaccctgagactgaaaaatatgttctaatttatagtgctatttttgggcagttttggtgtcagaatacctatcaacacattctttttttattaggaaaaaaaggatgtctacataacaatttgtaaagtgataaaatccattagtttttaagtcttctgatagcattggctattataagaaacaagtatttgctctcgtttttaacgggataataatgctatgtctacataaaatgatttctaccaccttaaatagctcactgtagaaattcatgtataaatggaaccatatagtacatacatatcatactcttaggtctggcaaatatttgaggttcatccatattttatattcactcatcagtagttgtaaacacattcttaaagtagcattttcagatatgaataagcagggatgaaataagtattagggtaagggaaatggttgaggctttcctaagtgaagtgtaaaaaccacagctttctttttaatgggatgtctaatatgcatttatctgttcaagcattttaagatttccatgaaaatgtcctgaaaaatcaagattcttcattgagggtgaggatctcccaatgggagactgctctgaaaagagcatgtgctttttgaattagataacctactataatcatggatgttcttgaatacttagcaaacataccagcatcccaaagtcaccaagataaaccctcctactccaacatcacatgatcttctaattctacctgtaaaaataagcataacaattaattagaatataattacgttatatacattactccacctagaaaaaaaaatagttcattatgtagagaaatgctttttttagtacatagagaaataaaaaatacagatactcactagtgaacaaaaaatgtccaaagccagccacaacagatcctaatgaaccatacaatattgaatgccgggcgcagggagtattttcaacatctaaaaatcctaggagcttaagggactagaatgaaaaaaaagaacctagattgagtaagaaagtatttcattttggggtgctttggcaaaaatgacaatacaccatttcttttcttgtagttgagggtttaaactagagtatgtgccacgtgacaacctaaatcagcttgcgttgtctttgtccacctttggtatgcagtctgaatctttaaatccgaaaaccttacaaattggaccggaaaacccttaagcagtagggtaacttggagctgtatcttaatttgctaatcaactgacttggaaataggataattcattttatgagctctttaaatgagtttatttgggaatatgcctatcattggaattgaaagcagcatagcttgcttcagtaactccaataatttgggaagcagaaatggaaaaagtaatttgagtcatgtttgcttatgtagtgccgtttaaaattcccctagtaattacctttcatattttattaactaggttaacatcaactgtggttgtaagagtaaatgtttcaccttaagataaacatgggcaatatattaaactctagtctgttttcttgcctgtgaagtgaggctgcacttgattatatttgattctttgttcgtaatacatgggaacgacagctaagtgtggtgaaaaacgcggggatccaaagagctggatttttatctcagatctgccgctaacttttgtatcctataggctacttttatttctatggtctcaatctataacatgaatgggttgggttaaatgactgaagttccttcaagtgctaaaattctttttctacagtcttcattggatttatgtatttcttattcctaatatgtttaactgggatgtctgtcactctagggcggcaagacagacatttaaaagtaacagtcacactgctgaactggcatttctgttaacacaaaagtttagaaaactcacggtaactgttacttgatttaagtgtatataaaattttcagtaaggctgcttttaaaaggaaccactgtccatttaaaggtttcatagttatcttcaatgggttagtattgtttggggcaggacattaaactagaagggattctataggatgaggtgatacctagaaggtaatatattgtaaggcaaaagagattagaagaaatggggaaaggatagtaaaaggcaagtcagattaaaggttgaaacatgaagatattctcaattgtatttctgcctatgtttgcttttttggctcaagcatctgttggaagagacaaaatgtgacttggttcataataaagcaagaattatttactctcgga

SEQ ID NO: 757 - DNA, 959 bp, Homo sapiens
gtctcgggtggggtgcggcttcctgcgtctgagagacgcttcctctcctgctgtcctctccctgccaggccccttctgcagcggctggcttccagacaccctgcgtccctcccttgctcgcagcagttgctgtggcggtcctcccgtgcacccccccttctgccctcactgcccctgggggtcctcatcacggaccccctaactcggcatcctggacaccaccaccccgcacctttccacagtgcagctctgctcgtgcctgtgaagcctcccacagcctgggaaggaaaatccagacttgccagaccttgcctcagccaggccttggaagcctgccagcttacctaaccaggctagtctgcccccctcactctgggtgctctccatgggccactcaccatttcctgagcaggaccagagctctcctgccccaaggctgggcttcagctgctctttcagctttgaacgtcctttcccattctccatcatccacattcacctatcctgcctgccccagttaaaatcctgtttcttctaggaagtccctcatcccacccgcttaccccagggagactgagcttgttccttctcctagtaagaccctcagcccatggagtcctgtgtgatgttgtgagcgtgggaggacagactgaactgctcggcccgtggagtcctgtgtgatgttgtgagcggggaggacagactgaactgcgtggtgcttcgcacatagacctcaacagggattggcattttgaagctgttggcgggggctgtggactgcttttcttcctttctagctcaacggcagctaaagccactgcatacaatgcaaggactggctcctgtttggccacgactgattgcagcccctggtgaaatgagaaccctgtgggtcggaacaaagtttggattatttatgttgcaagtaactaaaatctcaagtgaaactggtttaaaca

SEQ ID NO: 758 - DNA, 936 bp, Homo sapiens
ggccacatctgccagagcctggagtctgcgaaggccgggacccggttccccggcccacagtgggggtgtgcaaacccgagagaactggtcgctgaaacctctacaacttagttgaccgtaactgccagagccctgccctgaattcctgtccttactccctctttaagattgcgtacccactgcagagtgctgaagacggggtagccacgaggttgcaaattcgtgaagaatcagcatcatgtttggcagctgagtattggagccaggagcctgccatgaggttatattcccagaggatgtcagtcccaaggaccagtagctgccatcagtttggattctgaaaactaactggcatcaacactgggtgtagaaacatgcttgccttatgtatcagaggacatgctcagcagatccaagagatatatttggcaactttttctagaaaaggcacattgggtatcattcattacattcttgagtttttttgggtttttttttttttttttgagacagtcttgctgtattgcccaggctggagtgtggtggcacaatcacagctcattgcatcctcaatcacccaggcctaagcaatcctcccaccttgtagctgggactacagctcacagcacacctggctaaaattttttttttgttgagacggattctctatgttgcccaggctggtctcaggctcctgggctcagatggtcctcctgcctcagcttccaaaggcacaggccaagttgtagctttgtcccttgccatcatgcccaacaagaggttctataccttttaatgaattgactttcataaattggttatgttggtgggcaaagttctttaagctggaaattgtaaattcctcctgaaatgttttttcatgcagttaccatgaactaatactacaataaaggatggtcttgggtgtcaattctt

SEQ ID NO: 759 - DNA, 344 bp, Homo sapiens
aggcagagagggagaaataacaagaatggaagagtcgttcttccaaaaagggccatctgtgaccctgagagataaacctggcagaccagggctcacatcttagtaaatcacctgtaaataaagcttgcaagggcagtgactggaagctgggagagagggtcaacagctgaatctcagcctgatggaggccaccatttaataagtaaatacatgcacggctatttagatcctgcatcagacaggtcatcagaaaacatgaagctaaatgcagtaaagaattactctcttgaactcttgaaaatatcaaaaacatgaagctaaatgcagtaaagaattagtctctt

SEQ ID NO: 760 - DNA, 545 bp, Homo sapiens
cacagtccacatacagggttcttaacctgcgtttttacctacattttagactgaccctgcttgtgcctgtgaaccaaccaacaatctctggctgcagctcagaaaggacaaaagagaatggatgagggaaacttcccagggcttgtctgggtatgcccacagtggactggagcccaaaatgcacactggaggaagtggatggagccacgtggatgtcatgccttatgcaggggaggagcctgctctcttcagctcctgtggtaatgtgggaatcgatctgtgaggaaacactttctgaaaatgtcagaactcttgaaaacatggatgaggaaaagcataagtactgctttatgcttttcttatgaattttaaaagatgtaatttaaaggtactttaaagtgatatttgtgcccttgtaactgattcaaagtagactgctaaggacaataagtaataagagtctacaaatatcagtaaattatgagaaaaaacggtctaatggtacttaaaattgcattgtgatttattaaataacattgaacagc

SEQ ID NO: 761 - DNA, 452 bp, Homo sapiens
cacatttattgtaatcaacagtaactggatgtttctgaggtgttttgattggactcaaaagtattacaatcagtttggagacaaaaacacaatctgcattttagtttaagtatgacactgatgacttaaaaaaaaactatatacaaacgttctatataaagtttgcctccaaagtatttctctttctctttcttttttgcaggggagatggggtctcattctgttgcccaggctggagtgcagaggcacaatcatattatactacaacctcaaactcctaggctcaggataaaacaagatttattttattctgacctggaaatgagaaaaaatatgccacctactattaatccatatgatataaatgaagaaacaaatggtgaaagggagaaagctcttctttacaggagtatgtgatctaataaataagaataaagtttttttaaaaatca

SEQ ID NO: 762 - DNA, 3528 bp, Homo sapiens
attacatttcaaaatgaattttagaagaaacacattcaaaccacagcacatttctagacaaactttcagacacagatgtagagaaattttaatgaaattgaattttaaccaagtgaagacaacccacagatttgcaaatacccttctaagattcttcaaagatatctcaatggttaatcacgttgtttaggaaaatgagaacagtgacagcaagaccttctcagtggtacaatggcctcagcagcagtaaaagagggtagtaaacattatgcagactttgtgtgggctctggatcacccacagagaagaaagttattttgtatgtatgtgtgtaactgtatgtttaagagaaatgaactgtttatttacagggattattgaggagcagaacctcacttgggtagatgcaggtgtaacttttaagatcaatatccatggctttgaatagataggctagagatacagcagatttacttagttccccaaagatgcatgttgggtgatacccacctatattagttttccaattactgcaaattcagtaggttaaagtaacaattgtcttatctcacagttctgtatgtctgaagtccaggaaagtatggctggatttttctcagggtcttataaggtggaaatcaaggggtcagctgtctgcattttcatcaggagattggctactcctcctagattattcctagtactggtagaatttggttccttgtgacagcaggtctagggtctccattttttattggctgtcagctccttgcagtttctttctggtccccttgatcttcaaatgcacatcaaatctgtctcatgtttaaaatcctgtgatacccacttctgcttcaagacagaaaactctgcatttaaagggctctggtgattaggttaggccaacctgaatagtatttattttgtcaaataatgtaacataatcgctggagtgacatatcatatttttaggttccactcatgctgaaagtgaaggacattatacatgggcatgagtcactggaggtcattcttggaattctgcctaccataccaatggagatcaaatgccaggaaagtcaggaatagaaattcagagagcatacaatcaaatatattaaattagaattcaaaactattcaagagatggttcagagttttggccaagcagtggatcaaattttcttactactgcttaatcaaggatacagtacagaagtaaaatgaattgatctttattaaaatggagcaaagaccaggtctaggaaggaaaggcaagaaggtggaatagatttgctcttactggaagaacactggagattcaagacaagaaacagaattgttttagtccctgagttaacaaataaaagaaagatgagaccagaacagttgtcaatgaaggagcagtgaagtagaaaggaaggatggagtgaatgtggagagcacttttctgaagagaataaacttagttgtcagatgaaaggagatttataattagctttgtccttacaaattttgaggtaacttaccatggaaatactttttcttatcagttgattaatctggggggaggtagcataatcctttgaaattccagtgcgtagaaaactaggctcgacctcaagatgaagcctcaaaaaagaaatgtctgttagaatccagttaacaggagaacacctactgcgactttattatcagcaagttggtgaaaacttcctgaagaagaaatgtgggatgatacagaaactgattaaagtctcagaacagcaaatagtttctcctcttgtgaattaattcaccttccacaattaaacagagataactcagggtacctcaaatactgatgagcttgacagaaatgaattgccacctaattccattgatggagaaagataagacaatgagcaaagaaaagggactttcagagagaagaattgttgagaaggtagcagtcctttctctttccatgaggtagttgctattcattactctgtgatggggactgggaacacaagaatcaccacttagggattaatgaattcaagatctgtaccttccattttgatccaaatttgaacttaaatttattcaggacaccaactgaatacttctacctaaaggtaaaactcatatcatatttccctcccaagctgcatttcctctgagttcctgacttgacggagtcatttatttgtacaatatatgaacgctgagagttgtgccacatttctctctcttttgccctggacatccaatttttatgcaacactttcatttctaactcctaaatatcttagtttactatctcaatcactgcaaccactgacatgtttatgccctttttactagcttgccaaataaatataaaagagctcattaatctctctagttccttattaatcctcatttcatctaatctagtattagtattatacccaagtataatcttccaaattgcaaaaatctgtttctatcactctttctgcagcatccttcactggctcccccatggtctacaatatatacaatctaagttttaaaaagaaaaaaacttatgactatcccttattttgaaaaaaggaaaattagtcctttactagaaaaatagcactgtattataatgtcaagttcacactagagtctacgatggtgtcaaagagctctatatttttcttcttgagtcactttgatatcctcccacagtaagaccattacagttggtgtattggtctgttctcacactgctatgaagaaatacctgaggctgtgtaatttataaagcaaagagggttaattggttcacagttccacattgctggggaggcctcagaaaacttacaatcatggtggaaggcaaaagagaggcaggcaccttcttcacagggtggcaggatggagtgagtgccagcaggggaaatgccagatgcttgtaaaaccatcagatctcgtgagactcactcattatcatgagaacagcatgggggaaactgctcccatgatttaattacctacacctggtgccacccttgacacgtgtggattatagagattataattcaaggtaagatttagatggggacacagagccaaaccatatcagttgggtactgagaaggacatactgtattaatcatgccttcttattgtctgtattttctaatgttttgacatccatattttctgatgttttgacatctggggacttgctgatcttggagggactgaccctctcagggttaactcattcctaggggtagcaaactgctttccctagagcatgcctttcatatcaaatcaaccaatccaaacctctactccaacccaccttctttattgggctctcatactctgagcccctattctcctaccctaattaccacagggccaggtactaaacaacttgagataatccctacactttgtagcctgctcaaaaatttaaaccagccaatgctaaacctatttagcctgtgtaccctgcctcactcatttgttcagtgaaaaccacaataaagtttcttgccaatg

SEQ ID NO: 763 - DNA, 2122 bp, Homo sapiens
ttcaagaccagcctggccaatgtggtgaaaccctgtctctactaaaaatcaaaaaaaaaaaaaaaaaaatggctgatttcagagtcatattcaggtttaaattctgtcattcagcccaaactcattactttatgttacttatgggaacctcatctaaaaagcaaggatcctgatacctgcctcatattgtggcaaggatcaaatgagtcaaataagatgcttgtgaaagtgaggacaggatctatcctcaacacctagtgcaattctttttacacattaggtacttagtaatttgggttgaattgtgttgaactaacctggcggtataggcaaaatttggaagtttggttttcagaaagtcttgacttcctcttatctctaagtaattggcatgtcctctaattcatattttcccccctcatctgttgggtgaaatactgtttatcctttagtactaaaattaaaagttacctcattcttctagctagctgatttttttttttaatctaggctaaatcatgaatacatttacatttaaataaaatattacagttgaaagtaaagggtcctttcattatctccacttccaattccagtaccctgtgtaaaggaaaacatatacatcttgcagacattttttaatgtgtttgtaatataggtacataaaaatatatgtgcttgttttaagcaaatttcatactctgcaacttgccttttttcttaatacgttctggagatcttatctagtcagcctctaaattagagttcttcagaaaaccaatgggatggatgaatggactcaagagattgtggaaaccaagaagtcccacaaaataccatctgcaagctggagaaccaggaaagctgattgggataattcaaactgggtccagaggcctgagaactggaagggccagtggtgtaagtcctggtctgagaccaaaggcttgatcaagaatcaagagcatcaacaaccgagggcaggagaggatgggtttcccagattaaaaaagcaaattcacgcttcctcccccattttgttctatttgaaccttccgtggataggatgatgcccacctgcattggtgaaggtcatctttactcagtctacccattcaaatgccaatctcttccagaggtaatctcacagatttagaaatgtttcgccagctagctgaacaatccttagcccagtcaagtgcacacataaccataacaattcttactaatctacctcattcttttttatcttctgcataataatccacaacatgaatgttcacgtttgacctctattgatagacatttcggatgatgccaatttctttttctggtttttgttttttgtgtgtgtgtgttttttttttttttgagacgaggtcttgctctcgcccaggctggagtgcagtgggtggggtgatctcggctcactgcaacctctgcctcccgggttcaagcagttctcctgcctcaacctcctgagtagctgggattacaggagtgtgccaccacacctggctaatgtttgtattgttagtagatacagggtttcaccctgttagccaggatggtggatgggcatttgaatgggtagactgagtgatcctgacctcgtgatccactccccagtctcccaaagtactgggattacaggcgtgagccacggcaccaggccctctttttctatttaaacagtgcttccgtgaatgtccttgtgtacacctccttctgtacacaatgatgtttatctgatgcacattgccaatcagtgcacttgctggattgaagaatgtgagtgtttgtatcactctttcagtaggctgtaccaatttagacttgctctaccaatttagatttccatcagcagtaaacaaagacattcctgcctggcagtcttgaactcctgctattatctcttaaatttttgccagtgtgtgaaaagtagtatcttactttaacttgtattttcctggtccaatagtgcactaaatgcccgagttctgtatttattctatttggatagccattagatagccattaagtccactcatagagttattttaaatgttttcctttagtttccaaccacattttcaaataaaatttagaattagcttgtcaa

SEQ ID NO: 764 - DNA, 291 bp, Homo sapiens
tatgcagccccagggcaacctgagccatggtcttcatctttcctgtctctttgagaattagtgagaaaattggctcatctgggattctacccatagaaattccccacagagggagagacaattagcaaaaggaaaacatctaaaaatagtcctttgtgctgcagcggaacacggttttccgatacctccaggatttggggctgcagttggacgttttccatctcttctaatagcactgtaacaagttgtcttgaataaacacgagctcgttagccataagaaaactttaaa

SEQ ID NO: 765 - DNA, 622 bp, Homo sapiens
ggtgctgggtgagctccaccgctgcccgggctgcgagcctgacggctgtgtgtcgggaatgacgagacccaggcttgcaaagacttgcacggcaactggaatttatgacaaatagctcactgcagctaaactttgatacagtgtacagtagaaccgcctgttacacacaggagggagacgcgtccttcgtcaccatgcaaagccagccttaacacaacataggaaaatgtggcaggtctctaattacggactgagaacaagcagaagaggagtgacactgcagattccgaggcactgcagtgggatgttggctcagcaagtggctgtgatgtacgggataggcatggaacaggattccagctgttccatgcaaataggataaaagaatggtaaagaggattcctttttttttccctcctcaaaacgttaccagcaaagtacattcacagagcctttttaaggtgccttttgccagcttttgaactgaacttgtaccagtatctcaagccctgaattgtaagaagagctgagagttctggaactcatttttaaaaagtagatctacgaagattctaggacgtccgtttctgttactggctccttcttgtgcttggatgcagct

SEQ ID NO: 766 - DNA, 723 bp, Homo sapiens
ttttattttgggaccggacacactattatataaagaggatctgtgagtgttacttggtcttgtaagctatttttctttttttcagcaaaatgttgtgagcacctaccatatgccaggcactgttcagtgaactggttgtacaggagtgaatgagatcatcttgattttgagaagtttataatctactcaagggaaacacgtgtaatcaactatgtttcagacataacccctcaaaaccaaagcagaacctcttcaaggagctgagagatgcaagcctggaggagaaaagcggggcagcatcaaacccctcccactggggcaacctgctgagcatctccctggccttggcccctggccataccacacaagtgtccaatgagtcactgatcctgaagaacaagagaagactgaccacagaccccaaaaggaagcaggagtacaaccttcgaagttggtgggcaacaagaggtcagaggttgacaagcatccacacagctctaagactagcatcatgtggctacccaggacctgggagagtgctgcagagcaggagcaggaaagggaccggctgttcccatagaacttcatgtcacaggtctgggagccagggggccttggttctagtcccaactctccctctaagttgtcttatggccacaggtgagtgaaatagcttctctggcctcagcttcctcacgattaaaatgacacagttgtgcaaaa

SEQ ID NO: 767 - DNA, 466 bp, Homo sapiens
cagttatccttgtaactcctaatgtctatataaaagatttttatattttttaattcttaaaattttattatttatttcacaccaggccatcactgtgatacattttttaaaacacattaaattatcaccagaaaagtgctgtgatggaaaatataaattgaaataccttttctggttaggagagtaattctgtttttctgatagagaatagaagagtccttcaggcccctccaaactgtcatattccgggcatcgggtgtccccatcctcacttcagtccacaggcagggtcctcagtcttcagcgctccttctctttcccctttgtcttgtgtctccttgggtctcttttctccaagacctaaactccctgaggacaggactattttttacatcttgatgtcactcctgagcacttgctttaatgtgttggacactgggtccattaaagattgtatgtgaaatta

SEQ ID NO: 768 - DNA, 3070 bp, Homo sapiens
aaaataaagcaggcagaggaacgtggaaggactagactgcctgagtcttctgaccttcatctttcccctgtgttggatgcctcctgccctcaaacatcagactccaggttcttcagcttttggactcttggacctaccccccgagtggtttgccaggggctctcaggccttcggctacagactgagggctgcattatcagctttcctacttttgaggttttgggactttactggctttcttgctcctcaacttgcagatggcctgttgtgggacctcaccttgtgatcatgtacatgagggaaatacacacccctcccagggatgatggaaggttaaggtcctaacacctcctgcacatctgagcagctgcacattgaaccagatagtcctggaatgtgggaaaacagaggcagactcaagagtctggaacattattttaggatcacacaaaaaagatacataattttcatagaatgatactgaaagcatctcaaaaataaaatcacgagtatctgcagatcactatgagactggactggaacattaccttcagacacattgatatgactacatgctggacattttcttgcggaaatccaaaagaaatccccattttcttgcagaaatctaaaataatctcccctatgtgcaagtcagactgagcaccactcccaagaccatgacctcccctgcagccctgctccttcccactcacctctcctcttgagaaagccacctcccaccacccagtctgcagtgccagaaaactggaaaccagcccctaagctgctttcaccttcggcccatttctcactagccagcctctcccacggcctccccagtttcttcaaatacaccccctccactattcaccatactgccaccgtgatttatttacaactttttgtccggattacctcagtagccttctaattgtcccctttgcatctaaagtagcccctctcatcccccaaatcttacgtcactcttctacataattctggctttccatgacccataaaccacatttctcaagtgtgctctatgctggcttgaatatgttaataatcttaattctacttttagtgcaattttcttagagctggcatcactttcatcatgacgtgagaacttactagagataggcaatgatgactcacagtcaagccacatgtcatatgctgcagacatctggactgctgcttatttgcaaatccttttcttcatatttttctcatttgtagcactggatcaattccaattaagagtttaataatgaattaactaatgatttaaacaggtggataagactaacactgaaccaatgattttaagtaaatctaaatacataaatccccccaaattattaatctatgttgtttactaagaagtgtattaaaatgatattgaaaaagtttgctttgggaaagagctagaagttagaaggtctaggttcaaatcccgcctctactccatccttgactaagatgttggacccatcacctcaactttccttgggtctttttgcccagacatgacccgatgacacagagcttacctggacctccacaatagtaaatagaacagggccagcaaaccaaaatttgttgagtcctttagaattaagtagcttagataaattttcatcaaaatctttatatagtagggaatagaaaaaagtcaattctgttttatttgaggatgtatgaatatgttaccatttttcagactctgatttaccttccaattattgtttattggggtcattgtaaattagttatcattttttgaatacacattcactgctgacaaagtggtgaagccagaagttatgtttgaccagggaagattatgaccctcaaaggagaaaaattcacagggggtagttgattattggtggaatggagtgagagtgaattccttaaaagtttaaacgaaagcagaactatattcatatcatggagggaacttagtttctaatatgatgaactattgccccaagtcatgacaataccttgctctctggaagagaatgagtgagtttttcatccgccaagatacacactctatatttccaaccatcacatctgccttgcaggctgactgaacccagagcaaatcaatcacaaaagttaatccaaaagacttcccttcagctgctggaaatcagtcatcacatctgtgaaaagagtgctagttataacaaatgagatcacaaatttgaccattttattagacaccctctattagtgttaacagacaaagatgaaggttaagttgaaatcaaattgaaatcttcttccctctgtacagattgcaatatctgataataccctcaactttcttggtgcaaattaattgcctggtactcacagtccagtgttaacaggcaataatggtgtgattccagaggagagtactaggtggcaggaaaataaatgagattagcagtatttgacttggagccataggcatcaattctgctccagctgtcgaccaggttctaaaaacaagactcggagcagcttttgctcttgctagtgatgcagggccaggagagcccccacactctgcatttgcaggtgtccatgaggggaagccactcctgcatttatcctgtgagtggagaagctcagaggaatgaggacattccaacagggtatcagaattctcttttgtttatgctaattgacagcaggaacatcaccatcttggacaaacaccaccattttaagttctcttttatttaaaaactgcctaaatccagccccaaaacatcagcctaatggctattgtcagcataatcagaaacattccaaccctaagataaacacccctctggccagaaatatgccgaccccgagacagcctcccctccgaccagagacattccaaacccgcagtaaactttccttcacatggaaacattccaaacctacaaaaagcttccctcttcctaaacccttaaatatccttagtctgcaagagagaatgctcctgactgaaatcagccagaagcccctctcaggtttattctccaaaataaacctgtctttgactgttgagcca

SEQ ID NO: 769 - DNA, 3252 bp, Homo sapiens
attaggcacccaggggcccatggtcacattagaagttaaaggcagcaggattctgctgtatctggattccaatttctcactgatggctaagccactagatggagttacaaaaggggaagaaaaagaacccctcctctgggaaacagcaggagaaggagccctgcctggtgaaaacttgcttatagacttcacagaacctccccgtgccggaggttattggttcatgctagtgcttgtttgcaccttttcagggtgttatgtcttggatccaccacagtcggctaacactggcagctcaggacaagtgaaccagccagcaggacccagatcatccaacctggctgatccttagatgagaccgagttgctgctgaggacaacagccctgctctagtcactctggaggctgactagtctacgcacggctgaaacttgaggacttgtcaagcaagtaatgtagctaaaatcttaagactagtggttttcgtgtacactaactgttttactattgttctgtcgctgtgctcaacctttttcccaggtaaggaccttttttgtccttgctggatatgaatatgctgtacattgttttgttgttaccccccttaaccatgtagaagaaacacctacagaaggtgtccccactgtacacatactacttggtcagggaacagtataactagaaccctattgcactatacttattatgagtgtacagggactcgcttaggaacttgtacttataatcaaaccacctattcaacctgtgacccaggaaatggccagccttatatatgctatgaccctaagtgtttacctgggacttggtttgagattcataccgagtcaaagggaggaagttttgtaagttgaacccaagcctctcttcccgggggcggggggtggggtggctatatccatatactttgatatttgtcagttaacatccatgaaccagagattgtgaactatctcacaatctctggtcctacagggtactatacaaactgccagtacaaaattgcatgtgcaccccgtttgcccctccgaggccctagcgatagcttgctggaaccgcacaacgcagttcactgaccgatcatcaccgaggctaaagccaatcttgctcatcaaagtgccagcaaaaccggattgtaagacaagcacttgcaatcctgtaaatcttactatcttaaagccagatctacctatatagactgcaggttactccatggcattacaaagctacagtcaaaaaactaaaataactttgtatattctaaagaggactcaaaccaagcggtcagctcagcagcaattccgagtctttaagtcattctttgagcatataaaccaaaagttaccagagcctcctcctttagccaaaaacctatttgctcagctggctaaaaacattgcatgcagcctaggcatttcctcatgttatgtttgtagaaggactaacatgggagactaatagcctcaggaagcaaaagagttaatgcctcaagataactttactctgactctctctttccccaaacagacacgcacaagttcaagcgtctagctcttaaaaacttctattattagcagatactgtgttgctccctagggaaaagtttttacagacccagtaggagaactaacctgcttaagacagcaatattataatgaaacattaaggaaaactttgtggcagggcagagatgactacaaagcacctcatccaaatctgttctcctgtttctcttctctaaaccacacttggtatcaacttgaagctccaaatacttggcaagcaccccccgtctttattggatctgtaggctacaggcatattgacagttgccagttaaatggacagaggtgtgcttagaacgattagaccatctttcttcctactcccactgcaacagggaaaaacttcaaggtaccctgtctatgatgaagttagaagaagaaacaaaagagatgcagacacaaagaggtataaaaataagagattgaaaaggcacaaattagccccctgaaaaaataattccatactataggccagctacctgggcacaagataggtcatagggagaccgcactcctatctacatgcttaaccgtatcataagattgcaggcagaacttgaaatcatcaccaatgaaacaacaaatgcattagatgtactggcccagcaaaccacaacattgagaaacgctacctatcagaacagattagctttagactacctcctagcccaggaaggaggagtatgtggaaagttcagtctaactaattgttgcctggacatcgatgacagcggaaaagcaattatagaaataactgcaagaatgagaaaattagccagtgttccagttcaaacttagaaaaggtgatccccagattctctctttggagactggttttcattttttggagagttcaagactttaataggagtagtgctggccacactgggaagctgcataatactccattgtctcttacctttccttgttagaagtattcaatcaactatagaggcaatagtagccaggcaaactacaactcagctaatagctctgtgtaaatatcaacctttgtctaaagaagaaaacttgtctcttcaggcagaactaagtaatagtgatgccttttattaaacttatttcataaaaggcatcaaaggggagaaactgaggcagaaatttaaataataataataataaatactgcatttcttcactccaagaaaagtaaaagctaaggcccagaatatggcaaggcaaaggctaaaaagaaaagaacaagttttcctcttgcctagcagctcactttaaggaaagttagaagataacgctgtccaaatagccaaggccaaaggaatgggctccagacacccccctcccttccagagcaagcttgaaagaaaaaaaagaaagacaggttcttttactgttactcttttcccaggcttcttaagcatgattagcatgattatgttttacaaatgtctgtatttagccagttcttatttttcttttaatgcagctacaaggccactggctaggtcacaaattatgttatgctatagattacgtgacctgttactgtatgattaactgcttttattttgctactgtttttattttgcttctgtaagaccgcttataaaaaccctgctctttgttcagggctcagctttcggatgtgaatcctctgagccggtgcgtacctaaaataaacaaatcctcctgt

SEQ ID NO: 770 - DNA, 331 bp, Homo sapiens
gaagctccttagtgaggagctgccatgctgggccatccaccatctggattcctacgactcagggaatagaacactgcaccttccagaagcacttgtttcttcgtgggtacaccaccagctgagaaagaagcctcatgatgattgttgtcttatggatgcttctcattgcaggaaccatgtggaagggatataaatatcccccaggagggactccagtggaagtaagcaaggatgatcctggtgaagtaatgcagctgtgaagctcacctgaccagctgtacagttcctgttgttggtttcacataaagtaattgcacattattttgtcata

SEQ ID NO: 771 - DNA, 243 bp, Homo sapiens
ctgaatgagaccctttgctagagctggcacagggaggaaggtcgtcctggagggagggtagacactgtggagggaagggagacctgtgtcaggagagctgagaccacctctctgcccctcactactcttgtaatctttaggagtgtaaataatccccctaaggtggggacaggaccccagtccctgctgtgcgcaatagattatgatgatcaaaataaataatcagtgaatgtggatgggaaa

SEQ ID NO: 772 - DNA, 1432 bp, Homo sapiens
cagcacccctgcctcattaaccagatggctgggataagactcttgattttgaaaattcaacaaccagagttcagctatttgcagtgatttgcagtcatttgtcactatcaaaaaggaaaataactaaaatgtggtgtgttggcattagttacttactaatgagcaagatcagcacctgcatttcagcttggctctgtcattttctatttattggaagaatggtgttgtggttaagtgtgtggtgtgtagaggaagactatttgtttttttgtcttgttttgtttttattgaaatatagcatgcatactgaaaaatgcacaaatcatatgtgcagagctcactgaatttcacagaatgaatacacccatgcaatagcactcagatcaagagacagaacattagcagcacccccagaaggaccacccccaggatcccttccagtaaccacaccccctccagtagaaactattatccttacttctaacatcacagattacttttgcttggttttgtaacttatataaatgaaatcacaccatatctactcttcgtgattattttcactcaacattatgtttgtgatatccattcgtattgttacaatagttgttgttggttaactctcattgctgtatagtattacattgtgtaaatataccaaaatttatttattcaattcattgtactattcatggttattagtttgcaattattggcaattatgaataatgctgctataaccatttctttatattctttgtagtgaacatgcatgtatttctgttgttatatatttaggaatgaaactgctgtgtcattttgtgtgcatatattcaaatataatagttgttgccaaacactttttcaaagtggttgtaccactttgcatttccaccagcagtgtatgagtgttctagttgctctaaattctcaccaacacttggcattttggtattttttattttagccaatgtggtgatcatgtggtgacctctcattatggtttccttttgcatttctctgatgactaatgaaattgagaatcttttcaatatatgttgactggccattgtacatcttgttttgtttgtcttttagatgtcttttgtcattgatttgtaagggctctttatgtattctggatatgaatcttttgtcaaatatatgcattgcaaatatatacttttttacttattgatatctttaatttgttttaagaaaatttttaatttttatggaaattttatagaaatgctgaaaatcaaacgttatctgcagtggtaacagtctgacttctaaactgctatatgtaatagaagaacaatacataattgttgtatatatttatgaggtacatgtaatattttgatacaagcataaaatatgtaatgattgttgatctcttttaatgaacagaattccttaatcataa

SEQ ID NO: 773 - DNA, 557 bp, Homo sapiens
tcaacttgcttctgccatgccagcgtcacccctggtctcaggtgatttcttaggctaattctcagagatggggttattgggccaaaaaagcaaactatggctttccgaagctctcattgttcccattatgtcatgcatccctgagatgcagtcagcagaggattctatttgagggactaaacactcccggggaaagcaggaagaaggagacgggaactaacatttgctattgagcgccaggcatcgtcctacaggcttcgaagtgaaccttggatgtgctgctgatctgacctgcccagatttgtcatcattgttattgtcttggcctcttatgaagacgttcacccagcaggacttcagaagctttgttcactcgatctcatttaatcctcacaatagtgccctaaggaagatattagtatccccattttacaaaggaggaaacgggaacctggggagattaagcgaaggcctcacagatcatgaatagaagaggctggaaacctagtctggttcaagggtgtgctctttctgctctgccatgctgtgcttcagcc

SEQ ID NO: 774 - DNA, 457 bp, Homo sapiens
ctcagcttcggcattccagcctggaacaatcctcccagacctggaggtccgccccctccaaaacttccaccgcctccgccaccacctcctccgccaaatccgccgcctccaccaaagccaccaccaccgcctccagcaccagctcctttaggttctgtagaagaagagacacccgacagactatgccccctggtctggcccagaaatggactggagaagctaaaaaagacactgctggacttgtcacagccgccgggaaacaagaattaagacagttcggaagagtcccattcaaagtgggcggtctagaaaatgaaaattttaaattccacagcagcaacagcagctctcatgtatggagaatctgctggatccagggctctatccttgcgtggtctctgactcctaagacagcggaagccagcatcgctgtgctcatttgatagactcagagaaa

SEQ ID NO: 775 - DNA, 360 bp, Homo sapiens
cacagcactcaccgaccccaggcgtgactacgtttgaggcaaccatgaaggcttcagacattcaaacttcttaatagaccaggcgtggtggctcacgcctggaatcccagcactttgggaggctgagctttcctcattggccgtcatgccttggatcattaaggacactttggaacggagctttgctattctctgaagatacacaaaatcctccactgctcacgtcataatctatttaccaactgtggaaaattccgcggtgcctgtggtttttaaagtgatgctgaagcgagcacctttgtgcatatgtcttgatccacgcctgattttaaaatttcagataaaatcctagaagtgaaa

SEQ ID NO: 776 - DNA, 2319 bp, Homo sapiens
gcggccgcgtgcgcaggcgtacttcctggcttgggaaccacatcgcccgaccgtgctctttatttttcggtggagcagctctgctttctcaggtctctacttacttatataagatggcatcaagaagaaggacctgaccactggcccctgactacatggtctttggaacccgtggcattggaagatgtcagagacatggcacatggatgtgatcttcaaaaactgttacagcctcatctcattggattggtctacacatcaaggtgctggaagtgtcgcatgcccagagatgatgtggaagctctatacccctttcccttctgcccaccttgccctgtgcatctcttcctgaatggcttctcctgaattgtatcctttataataaactggtaaataggaaagagataatatcttctacttaatcctggatactatatctgaagtcagagcatccactccaaagcagagaatttctgaaaaacaaaataatgtcatcatatgatgttagaattttttttcaaatgatggttcctaatacttcacattagaagaactcgaatttgatgaccagtttgagaaacaccagtatatccagattacaagaaaaagcgagtcaaaaggatgatcatgaatataacaacttcgaggaaacatttaaccaaagaccaaagctttttaaacaactgagagtttttataagaaaaagacctcatacagtagtccccacttattcatgggggatacatttcaagacccacagagaaggcctgaaatcactgatgtaccaaaccctaaccaggttcttaggatgagctactaaatgacaaatgggtgggtagtacatagagtgtagatacaccagacaaagaaatgattcacagcccaggcaggacagagcagatcacacaagatttcatcacagtactcagaaaaccacaccatttaaaagttatgaattgtttatttctggaattttccatataatatttttgaccacagtttcccatggataactgaaaccatgggaagtggaactgtggataaggcaggactactgtaactatgacatcaatggtaggaacctgaagcataattctgctgtagtggattttttcaaaagaaactcatgaatgaaaaataatttattagatataagaaaggatgcatttgtatctcaaactttacttattctggaaataaatgaaaagccaacacctattacataccgacaaaaatgaaaaaataaataaatgtaaagccatagttcagtactgatggaatctgagaaaatttatatgaccgcgaacccatatctctgtactgaatgtgggaaaggctacacttgtcttgcatccctgacccagcatcagaaaacacatattggagaaaaaccttatgaatgtaaaatatgtggtaagtcctttacccggaacagtaatcttgttcaacatcaaagaatacatactggagagaaaccttatgaatgtaatgaatgtgggaaagcttttagtcagagcactaatcttattcagcatcaaagagtccatactggggagaaaccttatgagtgtaatgaatgtgaaaaaacctttagtcataggtcatcccttagaaatcatgagagaatccatactggagaaaaaccctatccttgtaatgaatgtgggaaagctttcagccatatctctgcccttactcaacatcatagaattcatactggaaagaaaccatatgaatgtactgaatgtggaaaaaccttcagccgcagcacacacctaattgaacatcagggaattcattctgaggaaaaatcctaccagtgtaagcaatgtcggaaagttttttgccacagtacatcactaatccgacatcagagaacccacacaggagagaaaccatatgaatgtaatgaatgtgggaaagctttcagccataccccagccttcattcaacatcaaagaattcatactggagaaaaaccctatgagtgtaatgcatgtggaaaggccttcaatcggagtgcacatcttactgaacaccagagaactcatactggagagaagccctatgtttgtaaagaatgtggaaaaaccttcagtcgaagtacacaccttactgaacatctaaaaattcattcttgtgtgaaaccctatcaatgtaatgaatgtcagaaactgttttgctatagaacatcactaattcgacatcagaggacgcatacaggagagaaaccctaccagtgtaatgaatgtgggaaatccttcagcttaagctcagctctaactaaacataagcgaatacatacaagggagagaccct

SEQ ID NO: 777 - DNA, 1623 bp, Homo sapiens
agcaatgcaccctcaacagacccatgggggctcacgagctcccagcaacgcaccctcagcagacccacgggggctcacgagctcccagcaatgcaccctcaacagactcactggggggtcacgagctcccagcaatgcaccctcaacagactcactggggggtcacgagctcccagcaatgaaccctcaacagacccacgggggctcacgagctcccagcaatgcaccctcaacagactcactggggggtcacgagctcccagcaatgaaccctcagcagacccacgggggctcacgagctcccagcaatgcaccctcaacagactcactggggggtcacgagctcccagcaatgcaccctcaacagactcatcgggaggtcacgagctcccagcaatgcaccctcaacagacccacgggggctcacgagctcccagcaatgaaccctcaacagacccacgggggctcacgagctcccagctatgcaccctcaacagacccacgggggctcacgagctcccagcaatgcaccctcaacagactcattgggggctcacgagctcccggtccgaggcctcctttggcagcagggactcaggagggagaagagtgagcccttggccacatggttggtcaaatcaactcctagaggttgtgacccttctctgctgtggccttcaccaaaccacgcatgttgggtggaggggaagtggcctctgtggctgccccagctggcagagtgtggtctgtcctgctctaaactgggtccccagaaggcactgctctccagatgggctggtgagactccttggtgtccagctgcttatgaccagcacagttaggggctgtcgtcagcaccgccactggtacctgcagagccgagtccactcctggggccggctggatcagggtgcagccagggtgtggggcaccagggagctctccgggacccccaaagccagatgcggccctgtccactcgtgctctgtggacggagaaggcagagtcccaggacactgtgctcaggaaagcgagctccagaggaggctgaggagatttgggagtgcccaggacagcctggccctgtgcaggtccatgggaaaaccttccactctcccctttcagggaggtctgggggcttggctgcctctcagcgggccagggcgacttctcatcatttccgcaatggatgcagctctggcctgggggggtggggaggagcctccagccctggcccctccgccccagccctcgctagcggcatgactgtgggtgaacggcggcacctgaaagcctcagtttccctgtctgtgaagggatgcacagtgtcagtttgacccccggaggctgcagtgaggacggggcccaggaggtcaggagagcagcccgtttctggccagggcaccgtggtgtttgtggaacacagccccactgacttcagctgctggggcagaaagagccgtgagaagagtcgatctcccaggggcttcatgtgtctttttgctgcattttactcacacacgaccctcctagtccatgtaagagaagataagtttatggaacaaacccagtatttacttaacttttaaaatataagcttcacagaccagcgttacataaaaa

SEQ ID NO: 778 - DNA, 4732 bp, Homo sapiens
agataccggaggcctctgctgtggctgcccactggctgggcccaggccttgaagcggtggcgaacgtctcttccctaccctacctcggtgactgatggcggcggcggcctctcccagtccggaccctgccggccgtcgggtctcccggcccaagcctgccgggcctggacgaaacccccgccgagcagcctggacgcagcgcctttgggtggcggcgggagtagcgtgccgggaagcatggcggccgctcgaacgccgcgcggcggagggcgttagggcatggagggcccgggaaggcggcctagggacgcaggcaggctcggccgcctcttcaggccacggagccgccagatctgggtcccgggtgaccactctgtcgccattgggcgagacctacctagtcctaacgacaacggacaaaggccttaacgggcctgggaggtgagcgaagtcccgaacgacgacgggtggaacggttagcggcgatcgggcggttggtctccgtactaccagaccttgctgtcggaagagacaaatggtagaatgacaggccacgtttggcccgttggaaatgccctccatcctctgggaagattcacaggccgtttacggaaggcctgtgtatataatatgaaaaagctgctctcaactccaccccaaccttttaatagaaaacatttgtcacatctagcccttctagatggaaagaggttgccgacgtatgatagagttagaaagtcacacatcttgtaaattctcatttgtttaaaagaaatcatagaaaatacatgtcttccggagttgacttttggaaactgagttgttagacggcctctagaagcgatacgttcacgtttgttcagtgggttagatgacatggagctcgaagacctgagaaggaaaaaaagaaggttctatgctagactggtcatatttagaagacattttcatattctatccattgttttgtgtgcattcgcttcctcactactatgtatgtagttgacaatgctaagcttttttgaaatgtctattctttttagatattctgaagtgtctgatatatgttaaaattagaggtagtaaaaccacattttgtaaatatctttttgttacaattcatagaaatgttgttttttggggggaatggccaaatcacctgttgagtaatactcattgtgtttgtgcagtagttcaggggaggagagaggagggggaggtgcagagagctctatgccatcctgcttacagcgaggcaagatgaatcactatgtctgtgcattttgttttatctatgtatataatgtacataaaggacaaacgagtcctaatttacaacatctagtctttctggatgttaaagaggttgccagtgtataacaaaactagagttagtaaactaatatattttgtacattttgttttacaagtcctaggaaagactgtcttctgaaaatttgagcattcttgcccactgggttgatggagatgggaagggttctaggccagaatgttcacatttggaagactctttcaaattataactgttgttacatgtttgcagtttattcgagactgctgtgtacatacatagtggacaaattaactccttacttgaaacatttagactatctagatgtttagaagtgcccgatgtatattaaatgtagaggtagtaaaataccaatttgtaaatatctttttgctaaaattcataggaaatacttttggaagttgaattgtgaagccacctttgtgagcagtatattactgtctatacttgctcaatggtttagaggaggtgggagggaagaaattgcaaaagataatatgctagtgtgttcatacttggacattttcagacaccatttttctgtatgttttgtgcattttgttttgctctgtatatagtgtatataatggacaaatagtcttaattttttaacatctagaggttgccagtgtatgacaaagtagtaaaattagcatattttgtatgctttgtgttgaaattcataggaaaacttgtcttctgtaattgacttttgcataggaatttgttcagccatctctaagcattacacatgcgtgtacttgtccactgaattgaaggcagagaaggaagagaagagggaatgattcaaggccaaaatggtcacatttagaagataccttagatgataaccattgttatgtgtgtgcagttttatttaacagtgccgtgtacatggtggacaggctatgaaatatctagtctttagatatttggaagtgcttgatgtattttaaagtagtagtagtagaataacactttttgtaaatagcttttaaaaactgatgggaaatgctgtttggaagtggatttgttgaaccacctgggaggtgggagggaaaaaattgcaaaaggtgttttgccattgtttattagaaaatttcagcttaatccattgcctatatgttacaagcatttcatttaactttgctatactgtatatattgtgtatatactggacaaatgagtcctgattttataatatctagtctgtagctattaaagaggttgccagtgtatgacaaaagtagttagtaaactaacgcattttgtacactttgttaaaattcatagagaggctgtcttctgaaaaggactttttggaagtgaaatgataacatcagctcgaagtgacacatgtgcttatatccaccaggttggtggtggagaggagttggaaggaatgaagggttctagaccagaatgttcctatttagaagacactttcagatataaccattgttacatgtgtgtagtttattcaacagtgctatgtatatagtggacacacttaagtccttatttgaaatatctagtctttctagatgtttagaagtgcacaaagcatgttaaaagtagaggtagtaagtaacacattttgtagttattttgatatgaaatattgtcttggaaattgatcaattctctgagaagtacacgttatgatatttgtgctggttcagggggaagaaggagcacaaagttcaaagggctttctaccagtgtccagtgtgtttatgatgaggcacattgaccattgtcccttatgtctgcattttcgtttactgtgctgtgtatataagcagacataggagtcctaatttatatctagtcgatgttaaagaggttgccagtgtatggcaaaagtagagttagtaaactaatacattgagtacactttgtgttaaaattcataaggaacacttcttaaaaacagaagtaaaattgttaaacgccccccgcccccaagcattacagatggcttatagctgtcaacggggttggtagaggtcagaaagggaagtgttctaggccagaatgttcctatttagaagacactcaaattatagtctatgttatgtatatatgccatttattcaatactactgtgtatataatggaaaacttaagtgcagtttgaaacatctagtctttctaggtgtttaaaagtgcacaatggtcaggtgcggtggctcactcctgtaatcctggcactttgggaggctgaggtgggcagatcacgaagtcaagggatcgagactatcttggccaacatggtgaaaccccatctctacaaaaaatacaaaaattagctggtcgtggtggcacatgcctgtagtcccagctactcgggaggctgaggcaggagaatcgcttgagcccgggagacagaggttgcagtaagccgagaccacaccactgcactccagcatggcgacagagcaagactccatctcaaaaaaaaaaaaaaaaaaaaattccacaacataggttaaaagtagagggctaaagtaacacccctctaagcatttgttttcagtacttcctaggagtggttgcatttgggaatggaattgttaaaacttgatgcttaggagcgtatgctgactattcactgcgtggtggggtggggaggaggaggaggtatgcagggagaagggttctgtgcccctgagttagattagttcagatggtctaaccattgttctatgtatgcattttattgtgttaatattgtgtattaaaggataaacaagtcttaatgctcaaagtatgttaaaaatagatgtagtgaatcagtccctttgtgaatgtcctattgttagtttttaggaaggcctgtcttctgggagtgacctttattagtccacttcttggagctagacgtcctatacttagtcactggggatggtgaaagagggagaagaggaagggcgaagggaagggctctttgctagtatctccatttctagaagatggttttagatgataaccacaggtctatatgagcatttttagtaaagtgcctgtgtttattgtggacagagtttattattttgcaacatctaacctttatgaatatctgaggtgacaatgtgtgataaaaactagagctagtgggccaggcgcggtggctcatgcctgtaatcccaacattttgggaggctgaggcaggcagatcacaaggtcaagagatcgagaccatcctggtcaacatggtgaaaccccatctctactaaaaatacaaaaattagctgggcgtggtggcgcgtgcctgtagtcccagcttctcaggaggctgaggcaggagaatcacttgaacctgggaggcggaggttgcagtgagccaatattgcgccactgcactccagcctgggcaacacagcaagactccatctc

SEQ ID NO: 779 - DNA, 3897 bp, Homo sapiens
gcggggtctggtgccggggcctgagtctctgctggctaagccgacgcctcagccgcctcagtcgcctcaatctcgccttccgccctcgctctccctccgcgccaccggaccccgtagccccgcgcgcccccagacctttaagccagatgatgaacttcctgcggcgccggctgtcggacagcagcttcatcgccaatctgcccaacggctacatgaccgacctgcagcggcccgagccccagcaagcgccgacgccgccgccccccggcccgggcgccgcctcggcctaggcggcgcccccgaccgcctcgccgggaccggagcggacgccgccggccgcctaggcgcccgcgccgtaagacgcgccgaagaccgcgcccccccccccgcgcgaacaccgtcggtgggcagcagcttattcagctcgctgtcccaagcggtaaagcagacggccgcctcggctggcctggtggacgcgcccggtgccgcgccggcagccgccaggaaggccaaggtgctgctggtggtcgacgagccgcacgccgactgggccaagtgctttcggggcaaaaaagtccttggagattatgatatcaaggtggaacaggcagaattttcagagctcaacctggtggcccatgcagatggcacctatgctgtggatatgcaggttctccggaatggcacaaaggttgtccggtccttccggccagacttcgtgctcatccggcagcatgcatttggcatggcggagaatgaggacttccgccacctgatcattggtatgcagtatgcaggcctccccagcatcaactcactggaatccatatacaacttctgtgacaagccatgggtgtttgcccagctggtcgctatctataagacactgggaggagaaaagttccctctcattgaacagacatactaccccaaccacaaagagatgctgacactgcccacgttccctgtggtggtgaagattggccacgctcactcaggcatgggcaaggtcaaagtggaaaaccactacgacttccaggacattgccagcgtggtggctctcacccagacctatgccactgcagagcctttcattgactccaagtatgacatccgggtccagaagattggcaacaactacaaggcttacatgaggacatcgatctcagggaactggaagacgaacactggctctgcgatgctggagcagattgccatgtcagacaggtacaaactgtgggtggacacctgctctgagatgtttggcggcctggacatctgtgctgtcaaagctgtacatggcaaagatgggaaagactacatttttgaggtcatggactgtagcatgccactgattggggaacatcaggtggaggacaggcaactcatcaccgaactagtcatcagcaagatgaaccagctgctgtccaggactcctgccctgtctcctcagagacccctaacaacccagcagccacagagcggaacacttaaggatccggactcaagcaagaccccacctcagcggccaccccctcaaggttgtttacagtatattctcgactgtaatggcattgcagtagggccaaaacaagtccaagcttcttaaaatgattggtggttaatttttcaaagcagaaattttaagccaaaaacaaacgaaaggaaagcggggaggggaaaacagaccctcccactggtgccgttgctgcgttctttcaatgctgactggactgtgtttttcctatgcagtgtcagctcctctgtctggttgtttacctgttcctgttcgtgcttgtaatgctcacttatgttttctctgtataacttgtgattccagggctgtttgtcaacagtatacaaaagaattgtgcctctcccaagtccagtgtgactttatcttctgggtggtttgatagtgtttttaaaagtaatatataatgtggggtgaaatgggagtaggggggtggacaggggagaaacgaaaaccacaaaaagaaaacccaactcctctcctccccccaagctcagttaaatcccccacctccaactttccctccaccagtgtgcttgggatcttcaatgaactgtgcttttcgctttctttctgcatgactattgtaactagatagaacattaagagattttcaagatcaaacttccatagcttcatccactgaatttgaaggcatccacctttttctccatttgctaaaatttggtgcagtttgagtttatgtgaataggctggctgtgcctgtagagctcttgtgtttttagtgatgacatgaaatacaaagaacaagctatttccaggaatgtgttctgtattttacatcccagtgtaccctttattttattattaactaattaactatgagatttttaaaaaatggggccgctgatgtgcaatatcaaagtgaacttgtgagtattttgtgtgtgttgatctcagttgtttcttcattgttgctgtttctggatccagccatgtgtgcgcttgtgtggacctgaggctgctttctgttcccaaagcttgacctgtgtacagagataattccttggcaatgttggacatagaatgcagggagctactgaaggtctgtcagggatttgtccattctgctcttggcctctcctgaggcctcataatgggagaccaaatcaaaaatgtcccatgtcacttgagtgggtacactgcctacagaaccttgaggttgactcctgcttcagttctcagctgtttaccacagccctccagggtccaaagattgaggagctttctctttcctgggaggaactgtctcagatttagcttgtgtgtgttttggacagaggctccacagcggtggctcttgaggaatcctcaccagtttgttctcttccctctgacaagcagcacctgagcagatgctgaggcagttcattaaaccaggcctcagcttcagtgcctcatcttgccatctcccggccaggctgggaacgggcaccaagcagccgcctctaacaaacaccatggtccgtggaagttcatgccagcagcttgcctttgagaagaaatgctgctggctctatttttacattcccttccacctctatactgtcatgtcaccgttctgaactcccagatctgagaaggaactagtgttggtggtatgtaacaagagttacgtatccaggggcttgtgccttggtttctcctttgattgctggtaaattctgaggccacagagaaatgcattgagtgtgaatgttgtcatctgtaatccctccctcagctgataatggtagttgatctgttgtaaatatatacatatatgcatatttgcacttccagatgggttgcataagaatcaggtccttaaatacctcccaatctgatgaaacgatagaataaagtaacatttcccagaatggaggaatacattattttatcgtatatttttgtccaagcgatgagctgacggtggtattgcttctctgcatgttatcagtgtgtacatctggtgcttttcatgtgtcatttgtgagccacaaatgcaaagttgccatttgaattcagtcaggctacagggtggtgtcagtcaaggtctttcaggtgggggagaaattggttagggctcccactgccaaatgcaagcagatagcataacctgactgttatgtgccctcaggcagcatgcttagggacaactctgtggcctgggggacatctgtgtcacagtataggattgccattcaggtgttttgtacctatttctttcctgacgttgtcccctttttttgtactgatccaactgggagaacctcagccaatgctggaagtatgattgaagtacctctcttttgtgactcttgtacagcttaatgtgcaataaaggaaaagttatatctgtc

SEQ ID NO: 780 - DNA, 697 bp, Homo sapiens
atgatcgcgttgctcgagctgccgttggaagcttagaagcaggtgctaccgtgctagatacaaagcgatctatttaaaagccctctgtcacgcacgcacacttactgacgaatcctctggctctctcctaccaccgcccggtggcggattccggaattggttcaaaaggccttgatcccgaacacccaggacagagacagagtacttttcctacctctttcgcctgcatccttagaaaactcccgtggatgagaagatccccaggcctttacaagctgttgttttacaaaaggagaaactgaggcaggaagaggcggtggatgtgcaccagagcacgtggtgcgtcggtgcaatagctgagggcacatggaacattcaccaagataaaccatatgctggaacataaaatttatggatgtcacccatgaagcagagtccttcagaccctcaatcaaaaacaagtctcattttacattaaattggaggactatctggagtctctgaccaccgtgtgacagaaaagagagcagaattgttgcatgatgggtaacactcatcagtaatcgctgtttgccaagccatctgggaggagaccaaagagctataaaataagttcaggcacggtggctcatgcctgtaatcccagcactttgggaggccgaggtgggtgaatcacctgaggtcaggagttcgagac

SEQ ID NO: 781 - DNA, 1273 bp, Homo sapiens
gccgagacaggacaaatatttgagctctggagtttgagaccagcctgggcaacagagtgagactctgtctctacagaaagttttaaaattagccaggtgtagtgacacatgcttgtagtccccattacttggaaggccaaggcgggaggatggcttgagcctgggaggtcaaggcatcagtgagcgatggttgtgccactgcctggagatagagtgagaccctgtctcaaaaaagaaagaaagaaagaaagaaaaatccctaagacctgacctgcctactccctagaaagcaccaaataaggaaaagcactccggaagaatgaagctaagaaggctgtgctctctgaggcatccgggcagccttcactggagggacaaggtccagtgggaccttcttactcaagatggcttcaattccaatcaccagagagttttgagaaccagtgggaggggttcctgggcagcggggctctgctcctaccgggatttgtttattcagctgatgttaataaatgaagctgaaggtaacaagctgtcacttagcatctccaggctggaccagaactgccattggttaagtttcagacttcagccccaaagtacagtgtcaccaccttggatgaaggatattaattagtgtcatgagggagatcacagtctcattcccctccgtcactagcacgagactgaaaaaaaaaaagaaaatcaaattcagttagaacagagacgtgctgagaagctgggccagagaccccgcggggaacctgccgttgtttgtcaaaaaacgaggccagcgaggaagaagccaaccatgcctcccgctccactcgctttggaacccacagaatgttcaacagggcagcacctttcagttattaagacactcagattccaccctggtgcagtgaagcaaactggattaaccacgcggcacgtggcagagccacagcgcaaaccacggctcctgctgctgaggaaaatacaggcacctcggccactctgggctgtgggttcgacgtgagcagcctcagggcagagacggattctgttcatgtctgtcccctctgccatcccaggtctcaggggttctgttcacctgaccatggcagagttgttttgcccacctgtgaaaaccactccaaccatcatggttaccattgcattgcatgttggcaaatttggggaacatcaccttccaggccacttacagcactcgaataagggctttgacaaaacacaagcgttattatgaatataataataatcagcgtta

SEQ ID NO: 782 - DNA, 979 bp, Homo sapiens
tttcgaggtaggagtcgactcctgtgaggtatggtgctgggtgcagatgcagtgtggctctggatagcaccttatggacagttgtgtccccaaggaaggatgagaatagctactgaagtcctaaagagcaagcctaactcaagccattggcacacaggcattagacagaaagctggaagttgaaatggtggagtccaacttgcctggaccagcttaatggttctgctcctggtaacgtttttatccatggatgacttgcttgggtaaggacatgaagacagttcctgtcataccttttaaaggtatggagagtcggcttgactacactgtgtggagcaagttttaaagaagcaaaggactcagaattcatgattgaagaaatgcaggttagtttaaactttgaaggaaatttttaaggtggcaaaaggttttggtggcatatacaccttaatctgtagatgggagtgattagctgtttaaaagttaaaatgtgactgagaaggaaattgagtagggcaaattttaaatgggtattatttttcatcttcaaacaggcagacctgttatcctaaactaggtgagtcagcttttggtacatgtgatgattttcagtgtaaccaatgatgtaatgattctgccaaatgaaatataatgatatcactgtaaaaccgttccattttgattctgaggttactctactaacaagcatcacacatttgtattttgccctgattaatatgttggcttcgctttcagggtttttaatgaccacaacaagcaagcatgcagcttactgcttgaaagggtcttgcctcacccaagctagagtgcagtggcctttgaagcttactacagcctcaaacttctgggctcaagtgatcctcagcctcccagtggtctttgtagactgcctgatggagtctcatggcacaagaagattaaaacagtgtctccaattttaataaatttttgcaatcca

SEQ ID NO: 783 - DNA, 560 bp, Homo sapiens
gttgtttatgtaagaatttcaaggccacaactccatatttgaagtaaagtgctcataaaattaattgcaaggaaatccatcactatgattcagtaagtaaacaaattcaaggtgtcacatcatattgctttttatgcttttgattttagtaatatcctttcacattcataatccagatagagagataagcaagattgtatccaccaagcctcctctttattgatcttccaaactgaaaaacatagctgccattttagtcagcagttaaactttattatagaatatttttataccttttctgctaacattacctgcaactcccatggtgatgctcaaatcccatttgggaattcagtgaactagcagaatgaaattctaagagactggggcttgttgatgtgtccacgctttccatgggaactgatgttaaatatttcacaaataccataacttccaggaattcacatattctttattgaatgtagaattgtgaaatctttaagaaataactgaatcattatttcttcactgtctcctgcctgtgaaagcagaactatgaa

SEQ ID NO: 784 - DNA, 1587 bp, Homo sapiens
agaactataaactgactacacagctccctggcccgggaaggctatgaaacaggcaacatggacaatttaaaggtgtacaacatccgaggttccatttcaccctcaggcagcacggagtggacaagagatggggtctcactttgtcacccaggctgggctcaaactcttggcttcaagcgatcttctcgccttggtctcccaaagtgctgggattacaggcttgaactactgtactcgactgacttttcctatttctaatgtcagcatgaagaacacaagaagtcagcttcaaaggcatccagcaatatcatctattctccactttgctaaatcttacctttggcagagccttcatgaacaagattggtacccatataaaagaagcccgagagagctatcttgaccctcctaccatgtgaagacacaacaaggtaccgtctatgaaccaggaaatgggccctcaccagacacctaatctgctggtgccttgatcttggacttcccagcttctagaactgtgggaattaaatttctattgtttataagctacccagtttacactactttgttctatcagcccaaaaagcacaccctgtttcaagattctgcattcatttactcattcatacattcaaccatattttgttgggcaccaatgatgccaggcactactctaggtgctcaggatacaataattaataaggcagacaatgccctggcttcatggagataaatgtgttgatgaacaggaagtagatagagtggtcagagaaggctggtggagagcacagttgaccagagatctgatggaagtgagaaagcaaactatgggaatatctggaaaaagagcattccaggcagaggaatgagcaagtggcaaagatcctcaaatgcctatacttccatggaagaaggccagtgagtgaggaaaagagaggtagcaaaggggatcagagaggatacagggatccagatctcaaagggacttgtaggtaatggccaccactttggacttcatgttttcggagtgacggaaagtccctacagcctttcccagcccctagctaagcctctattgattacttctccttcttgtgctcttatcacctgtacttttatttaccagttagtctatattccatggatttctattcatctcttgtgtatcaattctatgtcctcaactatgtctcaacggcaagaatcagtcatattctcttctgtattcccagggcctggcacctaacagatgctcaataaatctttccagaaggtgataatgatgatgtaatctcttagaatcttttctagctgttaagatccatgatgcctttgaactctctcaacaaactagtttgcacaatgactcagaggactgacatctttctagatattttgagattatattcatgccacttttagagtctccatccatcaaatgactagaatgaattacatcagagttttgtctaaatgaaggctgtgccacttggaatgggattcccttacatggaactacctactaatatttgcactttaagccacctgaacctcaggagagtaataaattgctattaaataaatgct

SEQ ID NO: 785 - DNA, 1385 bp, Homo sapiens
ctaaggcatgcatgttgttttaggtgtgtttgagatgcctgaagaacatcagtgtatccccctaatttctgtcatgttactcaaaccagacacattgtggccatttctttttcctttatcattcccacgtccggccactgccccattcctttttgttccgtagtagaccctcaatatatatgtgtgtgttggtaaatggccatacacagcagggtattttttattattattttcagttccctcagcgcgtttaccacaaagctgtgcatataggtggcaccatatatggcgtaccttgacctcgaagagaatctacatggacttttatggacctacgtacacaattttagaaatcataataaatgaatgctggagtcctcaagaccccttccagatttgatttgctaggaagactcacaggactcagcattttgtcatactcaatggctatgatttaccacaccgaaagaatccagagcaaactcagcaaaaggctcaaacccaagtccagaggaaaccaggcacaatctttgagaatcttaatgaaatcacacaggatgtgcttcattgaagctccatctgggacttaaaacaacacacgtgagatgtgttccaggaagtcgtcttgagcacccattgctcagagtttatattggacttgctttctagcacataccacaattgtagacctccagaagaacaggaggtgttcagcgtaagacaatttaggcacacggagctacttctcattactgggaacaatgggaaacttcccaaaacctaaagtacagactccagccaaggatgaaccttgcaagatcaaagaatagcagtctctggcctgctctgttctctttttcacagtaacttaaatggaaaaatgctgagttagcttaagtttctgtaacaaacattaagcaaataaaattttctataacagaaataagccatagctttgagatgaaggcttatatacgtgtaaaccattgtaaccaagaaaaaaaaaaaaagtcagagtcacagtgaaaatacttaacaaactagccaggatttaattcagtgatgacagggaacagaggaagtcttgtgagaaaggatcttgcctctgcctagtatctttcacagataggcttcaagtggtttgatttgcagatacaccctttcttggcctttatttcggcaaagatgtgatgggtaggtaaatgccgtgttctttccctagcacgtatgtcagtttctcatccactctttgttcttgctattgaaagttgtagcttctggctacaacagagatagttgaagaatatggagttcgccataatttatcattaaatgtggataatttgagattaaagaatatgttgttgcaggcttagtcactttga

SEQ ID NO: 786 - DNA, 532 bp, Homo sapiens
gcagcgcagggccccgaggacggcctggcccggagaaaagataccgaagctccaactttccccaaccccgctcccctcctccttccaccctcccttcccgcccccaaagctcgggggtcctatccctcctccggtccgcggagtctcccgaaccctgcggggacccggcgctcggcggtgccctcctggggcgcacggggctggggcgggagcgaggagaccaggtggggaggggaccccagatctcagacgccaggggagacggcgtttcccgctgttcattcaggtttgtgccaaaaggagcctcacagatgcagtattgggtttggtagactcaaatcgtcttgttttaatgtaaatgaaatccttcgacccaggcacgagcgcccatcgcggaggccacgatgcccgttttattccctctccacggcaaggaaaagcagcgaaatctgaggtcttcagaggttaaccctatctaggagcagaatgtgacgcattgtaaacaaataaatattgaaaactcgatgttaaa

SEQ ID NO: 787 - DNA, 2178 bp, Homo sapiens
atattgttaaaatggccacagtgctcaaagtaatttatagattcaatgcaatccctattaaaattcaaattacattctttatagaaatagaaaagacaatcctaaaattcacatggactcacaaaaggcccgaagtagccaaagcaatcttgaacaagaagacaaaagctggaggcatcacacttcctaattttaaaaatatattacaaagctacagtaatcaaaacagtatgctactagcataaaaacagatatatagaccaatgggatggattagagagctcagaagtaaacccatgtatatatggtcaaccaactgggaaggtgccaaaagcacataataggaaaaagatagtttcttcaataaatggtgttgggaaaaactgaatatgcaaatgcagaaaaatgaaaaaataaaattacaccttcatctcacactatatgcaaaaatcaactcaaaatggaacacagacttgtatttaaaacctgcaaatataaagctactaaaagaaaacatgcatatgagcttcttgacattggtctgggcaataattttttgaatatgacatcaaaagcacaagtaaaaaaaagcaaaaataaagtggaattatatcaaactaaaaagcttctgcactagcaaaagaaacaatcatcagagtgaaacgcaacctatgaattgagataaagtatctacaaatcatatatctgataagaattaatatccaaaatgcataaggatgtcatacaactcaatacgaaaatgacaaataatctgattttttaatggtcaaaggatctgaatagacatatttccaaaaagacatacaaatgcaaaaaaaaccaggtttatgcaaagtgcctaatatcactaatcatcagggaaatgcaaatcaaaatcacagtgaaatattacctcgcacctgtcgagatggctgttatcaaaaagacaaaagataacaaatgttggcaagaatgtggagaaaagggaacccctgtaaactgtttgtgggaatgatagttggtacagtgactgtggaaaacagtgtggaagttcttcaaaaaattgaagatggaactaccttatgattcagtaatcccaactctgagaatacatttatctctccaaaggaaatgaaatcagattgtcaaagagatacctatatttctatgttcattgcagcgttatacacaatagccaatatatggacaaaatgtaaatgttgacaaatgaatggacaaagaaaacatgatgtgtgtgtgtatgtgtgtgtgttgtatgtgtgtgggtgcatgtgtatacaggcagagataggatattttttaaccttaaaaaaaatcctgtcatttgtacgaaaatggatgaacctagagcagattatgctcagtgaaataagccagatatagaaaggcaaatactgcattgttacatttatacattaaacctaaaatggtcgctgtcatagaagtagggagtagaatggtggttgccagaggctggcaaaaggggaaaattggtagatgttggttaaagggtacaaagtttcagaattgcagacaaataagttctgtagagctaatgtatagcatgctgacaacagataacaattctgtattgcatgcttgaaatctgccaagtgggtagatctggtgttctcattacacatgaaataaatagtaaaagaagaggaagaggaagaagaggaagaagaggaagaggaagaagaagaagaagaggaagaagaaggaagaggagaggaggaggaaggggggaggagggaggaggaggagaaggaaggagaaggaaacagaaaggaggaaatgacttggggcaggtgatggatgtgttaattagcatgattgtggtgattagctcacaatgtgtatgtatattaaaacatcaagttgaataccttaaatatatacaacatttatttgtcagttatacctcagtaaagtcaaaaagtcaataggctacaaaaattccagagtcattatttttaaaattaaatttacaatgttttatcaatcaatacatgaatacatcttaattttatgtcactgtaactagtactattctaggcagtaataaaaatagtattctagtactattctaggagtaacaaaaatataatagaaaacaaagaagatgaatgtaacacttgggaaatgagcagactt

SEQ ID NO: 788 - DNA, 594 bp, Homo sapiens
tttcacatgagctccgattttcttaactctccagaaggacttcagaagcctctggagttttgagacacggcctctctctcccttctgcttggagacaccttcctgggggtctccactgcattccccgccggtattcctctgtggagccttgcgccctcaggtcccagaaatgggctgtgtgggagcttccagtcagcctggtatctcgggaccttctcagccaggaaatgagactgcacaaagccctgtgaggcccagctgtgttatttctccttccccgacattgcataatcactgctgacacagcatttggggaagatttaacgtcttgggccagcagctgccatctggaaccatcaccacatagcagccagcgtgggagaaccaaacatgagacacaagcatccccttgagctccacagatcttgcgccttgctctcatcaggcatttccttggaaaacagcagtcagcagctcatggaagtgagcccggtgcacagactttgcatggactttgcacaggttccatttccatcgtgtgcagacacctgtatctttgggctccacgtgagcacctgccctcttcactctgat

SEQ ID NO: 789 - DNA, 216 bp, Homo sapiens
aagactatactttcagggatcatttctatagtgtgttactagagaagtttctctgaacgtgtagagcaccgaaaaccacgaggaagagaggtagcgttttctcctgagcgtgaagccggctttctggcgttgcttggctgcaactgccgtcagccattgatgatcgttcttctctccgtattggggagtgagagggagagaacgcggtctgagtgg

SEQ ID NO: 790 - DNA, 4302 bp, Homo sapiens
gaggccaggaccacgcctgactcaggcgatcggacgggcagggaggctgcaaggcatggcatgagcaggtggagctgtcaggactgccccagcccctggctcaaagatgcccgaccccaggaccctgcctcgctggatggtgaaggccaacttcccctctgttggagctggcctgggcgttgtgggaagggctgggaggaggcccaggacaatgcagaacagacaggacgtttcacagagcaggctgccatgtccctcggggccttgggggctgctgaggccctgagaaaggtcactggaggcctggccggaagtgcagggttatctcagtacttgatttaaggctcctgcagctgaaaagctgccccacacggcggaccgggtggaggaagtcagctgtgctgcttaaccgtggagtctccgtcccggtcctgctcaccagctctgcaaaggccttgtcctccctgcctgattctcggcaccatttttaacacgcctatggagaggccacgttgagtccagaggtccgtgcgcctcatggccacatcacggcacccgttcacccacacaagggccaggagcatcccctagggaggaggagatggcagatctgcacaggctctgcgctcctctctctccggagcgtcctctcctctgtgtggcaggctcggcgcgtgatggaggagccccttctgcagggctctgtttagagggtgcccgccccacagcctgtggctgctcctactcatgccagaacagaaatgggtgcccagctggtcaacatacatttgttaccttgctttaaaatgccttgagagtggaaccaccggtgcaggcttggctggtcaagaatcatgttctagaaattatttccagtgctgagcacagtccctgagatttaaaaacgcttatgggatgaatggaaaatagcagggcctcttaccggcctgcaacgcctttagaggcacggatgccacgtgcacagacccagctccgggaagcacaagcctggtggtgtgcgggaagcggcgaggtgcgcgggaagcggcgaggtgtgcgggaagcggcgaggaccggctttaaagtcacagcagtttcctgaaagatgagggggaggaggacagtgacgctcacagcacagccacttgtcaacttggacatgacacacacaaagcccagagctcggacggcaccgcgaggaggctgggattcacgtcaggcggcacttggtgggcagttacaagaaaggacggcagccaagccagtgcctcctgtgctccggctctggggccctggacacacctggggattcagttttgcatggaccagcattctccaagcgctctgatcagtcttacaggagaagtaggctgtgtggtctgggagccttgagaaggttccgctgtaatctgtcagacttttggacaggatttttctgccttacgtggctgatgtacgtctgcaggagggtagcacacggcaccctctcggcctgctgtgccacaaaacctttgcttttacaggtctcacggagccagtgggctgcccaatgccccagtgcagagtggagacgaggtcttcccctccttcccagcttgcctgggcggcgacgcgtctcagagacctctgccagggtcaatcctggcccatgctactagctcggggtgtgaagtcacagttgatgctgaacacctggctgggccagacttgtgcccaagaaaccttataccaccaactggttttcaaaagaaaaaaattaaaagtaattcaaaactttgagatataaatataattctttaaaaactgcagcgtggttcactggccctgtgatgggctgaatgcgcccccaagttcatgtggcagccttgacccccaggacctcagcgtgtggcgtcttggagacaggggctttacagaggcgatgaaggtaaaacaagctcttatggcgaccctgacccagcaggaccggtatccttatcagaaagggatatctggacacagagacagacgtgcacgtgtggagacacctgaagatgaagatggcatctaccaggcgggggagtggcctcaggagaaacgggctctgcccacgcctcgacctcggacttccagcctccagagccgtgtgaaaagaaacttccatcatttaagctgccctgtctgtgggactttgcctcggcagcctgagcagacagtacaggctccaaaaacgctctctgcatgtgtgattctggccaggaccaccctgcccgaagccacggctatgtcgaagctaattgtgcgatttctgccggccacgtggttttgatccaaaagcatttgaaagctgctctgaagatgcagaaaagctgagtcccggcatcgctgctccttccaagcgactgttcacacacagggtgtgagtgcgtccccccatccagggtccagcctggcctaaggctcactgggcaccatccagatctgtgactgggtccccccatccagggtccagcccacccgaggttcactgggcaccatccagaggccccagatgccgacacctggggacgggctgtatcaggcagatgtttcctcccgggctccacctggggacgggccccggatgctgacacctggggatgggctgtattaggcagatgttcctcccgggctctagttttccaggccgacaggaggaagtcctgttggggccaggggaggcattggggatgagattgagaggatggtggggtcgcaaaggtttacattgcctgtgccactttctccaaggtctggggccgccaccctgtggtgcctctggaagctgccatgtggggctggcccacggtgactggccacggcggggctgtgtgtggtatgcacctgtgagctgctgaaacgcagcctggcggccaggaaccagctgccccatcctctctgcaggaggtcaggtttgagcacgtattccctcaaacgctcatagacgtcagtatctcaggacaaagtgcttgtctgagacccaggtttgggccccaaggtggtaccatcgagggaggcatgttctggcaggtgacagcccctcctctgtgcctgaacctgcagtttctgcccccgcataaaatgccgccatctcaggccctccctgacccccaacctgcacaagggctcacagctggcaggcacctgtgtggggtcgtggtaggacctgtgtctctgaggtccagcccaaggctgtgccacataggcccaaatccaagcactcccctcctgggcacgtggctgtgtgtgcatgtgtggctgggtgggcaggggggttgactctggccaccgaaatggagaggagcggtgcactccctgggtctggcccacgcaggctccttcccaagtgctgctgccgggaaatggaggtccctaggtgagacgggagccgggcactgtgggggtggcccctgaggggctgcaggttggcactgcccagctgacgcattccgcagtcctgcaccaggggatgaacgaggaatcggcttctgctctgctgaacatcccactggttcatgtccacttgtttgggtgatcctaactgatctgctacctgagtttgaatctcagcgctattattagtcaggggtcctggaggtgggtgaccccacctcacctaaaccacagagatgctcatcctcatgcatgcacacgtccatctcagcttcagctcgcaagcaggaccctcaccgtggggccacgacggaccctgcaaagctggtctgactgtgccgagcctgtcgggggttgggggaaggaaggcgggagctcggcatctggagggcagtggagaccctcagcgagtgccaggaggatctgctgtcttcccagtgttgtcttcacagtggagagatgagttcacacagccttatctgtgtttccagtggcctctgtgtgcaagacgggccacgggttttgtgcggtatttgcctgtgggtcacagccaggtgaatgggccctcctggggctgcagccccaggtcctgatgttacttgtgccagcctggccacagtgcccggcctccagaagctgctgtcagaggagcagacgggagggcagggtggacggttaacagggtcaaggccccagagccccacaccctccccagcagccagcacaccctctgttctgtgacctcgcccctgcattgcggcaactgacagatgctccccggcctccttccccgctgccgcgcaacctctgacagccacgtgtactctcctgctttagaacaaggacctttcccttttgtgcatgaatacgctctcagcagatgcgagaaaa

SEQ ID NO: 791 - DNA, 719 bp, Homo sapiens
ccccttgaggttatgagcgcccatagggaagatgttgccactgtacgcagttgggagaagaaggacctggcacatgaggaagccaagtagttggatcagccctctccatcatggcgtttcccacacctctgattggactggaaactccctgaaaggaggaagcaagtcagattcacctctaggtccctcccaggcctggagaggctggcatgctgttggcactcactgactgcctggtggccgactggctggatggaatggtgacctgtgaccagtctgtctctctcctcagctgatctgagagttcctggaggccagggactgtgtttgcctcacctcggcacctctgtgcctggggcagaggaactgctcaacaagttctggttgaacaaatggagggaacactaagagcgaataattattaagcgcttactgtgtgcgagcagctgctgtaagcaatggacactttatctcagtgaaccctgcagagggttccaatgagggaatggagcagacctgatctaaccaagctaggggtggggaggtgcccggtggtaggtgccagcagacatgacaggcactcccgcacatggcaccacagcaatgctgtcaaggttgcccgtggaatctgaaagctgaaacactcatctttatatacagagttggccaaagcaagacaccagcaaatcagtttacccaaaaatgtgcaaacaagattt

SEQ ID NO: 792 - DNA, 1536 bp, Homo sapiens
agttctctcgcgacctctagccacttccggttgctaacggttcccaaacagcccccgaaaacgctacgtgagctgggccctgggccagaggcagaaaacggacggaagaaaaggtctggccggagatgggtctcactctgtcacccagactggagtgcagtgagtggtgcgatcatagcttactgcagcctgaaactcctgggctcaagtgatcttctcgcctcagcctcctgagtagctggagctacaggtgtgagctacccagcatggctcatttgagatttctgagtagagaagtaacatgattaaacttgggtattgagattattattttggctgctatgttaacagtagacttgaatgtgaaggggttgggcaagggcagaagcagggagacaggttggaaagttggagtgggaagggcctttttaagaataacacaaacccctaaagacataaaactgaaaaggccatggaggaaaagataaatgaaactggccttgtaaaattgaaatatttgaatgaaaaaagtaaaaataaaatataaactaaaagtaaaatatgccacacatctaaaagacacagctgattttcctgatatacaaagaccttttatcttaccaaaaaataaaaatatgaacaagccaatagaaaaatagacaaagtacttaacctgcatgcatttattgtcaggcctctgacaatatgatactaagccatcatagcccctgtgaccgccacgtatacatccagatgacctggagcaactgaagaaccacaaaagatggcattccaccattgagatttgttcctgccccaccccaactaatcaatcgaccttgtgacattccccctgcccccgacagtgagtctcatgatctccccacccagcaccttggcaccttgtgacccccgcccctgcccacaagagataaccacctttaactgtaattttccactacctacccaaatcctataaaactgccccacccctatctccctttgctgactctctttttggactcagcccacttgcacccaagtgaaataaacagccttgttgctcacacaaagcctgttggtggactctcttcacacagactcacttgacatttatagaacacaaaattaagaatagtgaatatgaaaaggttcactaataagaatttaaacaaaacaagaaagatttttaagattgctaaagacaaacgatttataatattcagtgttaggaggtgtgtggatatacaggcatacttagttttacatttttagaaggtaagacttatttagaaggtaagaagttgtccataccccttgattcaacaacttagcttcttggaattatccatatagaaatgcttacataaatgtttgaacgtatgtacaaagaagcactatttatttaaattgggaaacttgaatgcctaacatttggaatttaaatttttatatgtctattcattaaaataccacccagtttttagaaactaagagatgctaaaggtatattgagtaaaataaaaagttacaaaa

SEQ ID NO: 793 - DNA, 475 bp, Homo sapiens
attgtctgaagcggcactggagacccaggaaaaatctcgctgaatccgcctgccccagcagcggcctgatctgggttccgctgattcctttcgtaaccgcaccacacccgaggagctctgatttgaggtgacaatgattttgaaccttaaattctttggaaagactcagaatgaagtccattgtggaggctcagaaaaacaatttcctgggaaatgaagcagtatttttatagagagaactgtatacatgtgaaagcttattcatcgttggtcaggcaagagaccctccaatgactaaataaacctgaatttaagtcagaggaaagaaattacacagatctctatttactgggtggccttcaaatatatcatgtcctcataaacaagatcaagggagggaacactatcccagaagaggttctgtctgtaatcttctcagtttgaaaaatactaaataaagaggtattccactgtt

SEQ ID NO: 794 - DNA, 727 bp, Homo sapiens
ttgtattgcaacttgctttcttttcagttaaagacacagtgtatcttggatagttgagtgatttgccatgcatgcaagaagagtcttttatttgtaacaaagtcttgcagaaatagacacaaacgacggagcttgcagagaaaaatgtaaaaaatcctttccttcccttatcagaggaaccctgagaaaccagtatttgaggctgacgatgacagcagcccccaccgattacgagctaactgtgaccagcactgccatgcatgtatcccatcactcagtcctcatatgccgctaggagactggatggccatttcacgagcaagtaaatggaggcgcagccacgtcacgtaactgcccacacagctagtaggtgcacagctgaaattcaagccttggcagtggtacccagagtcccagcttggaacatcactgtgatacaaatggggctttctgtggttatggctcagggtaggaatcagatgcggtttagcttagggaaagacaactcttagctctgtcactgcctgagccgatgacagcacccattctctagggactgggcatgtgcctggtacattgctgcattgtcagaggaagtgtgtatgtgtgcagggggtgggggtgaaggggcagggggtcatagggaagacacaggtgttagggtcacaaagacctcagtttgagtcttaaccctaatgtaccagctgtgtgactctgggcaactttt

SEQ ID NO: 795 - DNA, 227 bp, Homo sapiens
caccaccaatttggatctgagatcagacataaccttgccataagcagcaaagggcttggtgaaccctcaaaaaggctgtcaaacacccagaggccttggggatcaggaaggagctatcatgtggtctttcataaaaaactggttcacccataccaagcctacacatttcagcccatgaggatggagaaaaagaagaaattgatgacagattctatcatcacaaaagg

SEQ ID NO: 796 - DNA, 1641 bp, Homo sapiens
attgcccacagccggatccacggtgactaatctccgggaaggcgtccagcgtgagccgtgaggcctgcacctgcgccggacttcaccactcaccaggagtctctgcccgccgcccccagcgcggttctcttccctgctagacgtaaagtcctggggacaagcacagcccagggcactttctggagagaagatttcgatggggaaagataagagagcatttggatatctacgcactgtcaacagaaatgaggcttcaggccaaggcttctaaaatgcaggattcccaaagtggcagtcacataagacgggtccctccatcgccttctagaatattgagaagatcatcacgcctgggactggctcacagcactgatctttttcttgttagcagagactccaggaagcagatgagcagacctatgggcctgctatgtgcaccgcggcccacactgccgcctgcctgggatcctgcatcacccgagtcttcctgcggaccaccctgggtggtgcacatgcggtcatcattgtgcaaaggaagctttagttctataatgaaagcccctttagtaagtgatgctccttgaagactcggtcagcgtctcgttcacctctttatccccagacttagcacaattccagccccaaatcggcaacggacctttgaccaagtgacatgtcagtgcttcagggagcttcactgatcaggacagaagtgagtgactggaggaaggtgacccggatgtctgtaacccccagaaagggtgagatggctgttttatcagccagcattgccgagttggtggtgtgacgacatcctgtctgactgctgggccttaccggtgtgttctctgctggagccgtgacagtttgagttgaggacattttacatcaatcactgaactgcacgaaagatggaaatccagcaagggaccccgtcggacctgattgaccgcagagctaccttttgctctttctggatgccacacggcctcctcctcccacctgtccttggagcttgtgttggtccactttcatgctgctgataaagccatacctgagactgggtaatttataaagaaaaagaggttgaatggactcacagttccacgtggctggggaggcctcacaatcacggcggaagttgaaaggcacgtcttacatggcggcaggcaagagagaatgagagccaagcaaagggggtttccccttatagaaccatcagatcagctgggcgcagtggctcactcctgtaatcccagcactttgggatgctgaggtgggaggatcacaaggtcaggagtttgagaccagcctgaccaatatggtgaaaccccatctctactaaaaatacaaaaattatctgggcatggtggtgggcacctgtagtcccagctactcgggaggctgaggcaggagaatcgcttgaacctgggaggcggaggttgcagtgagctgagattgtgccactgcactctagcctgggcaacaaagcgagacgctgtctcaaaaaaacaaaaacaaaaacaaaaaaaaccatcagatctcatgagacttattcactaccatgagaacagtatgggggaaaccaccctcatgattcaattatctcttgctgggtccctccctcaacacatgggaatt

SEQ ID NO: 797 - DNA, 408 bp, Homo sapiens
gcaaatgtcagcgccagcccagtcaaaagagcttgaaacctaccaagccggaggactgtgctgtgcctctctcgcccacattttccccaagcactctcaggaacctggcaacagactgagagaaaggaatgaaaggatggaagaattacaagatcaggcactgctgtctgtctgttccacggatgtaaccacagcacacgcgtggctcacgatggatatctgagagccagcgaactttctttacctcctagtatcatttcatgaaaattagtagcacctgcacaatggggccttggagacaggaataaaaggaaaaatctggaatggaatcacatgacgcaacaggctatgaagactccctgcccggctgctatatgtctggtaaacagaataaatagtacttgagca

SEQ ID NO: 798 - DNA, 464 bp, Homo sapiens
ctccccaggcaccaccctcaccccgcagctcccccccatacacaccctcgctggaaagttcgccctgcccgggctgggctcccaggcagcctggcaccgtgccaggctcgccgccgagctcgggcagcagggtggggcaaacgcggagcacggaggacggggccgggcgacctgggcaccagcaggacccgaggccaggagccaggggcccagaagattgagcttctagagcctcagagatggaattcgccgttttgccgcgatttggcgttaacttattgacccatggggaggagggtcacttcccgtgaaaagaaggcagagatgttttgctgtgcccagtgtgaggaagcgaaggaaaagaaagatcttttgaaaatgtgtacatctacttgcagcttgaaaattccaagtgccagacatttttcttggaggaaataaatgtcttcaatttattcatctta

SEQ ID NO: 799 - DNA, 289 bp, Homo sapiens
ggatatgagggcgatctggctgcgacacctgtcatcccattgatcgccagggttgattcggctgatctggctggctaggcgggtgtccccttccttcctcactgcttcatgtgcgtccctcccgaagctgcagctcagtcgaagagaacgaccatacccaatagaagagctgggcttccctggtagaacctccaaacaagctctcaaggtccatttgtaggagaaggtagggtagtcaagattccagacacatccaaatgaggcgctgcatgtggcaatctgcctttct

SEQ ID NO: 800 - DNA, 514 bp, Homo sapiens
aatgcaagtgtttaacagatgcttcactattaaaatattttccccccaagtctcaaatattgaagaatctctaaccaggctcgaaacgccggtctcagtggctattgagttacccaccaagttaccccggttagagctgtttggggtggctcacgttattgcggcaaactttggagatgacggctgagtcctccgggcgaacatgtcaagccgattgtaaatgctgttatttccacatccttcagggacaccagtccctacgaagaccttgggcgattttgaagtgcgggcacctcgattccccgaatctgtagtgtggctggtatcggtgttcccctggtttaactagcctgtttgcgggcatctgtggaaagcaggtttagttatcggaggggaaccattaaacgccagtttaagaggcaggccgggaggacggctcgtggatgttgagactgctggccttggtgatcttgaacgcattataacggaaaatggatctccacttgtaagtcac

SEQ ID NO: 801 - DNA, 556 bp, Homo sapiens
gtcttcattcatccttcacatttactgagcacctactatgtgcaaggcactgttccagttgctgggcatgcagcagggaactaaagtggcaaaaattcccaccttcaaggagctagcctttttgatgggctagcaatccaaagcgaactttggattttgcttgtgtatttattagagacaaggtctcgctctatcccaggctggagtgcagtggcacaatcagctcaccgtggcctcaatctcccagctacttgggaggctgaggcaggagaatcacttgaacccaggaggcaaaagttgcagtgagctgagatcatgccattgcattgaagcctgggcaacacacagagactctgtctcaaaaaaacaaaaaaaagaatgcgttggagaagtagaaggctgccataatcatatataagggtgtatgtgtgtgtgtgtatgtgtgtatatatatgttgtatgtgtatataattatatgcacatataattacatgtaatatatgatataacattttcattgaggtataaaatatatacaataaaatgcataaattgc

SEQ ID NO: 802 - DNA, 662 bp, Homo sapiens
gcctcccggcggcctctgcaggcccaaatcgtcctgaagtcggcctctccaggtccagctccagcctcccggcagcctctgcaggcctaagttgtcctcaagtcggcctggaagtgggcctggaagagctgcaagttggcctccctgggcccagctccgtcctcttggcctctccaggtgcaaaacttcctcgagtcagcctctccaggcccagctcctcctgcctcccagtggcctcttttggcccagcccagctcatggctctcagcagccttcccaggccccgcttttgacttttggtggcctcttcaggcccagaacttgacctccagtcggcctttgcaggcccggcttcctgcctctcgaaggcctgcacgggcccagcctcagcctcacagcggactctccacgcccagctagctctcgcctcactgcggcctccccagtcgaaagctcctgcctttcggccgctttggcaggcccagctcctgcctgccagtggcctctttaggcccagctcattcctcacaacggcctttccaggccccgtttttcccttccggcagccttttggcctctaatttgtttatcttttgtgtataaatcccaaaatatggaattttggaatattgctaccattatataaatattttcgtatgtaa

SEQ ID NO: 803 - DNA, 560 bp, Homo sapiens
ctttcccgcgcgaccggcgagggaggaagaagcgcgaagagccgttagtcatgccggtgtggtggcggcggcggagactgcgggcccgtagctgggctctgcgaggtgcaagaaagcctttgaggtgaaggtgtatgaaagtcatcataacagatgttttccaaaaacttgtagaaggttgtgaaaaaactactaggatcacgcggcatgtattgaggtacctaaatttaattaatgttagttatgtgatgtattcttgacagataggtttaatagctggcacaatgatgacttaaattactttttgccgtttacccagctgaggttgtctttgaagaaataattttaagactgagatgccagtactgtacattgattaattactgacatgtatgtaaggcaataatttaattaagggtgaatattctttgtttttagcatataggttgctgtagatgaatgttcttagctgtcatgtttaaaaatacttctgcttcgttacctcaagtaagtgatttgtcaagcaactatgtctgctgacagttcagaaagtatctgat

SEQ ID NO: 804 - DNA, 571 bp, Homo sapiens
agacatctgggctgctagctgcatgaaggagctacccgctgtgggtctcctctttgctgacagctggacacttgacagaatgacctgcctgaactcgggacctgcagaatgatgggactgaagaagctgtaacacaaacagggctaaaacacgcactctcctccccctgctccccaccgccccacccacttgccacattggaggtgatgagaaggagagaagagctgtggcctttcagggagcatagtcccaggggctccctgagccagggctgtgaaaccctcttccgggcactgcagttcctggcatctccaaacttctgagtgccaccgcattccccgcgtccggatgcaggtcaatgcacagaaagaaatctctctcctgactttagtacaatggcacgattggtggccacagtccaaggatggttgctggtgagtagttacagataccccgagacacagcaggagtgagtaattgggtttatgatgggcagcgactctggtgttcactgcaagctagcactggtgttttctggatgacctttgttagctgtgcgaagaggtttcct

SEQ ID NO: 805 - DNA, 552 bp, Homo sapiens
gagacagcaagaccaacaaccccttctcttcctcttcagcctactcagtgtgaagatgattgctgccctcagctgtgcctggagcacagggcacctccagttcggcctctccagaagtaaacttgtcttctgcctatcttgtgtttgttgggaggaggtgacctgggactctactactattgatgaagaatccgaaaaagtcttctattagccctgtgccacaccctacctatgagaaatcagtgtttactgcagagaacacagaagccagcaagcagcagggaagggaggcgaaccaatgcagcagcccaccgggaccgaggaggacacacgcagagcaagtcacaggaagcgcagctgaaaacaaatggacgcttatcccaaatgcacaggacacttaccaagaactgatggtccgtcaaagtaaagctcaacagctttggctggcaggacagtcaaacttttggacgacagaaagtaacagtgggaaatgggacaacatctgccagcaacgcgagaggccaagaccatggctgctacaggaggggtcag

SEQ ID NO: 806 - DNA, 3352 bp, Homo sapiens
agatgtagatggaaccaaagtccagaagttacgcgtcacccttgctctacagccaaacatgcaggactctagtaacccgcgaaatgatgggatagcgttgcaaatccttaaaagagtcttaacgaaatcctggctgacattgacttctccactgcaaccatcgagttcattgtctcctaaaccttgccatggaggcctgtggcacctgagccagccattatcatcaccagcacttccatgagctacaagctggacccactgcagtcctcctgacacactgaaatcagagcctgcacacagagcagcagatgcttcaatgtaaaggtcatttccaggtccttgacaggcgtgcatctgggccagatccatggcaataaccttcaggttgaggctagagggcttcagatgggcagcttcgaatgacaggagcaaggcacaagaggccggaaagggagggtgacattttcagcatctataagatcaactttagaaacatttgggggttgacaaattcccatcaagctctgtggatcttgtacaactgctcaccaccggcttctcatcagcacatgattggtgcagggttctgaggatgattttgagatgttccctgatgtggtcttgtgaggagatttcatgacagatggcaggaagcttcgtggagagatttctgaagacactcctgagctcccaacaccgggcaactctcttccagaggatagtggggtggagggtagaagagaggcaaagtcaggagaagggaaaatgttacattgtcaaagtcccaaagcctttcagcctgaagccaggaacaattgttcaaagtttctttggaacatcaaggaaggaaatccagattttactttaagtgcaatggggagtcattaaggattttgtgtagatacagcaaaaagacaacaatcttcaagccacaatggccctcaccagaacccagccatgtggtcagcctgatctcggacttcacagccagcagaactgtttgtcaaagatcagatggtttccttaagctgataagcaacttcaacaaagtctcaggatacaaaatcaatgtgcaaaaatcataagcattcttatacaccaataacagacaaacagccaaatcatgagtgaacttccattcataattgcacaaagagaatcaaatacctaggaatccagcttacaagggatgtgaaggacctcttcaaggagaactacaaaccactgctcaatgaaataaaaggggacacaaacaaatggaagaacattccatgctcatggttaggaagaatcaatatcgtgaaaatggccatactgcccaagataatttatagattcaatgccatccccatcaagctaccaatgactttcttcacagaattggaagaaactacgttaaagttcatatggaaccagaaaagagcctgcactgccaagacaaccctaagcaaaaagaacaaagctggaggcatcatgccacctgacttcaaactatactacaaggctacagtaaccaaagcagcatggtactggtaccaaaacagagatatagaccaacggaacagaacagaggcctcagaaataacaccacgcatctacagtctatggtattttactatggaagcccaccctaagatttcaatttagcttccatgtagttccctggtgcttggcaatctcctgactcactaccttgtcacatggtctatcccaagtcagtccttctcctcttcccatatccccctactccaatattcacccatatgtggccaagtcttcctccacctgagctccttgcagaggaatgaacaattgtttgaacattaatgaatattaaagttatctgatcatttcaaattgggaccacttaggaactttttctgtgttgtttctttaactttcatgtccagtgattgagttcttctccagagctgttgagacctaaataaatccagcctatcatctttcttctcatgctgcttttgttatacacagacagcatgagtgtcacatgagaaagctgaaatagggtcactttgaaaacaaaagtttccttgtatactggatttggccgccctctgcggatggatatcttgcatttggacatctcttgatccgtggatttccgtagagttaacttaacatatgtattgggtggtctgtttgctgcccaattttttaagtggctgccttttatcacttctgctgatagtctcccatttgtggcattataaagcaggctaatgagaatttctggaactgacccgtcttcgagagactgacatgcggatgtactttcactacaagacatttctgacacgctcatttgggagtcacagacacattttatcttgtgaattgttccttgtactgtattctgaaccaagatctggaagccctccaacattttcaaaacagaactgcttattaatatagagaaaaagaagcagcatcaggataataaacacccaaacagctgacaaaaacccaactgcctctggagatacttttctaaaacaggaaagcttcctgctgactcaaaaggatttttcttcttctgaactcctattatgggaatggatgaaatcacttacagagccacagaaggaaacaaagcaaagccaggatcatgagttggattatctggaggcctaggccaatggggagttattgcttgcagtcactgatcaagcaaataaacttttccttctttcttatgaaatttatttaagaagctgaaattacttaaatgataatgagttgtgagaaaagaattgtagtagatatttgttctctatccaaattgcactgagtggggaggtgtacccataccccagcttcgagaattgactgataacagttcacacctgcacttctccagagaattgtccttgtctgacctgagcaccttgtttagtaatgtctggtaggctatgctccaccttccctgggcagatccactggtctaagacaaacaacccaaccctctaatttctgggaagaatcacctccgtgattaatctaagctccagatctcccagagaaatcatgctgaggctacatttgtgaaactacatttttatctagcttcttcctttgccctttcctgctgtcctcacttccttatgaatttttttctgaaagatcttgattaataaattatttaatcaagatcccccagtcataagttctgtgttttggaatataacctatacaaaaataaattaattggtactagataatgctccgctatgcatctatttcaatgtctattctttggaagttctgtcatcacacatccccaagttttagataaggtttttagctaacagccaggaaaagattcaataaa

SEQ ID NO: 807 - DNA, 925 bp, Homo sapiens
atttttaaggagggaaaacagaataacttattttgcaatataatttaacaatttagtatattcagagatagagtccatatatccttgatataaaatctaaacccagtttcttgtatcacactaacatggccataccataccttccatgcttatttctctgtcatttagtgtgcataacaacaacgattcaagcttttcgtgaagaaaaatcctcagtaggatgctggccagtagtgttcggtcttgtccacatacatgtgataaagcatagactacatgaagttccttttgcagtataagctaaaatgacattttaaaagattgtttaaagtacgtagcattataagcatgctccatgagactaacaagaaatatgttctttcacaagttcttatatttaaaatgatgtcccattgaataaatttatttaaaatagaatgaattcgtagtctacttatttctaccaaaattacagtataaaacaaggtttaaaatctctggcatcattgtgctactaagctatgaattactatgtttaccttaatggatcttttattaaatgttaaatgtttctgttaattccaacaaaaacaagactgataaataatttaatacctctttaaattcactgtactcttcttctggcatgattttttccatagagtatcgtgctcgaacacgcagggaccctggttcaataccttttaatggtatatgggagctgagcagaaaccattcatctgtggcatgccctttctgtaatcggctcaactggcagcgcataaatacttgggaagaaaaacaagcaattattgtttaaaaagagaacacgataattagtcatgcaagtaaattttcctggtgttcagtcttccctatggtgttaaatgcttttcattaaaggagttttcagtaacatcacaaa

SEQ ID NO: 808 - DNA, 600 bp, Homo sapiens
ggcagaaattgggcataagacaatatgagaggtggtctcctcccttactttgaccaacatctccccaacccatacccctaagcccctggtaactaccattctgtctctccttctatgaatccaactttttaaattatacatacaagggagatcatctggtatttgttttcccatacctggcttatttcacttaacatattgtcctccacatccatccatgatgttgcaaatgacaatgtttccttttaaaacatacaccacttttgaatgtgttttattcagtctacaaagtcacctatgagacattcagtggggtcacagaaggaaagtgctttgcaagccaggcgaggtgcctcatatttttaatcccagcactttgggaagccgaggtgggtggatcacctgaggttgggagttcaagagcagcctggccaacatggtgaaactccatctctactaaaaatacaaatattagctgggcatggtggtgcacacctgtaatcccagctacttgggaggctgagtagctgggattacaggcgcacgcccccacgcctgactaattttttttttttttgtatttttagtagagacagggtt

SEQ ID NO: 809 - DNA, 379 bp, Homo sapiens
ctcaggcttccggtctgtttggtgccctggtcgcgtgtcttccgaactctgctgcttcgccccggcaagagcacttccttccgcggctgctaaaactggtgcgcgggttcccaacttcgcagaagagcttcatcggccccccgctagagacctcagaccgcagccatcgacgcctcgcctcggggatctgtccccaccctcggggccagctcaccatgagtcaggccctgtgctaggtgctgggatgaagcagtgactgacacaggcctggacctgtccttgggaagagtgcgtctgtgacacagatactgtgccatgtggcaaagtaagcgcgtgggacagcagagccttgtttgccattaaagtaatatcacaagtc

SEQ ID NO: 810 - DNA, 2168 bp, Homo sapiens
acaagaactggcagcagcagcagcagcagcagcagcagcagcagcagcagcaactggatttgctttttcaccagaggatccagatttccctgtggcctcgcaaacaaaaaagaaggaagacggagcagcacagtcatccctttgtgaaaaaggcattcagagacggggtttcaccgtgttagccaggatggtctcgatctcctgacctcgcgatccgcccgcctcggcctcccaaagtgctgggattacaggcgtgagccaccgcgcccggcctcagcaggtttttcaaaagtcatggcgtgtaattgtccgaacagtgaacttcggagatccaccggaggggcgaggccacagctcgaccgcgagcacctgagcatcctgcaccgcctgcgacggccgtcagggggcgcgatgccgcctcacagaacctcaagcggcgcccgggttccggcacagacggcctgcggctccagggggcggagccgagccgtctcctcaggacctacgcaggaggcgccgtcatccctacagggacacctgagagggcccagcctcctcctcctcaggacccactcgggagacgccgctggctctctaggaacacctggggaccgtggccagggacgacccagcctccttctcctcagctcctcaggaacgactggggaagctgtggcttcatggtccccgaggctgcccgaggaaaggtatttcaggacagccaggagggggcgcacatccgccgagaaactgtgagcaagagcgtctgtgctgaaccatggcgccaccagagggcgcgcgatcccgccccaaccaacttcccgctgaggtgccagaagcagcgaggagcttcagcttcctcagggcagcacgagggtcgtgttaacttggtgttcttcattgatgatgattattccccaccttctaagagacaaagaccaacgagccaccacagccaccagtcccagaacccgccaatgctggggaacggaaaatgagggagttcaactctggccctcacaatccagtggaggagacgaaactcatctgcctctgtccctctgggcacgcctcatgccaggtgcatctgtggacaggggccatgctcctgggcttccaaagttggagaaagctgccaggctcaggtctgaaggccagaattctacagtaagtcctactgagtcaaggtgggagcagggtcggtagcttccgaggctctgcgggagaatccgtttcctggccgtagaggtggcctgcactcctcagcttgtgctgcccgtctcgaatgactggagtttcctgcttctgtcactacacctcccaccctctccatcacctgctctgctcttacaaggatccgaagaaatggaatcatcgtatcgctgatctacgtaaacaaactgaagaattgtctgaaagaaaatatgacatgaacttatgaattcaacaggtgaagatttacaacttgataaatcaactttgtcagctcgagctgtaaaagccaaaggtccggtgatgatcccatacccttttttccagtctcatgttgaagatttttatgtagaaggccttcccaaaggaatttttttttttttttttttttttgagatggagttttcactcttatcgcccaggctggggtgcaatggcgcaaccttgctggtcactgcaacctctgcctcctgggttcaagaaattctcctgccttagcctcccaagtcactgggattacaggtgcccaccaccacaccaggctaatttttgtatttttagtggagatgcggtttcaccatgttggctgggccagtctcgaactcctgacgtcaagtgatcttcccgcctcgactcctgatatcaagtgatcttcccgcctcggcctcccagagtgctgagattacagacgtgaacccatgcctggccaggaattttgttttttaggaaggctttctactaatggaattcctggccttgagaggatgttactttagaaggaaaggatttttttgttattaaaagagccacctaagctgaagattcccttgagaacaagtactgtccctagtttcccagtgctggaatatagaaaatggatggacaactggacctaccatgaaagacttctgaatccaggaagagaaactgactgggcaacatgttattcaggtaca

SEQ ID NO: 811 - DNA, 516 bp, Homo sapiens
agaaaatgggccccggctcccgcaggaggcccgcctggcgcgcagatgtcgttattagaatccgggacgtcggtggaccctctgggtctggctccctcggggcttacgatgaaaaaaactggggggcgcgtgtgtgtgtcatgagacttccatttctgaaggggtcctgttccatatcctcaagaagggagtgctgcacagagaggccatgaggaatctaagcagacaggccttgctgggtttccccactcagtctgttaatattagatcatacctttttgtccagtcacatttttacatggttgtcaattatgcctgtccagtaaagtctccataaaaggcccaagaagacagagttggagttcctggatagctgaacatgtggaggttcctggagggtggggcacctgggcataaaagctctgagccccttccctcataccttgctctgtgcatccctccatctgtatcctttgtaacattccttataataaattggtaaatgtgtttcccaga

SEQ ID NO: 812 - DNA, 537 bp, Homo sapiens
gtgtgttctctgagcacctcgtgaccttgctgggagtgtgtctgatcagccgcttcccttgtgaccaaatatttggtcatggcagcaggagagaattccatcagtggacagctctatttttaaggctctggctttgttttctctttcctgagaggcagtccctgcagcaggcttgagcctctctcactgacagcctgcctcgcataatgttaagcaggcatcggacacttgctggaaggcagggaattgcaatgaaagagcacggaggtgagaagctgtgctccttggggtgaaggcagcttctgtgctcctgggatctactgttaagccagggtgacgccagcttgcatgctaccggaggggaagagaaaatttggacacacagggagaaaaccacagggaggagatggccatctacaattccagaaaagcagcctcagaagaaaccaatctgcaaacatctttatctgcaactccctgcctcccaaatggagtaaagagacagaaagggaatgaatttccaagaagaccagcgta

SEQ ID NO: 813 - DNA, 483 bp, Homo sapiens
tctgagccagttccagcccggcccagatgttggcccctgacaactagctgtggctggtgcggagggaggagcgagggaagaggggcagatcgaggctgccagaaacatatgaagctcatttctgccacccttcctagaaaactggttcctgacagagacatgtggaaaggtatctgcacaagaaaaagtgaaaacatatgtccaagcaaggattgtttacaaatgtgcatagcagttttgttaataatagccccaaactggaaacaatccaaatattcatcaacagacggatacagtgtagtatagtgaaacaatggactagcattcaactaaaaggagcaagctactaatacatgtagcaatgtgcataaatcgcaaaaactatgttgtgtacaaggcaaacacaaatgagtacatactatatgatcccatgtatataaaattctggaaaatgcaaactaatataaagtgacacaacctaaa

SEQ ID NO: 814 - DNA, 461 bp, Homo sapiens
aaaatacagagcggtgaagagcttacagtcggaccgcgctgcacgccggcggcagccatggcggatgtgtcagagaggacactgcagttgtccgtgctagtagccttcgcttctggagtactcctgggctggcaggcgaaccgactgcggaggcgctacttggactggaggaaaaggaggctgcaggacaagctggcggcgacgcagaagaagctggacctggcctgagactctgcgccttccgccccattctgtccccctcatggccaccttgccatgtccgcgccggagccccggtccgccggcgcccagaaccaggcttgccacacagtccccgcctgccatggccggctcttcctggagtgttgcttgttgaagatgcatatagactaccggaaagaaatgacttcttcttgcactttatgaatcaattttatttttaaaataaaaaaattaaacat

SEQ ID NO: 815 - DNA, 821 bp, Homo sapiens
ggagtggagaacacaatttaatgcataacagctcttttcatctctcagcaaactaggtctcaggtctgaagtccactgcggtcagccttccctggtggtgagctgctgtcagaacctccccactactcctctgggtggccccagtcttgtgcctatttccctctcgtggtcatcaagtctcgcccagatggagtctcagttttataagggggagtttccctgcacaagctctctctctttgtctgctgccattcatgtaaaatgtgacttgctcctccttgccttccgtcatgattgtgatgcctcccagccatgtggaaatagaattccaaaattgtacgagcttcaggccccacaaaacctggatccaccctcagatttcatttatctcgcttcgtggtgacaaatgaacctgctgttcttgtcactccccgggtccgactgtactcccaaatctgtcaagcgaaaagtttcagaaatgttcgttatgactccttggatattcttaactaatagggcctctgtgagatctgtactactaagaagtttcacaagtaattctaatattcagcctgggttgaaaaccgccatccaccatccacggatgctgtgcttagggcccgtgcttctcagatggtgggccatcactcattctgagttgtgaaatcatcttaacaggtcccaattagcattgttttaatagaatggaatatgttaccttgcatcataaggttggtgtgttcgtcccacttttgtttcaatatctacaatatatataacttatacattgccttgggtagcgcaattctgaatcctgtggt

SEQ ID NO: 816 - DNA, 2485 bp, Homo sapiens
ctggagtggagccctaggactgaaattttccaaattgctcctggcaattcttatgtgcagccaagattgagaagattgaggggactaaaatagaactcaccatttctgtggcttccaggacacttcccagagacttcataagtatttctgttcctagcctcagactctttaaggttgagaataggagacctcacaatcatactgctgacttaggctttcttacctgtctgtaagagccttatgagcggacacacacagtctatatatagatacacactttttacattatactagaagatgatgcctgtgatgtttatggtcacttactatgtttaaaaaatgcatgactggcctatggtgactcattatttcttcccagatgcttgaaccatgatgccagtgagtggaaatgactctattgggtgggatgggcccagcaggtcagacttacttaggcactggcactgagaaaagcaatactgactgggtgtcgtgtacgtgtgactgcccatagcaataaccctctggtactgtgtctgtttatgtaaaaacttcttgtttggtagttttgactcgtatttgtagagctaggtactggttattattgtgcttcatcctatcccagatttcccagtacattcctttagaagacatgtccatctccaactgctgggggctggccttttctgtaggccaaggtgctgccccattagccccacctggttgtcatcactcacccatgtgttgtgtccatctctgacccatttcccctgccaccttgcctaaagcttctcctgtcagcctccccaccaccatgaagtgctaagagtactatgtcctgaggtaagggcacctgcaacggagattgtgaagagaagactgtgggtttctgtggttacaagcacaactctgggtcaaaaacccattccaagtcctcagaggggcaagtcccttccattcagtattaatatagctcatcagtgcctctgatgaaattgcccaggatgctggcagtgtggcctgggaggcttccagctcttggggtctggttacacatttattcacactgcggccatgtgttgaggacctactatgtgctgtgtttgaccacacgtcctgtagaatgccgtttggttctgagtatgcctggctggaatggaaaccaggaaattctagagtaacaggctctagtcctttccaaccaaaacaaacctcatgggaatgtttgagggaccagttaatgttgagacagagagagtatggtctagaatggtggttttcagattgtgttttgagaagccagaggtcatctttaggcctctgaagagtggtaaggggaggagaagctctcaactcccacacccacctcactccaagcagctcaagttccatctgatttatacattagcattctaagtaaaattttatttggaggcagtaaaaaggtctaggagaaataaaaacaatttgttatggagtgtattccagggcctgtttttagttgttgactctgggcataagacacttaattagatctaacctgatggttaatacagcattaacctgagcaccaatgctaaaacattggttttgtatgctgttgagtgaccaacatcctggtttgcctgggatgatcgtggtttagacctgttgtcccaggataattattcaagtgtcaccttaattctcaaaagtattccagtttgggtgagaaattacatggacactttatgcaagagcacagagttaagggaagggttggccagccttgcctaatgagctgatgaaccagaaggcaagccttgaaggagagtccatgtgggccatctcagagaactaagggatgaagccttccaagattaccagcattccaaaaccagaatatcatattgtgagactctgaaaataggtcactaccaaatgctttccagccttttgaccactgtcactttgaacaaatcaatggaccagcaaagtggcatatttttcttttattctttttattctttcctatgattactcctcatgttacctttcaattcctctttctgtctctctttttaaaaatttgactccccaccggccatgagactaaggctgacctttcataaacccacaagagtaactggtatatttgtatatgagtagttgcatgagaaagctcaatgtgcatactgtatttattaagccctgaacgcatttaataaaatattaacatggtgttttgaattatgatctttgtctgctttgctggaacaaaatataacagagctaacgtttgaaatccttcgcatatttggacaacattacaccaaatgttgattttgtacagaactctggcttgctatttaaaaactaaaactctaagtatatagcagcccaagttgtgaatattgctttctgcttcactgaaaaagcagtttacctgaaaagagcatgtaacctatattttgttaatttaagcaaataaagacatgttgaaaaa

SEQ ID NO: 817 - DNA, 1630 bp, Homo sapiens
gccaaagcggcctcgaagcgggtcccgtgtctgcggcgggcggcccccggcgcggagggcagggcgcggggagcccgggctcccggtgtcggcggatggcgggagcccgggggccgcgggctcgcggggcagcgggcgagagacgagacgccgagaatatgctttttgtctaatgatgttagataaaaagcaaatttggagcagttttcttattcgagttcaaaatggttcataaagcagcgaagacaactcaaaacatcagtaacacatttggcccaggaactgctaacaaacatacagtgcagtggtggcttaagaagttttgcaaggaagagagccttgaagatgaggaacgtgatatgggccatgggaagttgacaacgaccaattgagagcaatcattgaactacatgaaaaattacagaagaactcagcgttgactattctacggtcattagggtcgttcagcattcgaagcaaattggaaaggtgaaaaagcttgataagtgggtgcctcatgagctgagcggaaatcaaaactatcgttttgaagtgtagtcttcttttatgctacgcaacaacaaaccatttctcaatcggattgtgacatgtaatgaaaagtgaattttatacaacaaccagctcagtggttggaccaagaggcagctccaaagcagttcccaaagccaaacttgcaccaaaaaaaaggtcatggtcactgttcggtggtctgctgcccatctgatccactacagttttctgaatcctggtgaaaccattacatctgagaagtatgctcagcaaattggtaagatgcaccgaaaactgcaatacctgctgcctgcattggtcaacagaaagggcccaattcttctccacgacaacacctgactgcgtgtcgcacaaccagtgcttcaaaagttgaaggaattgggctacaaagttttgcctcatccaccatattcacctgacctttcgccaactgactaccacttctgctagcatcttgacaactttttgcagggaaaacacttcagcatggtgcagaaaatgctttccaagagttcgtcaaatcctgaagcacggatttttatgctacaggaataaacaaacatttctcattggcaaaaatgtgttgattgtaatggttcctgttttgattaatagaatatgttttagcgtagttacaatgatttaaaattcgcagtctggaaatttaatttttgcatcaacctaatatttctatggtaaatccttgcaaacatggaaacaatgcatttggcccagtgctttgtggttgtgtactctttttctttgtttttttaatagatggcattggccgggcatggtggctcatgcctgtaatcccagcattttgggaaggtgaggtgggtggatcacctgaggtcaggagttcaagaccagcctgactaacatggtaaaaccccatctctactaaaaatacaaaaaaattagctaggcggggtggcgggcatctaattccagctacttcatgaggctgcgacaggagaatcatttgaactcgggaggcagaggttgcagtgagccgagatcacaccattgcactccagcctgggcgatgagcgaaactgtctcaaaaaaaaaaaaa

SEQ ID NO: 818 - DNA, 2900 bp, Homo sapiens
gttctgcccagtggcctggcgcaggaaaggtgacccagtagttcagcctgtcccagctgcctgccccagcaccatcccagacccctttccctggggcccaccttggccctgaggaaggccagagctcggctgctgttctccaggaagtgcacacgcaggcggccccggctcgggggtggcagggcctcccctgagatgagctccagcagccgcaggaggtggatgccgtcagccagctctgtgtacaggttccggatcttgatgcccgcctggggaggggacaggggtaagtatggggtcagcccagcctcacctgtcctcccatcctgggacctgagaggtacgacccagagcagctgctttggaagaaggagctctggcctcagcttggcctcaggcagatgaccccacagctcaccccggaggcccactggccagagctgggggcctggtatgggtgggctgtgggtcacagctggctatactcacctggccgcactggaagacgttattgatccacttggtgaaagtcttctcctgcatctgcatgtgccgggcctgtagcttgcgaatgtggcccgtctcgtactgagagtccatggtgagacttggactgggcgggacccggagttctgtgctgggcctcctgctgcggtgccctgcagccccgaggagctcccggggactgtggggctgaccagccatcagccctgcagactttggggatgaggagctgctggatggctccctaaacctggagggcatgcagattaggggatgatgtgaatggagatggcccctctaccaggggcctggggtcccgccttgccagactgtcctcacatttcatgggggttgcagcttggagcccagccaggtaagggccagtgcttctggtcccctgtgcttgaatggcccagggccccctttgccccaccccaccttccagattcttcttctcagagcccctgctgccaggtccctccaccacagtgactgggacaggtggaaggaagacaggaaactgcttaccttggtgatgcctgggtcccacagagacggctctgctggacggatggagatggtagatagcaggggctgcttaccttggtgatgcctgggttccacagaggcggcccagctggacggatggagatggcagatagcaggggctgtggagggagggagagggacatcaggagaggccaaggctggagcagggctgcaccacagccctccccttgagccagcgtgctggggtgacggcacacaggcggcattgtcctcccacctgccacagggcgtggcccagacagggagggggtggttcaggaatgctccagggccattgccagatgatgtcctccttcatcatcctcccttccccgccagcaacttctccaactccaggtgggggtcctggctcccaggacgcagaggcccatggagcggccctgccaccgcatggggtgctgcagtctgcgtaggaggtaccaaagggcagagcctctgtgggaagcctgtggacgcacttcccaatctgagactgccctctgtaccctcttggggcctctctgtgagcacccagggcgaggggatgagggagcgtcctgggccgtggtcttctcattcacccccagggaacagcccatagactgagggcctcacagaccctgggcttggctttccaggccctgccagagtgcagcctgcctagcccggggctgaagggtaggctccctggaggaaggggtgacctggaactgcgagggctgtggagtctcctccaaaattagagacacggtgttaactctgggctccacagagctggccgtggcccggggctcggaggcaggggtgcagagggagctggtgggcgcccatcccttcctccccgagcagccgtggactacatgccagagtgaaggcgagttctaattctgggggtctcacccgcctctggctaaactcagggtagcagtgtgggctggggtgtgtgtgtgtgggtgtcttccagcggccctggagcctctgaagcgacagcccgctcctcagggaggcgctcctggcagccacagcccacagcaggacagccgctcagcgcgcccttgagagctgggctagggatgagtcacacttgaaccgcctgggcccactgcaggcagtcaggggtgacgctgagaggtgccgtggtctcgggtggggtgcggcttcctgcgtctgagagacgcttcctctcctgctgtcctctccctgccaggccccttctgcagcggctggcttccagacaccctgcgtccctcccttgctcgcagcagttgctgtggcggtcctcccgtgcacccccccttctgccctcactgcccctgggggtcctcatcacggaccccctaactcggcatcctggacaccaccaccccgcacctttccacagtgcagctctgctcgtgcctgtgaagcctcccacagcctgggaaggaaaatccagacttgccagaccttgcctcagccaggccttggaagcctgccagcttacctaaccagtaagaccctcagcccatggagtcctgtgtgatgttgtgagcgtgggaggacagactgaactgctcggcccgtggagtcctgtgtgatgttgtgagcggggaggacagactgaactgcgtggtgcttcgcacatagacctcaacagggattggcattttgaagctgttggcgggggctgtggactgcttttcttcctttctagctcaacggcagctaaagccactgcatacaatgcaaggactggctcctgtttggccacgactgattgcagcccctggtgaaatgagaaccctgtgggtcggaacaaagtttggattatttatgttgcaagtaactaaaatctcaagtgaaactgg

SEQ ID NO: 819 - DNA, 1835 bp, Homo sapiens
agatctgaagatggggaggagagcagagcgtggtggcacggctggaattcagtggcaacatcgcagcttgccacagcctcaacctctcaggttcaagtgatcctcctacttcagcatcatgagtagctgggactacaggcatgcaccactgaaaatggaagtattaacaatgcctgccactgcctactcaagatgttgcaaagatccaacgagatctctaacctacttgaaagggcttcagaaactttggagcaccatacagtatcacacaagccctcaattactgccacgtccctgaatcccttggtgtcaattcaccattaaacaacttctcccttgctctgcagtttgaatacggtctgtcttttaggcactgattctcatactctggtgtgtaacagaaatgcctgtagcacttaaagatacaaatgcccagccctgggacttctgcctcagcaagttatcctttgcgggaaggatcgttggacagaaagaggcagaacacagaagagaaagaagcagcagcacctttttttttcttttctttttttctctttttgagacaaggcctcactctgttgcccaggctgaagtgcggtggcatgattatggctcactatagcctcgacatcctggactcaagcaatcctcccaccttagcctcctgagtacgtagaactacgggcatgcactaccaggcctggctaattttttaatttttgttttgtttgttttgtagagacagggtctcactatattgccaaggctggtcttgaactcctggctcaagtgatccttccactttggcctcccaaagtgctgggattacagatgcgagccatcatgcccagtggagaagcagcactcttggcacataaggacaacacaagtcaacaagactggggaccaaattaacaaagggaagcctttctgtgatacagtcccccaagccactgccagacctacctccttatggacatgagtgatggctgtggagagttctaagccatcaagcaaattattgccatcataatcatgcattttgaagtaatggagctgcaattcttgtggcgacatctccgcctctggtttgttgatgacaccttctagatgctccatgatatgcctaaaaatcaacagtcaggttcaggccaattgacagatactgggatcatgctgaaatcttaaggactctgaaaagttcaagatcttaaacttcctccagctcagaaaaacaaacaccagcagtggcagaccacactcaaggattacacagagatagacaaggccttgagaggagcaggaaaagtcaaatagaccatctgttatgctggcaggattagggtattctttcctctttattattagaattttgttataacattttcaggccatcaatttaaaaatatgtcctttaaaacttttttttttttttgagacagggtctcactctgccacccaggctggagtgcaggagcgtgatcttggctcattgtagcctcaacttcccaagctcagttgattctcccacttcagccccccaagtagctgggaccataggcatgtactgccacatccagctaattttttgcaattttttagtagagacaggttttccctatattgcctaggctggtctcgaattcctgggctcaagtaatccacctgcctcagcctcccaaagcactgggattacaggtgtgagccactgcacccagccttaaaaacaaaggataaccgagtataatgcgtgaggctaactggcccaagacaaaagctgcaacaaatgattcaatgtttgaatgtgttgatttaaaaaaggtcttgttatagtc

SEQ ID NO: 820 - DNA, 2170 bp, Homo sapiens
tagaaaataacctatatgtggtggtccattttcagttctaagtgccttcatataggtttaagcaggctatgtggaaatagagaaataaagaagcagaaatgtactgagtcaccaccctgccctccttcctgctttccctttcacccagcggccacgtgcctatcagtaggagccccctcaactaccctctcctcaccccaccaaagaatttagtttaggctagcttgcaacataaataattataccctttcttatcagctacgtgcagccaccagggccatagtcaaatgtttgaagagtcctgagacagttgcaatgcatggtgggctgcaataaaatgcagcagaaagatcctaaagaacagacttgaaatcttaatccaacgaccaataggtgatgtccaggaagatcgtaaccccatttactcagtcaatgaggaactgggggagggacctgcgcactaggggataaattgcttgttgaaactctgctgggggtggctgcatgccagccagacacccagtcttgcaagactgtcattgaaaatctccgttttgctgttctccgggtctctgcgtccagtctttgtgtttggacggacctgccgggccatctttctgcaagaagataaaggaagaccaggagtgcctgccgaactcctatggaggaagtctaggagaggaaggggtaggaccaagggcactgctgtgggctgaagggaggaagatggtgtctgcaaaccaggaagcagccttgccagacacaggattggccacaaccttgaccccagacttccagcctccagaactgaaggactgagttcattttcagcgtgtctggcttttccatttctgtggcctgggaaggaatttccctgcacaggctctcttgcctgccaccatgtaagacctgcctctgctcctccttcaccttccgccatgattgtgaggccaccccagccatgtggaactgtcaagaggctgggaggtgccctctgcctttcaagatcagagagtagctgatccccctcctgccgtcatttatggactgaataaccacagagagtgtgaggccggcggaaacttggcagtgcctgtttgtcattgtcagtttcaaatactttttaattttgaatagttgtagattttcagaagggttatgaagattgtgcaggcagtttctgcaagctgctgctaatttccctcagcttccacgtcttcgctgccatggtccacctgcagcagccaagaaagccgcgttgcatcgccacgagctaaactccagccttcggatttcagagcttccatccatgtcctctctctgctgtgaccccacctggggtgccacgtcgtgtctgatcctcctgtgtcctcggcttctctggtctgtgacatttctgtctctcctttgccatgaccctggcagtgtggaggagactgttgggcaccctgtggatgcccctcagtctgggttcatctgtccttttcctcatggttagcctgaggtggtgggcttccgcaaataataccaaggaggtgaaatgttcttcccctcacggcctctcaggggcatagaacatcctcttgacttcacaggtggcgttaacccgatcgcttgtgtgaaaataacgcatcgggaggcactaggctgagggcttcagtacctcagaagcaaacccagttcctgcacacagaaaccccattcagggtaaggggtcctgtcctaggaaagaaaattcaagtttaaacagaaactgccagctaacctcaaagcagaggccgtgtgactgctgtttcacttcaatccatcctttttctgttcttccttccaagaacactgatgaaggttttccttgtgctccttggtagagcccaaactgctgtagttcagtgctgcccagctcatggattcctgtctcctcaaataactctttacactttcacgtgcctacgtttatcttctaacacttggatcaggtggcgtccgccaggtgtcttcgctgtaaagtcactgtcttcccttccaccgctccactctttgggatgagtcacgaagcctgtgctaccttcaggggagggctggggaagagttaaactccatctcctggaggggctgctacatatgatcatatgatgttatttggagtaagaaagatttgcctcttctccac

SEQ ID NO: 821 - DNA, 353 bp, Homo sapiens
gctttctgagatctgcttttagtgaagtggatcaatgatgaaactagccaaatctgagcatcagaagtctttccagtctacctgatgcatgatctctacagttctgagaagcaaaactataaaacaatgtaaaacaataagggcatatgtctggtgtgtgtgtgtgtgtgtgtgtgtgtgtgtgtgtgtacgcacatgtgtttataaagataacagctgtaggaatgaatgagattgagggtgggggggtgcgtatgtatgtctatgaaagcctaatcatttctgggcaatgatgaaaaggttttactactgatctttgtaactatgatggtttctacacttgacctgagctc

SEQ ID NO: 822 - DNA, 876 bp, Homo sapiens
gcatgccagaggctagagtcatctaccgcgcatgctggaggctggagcctacagtggctcacctcgctgctgcggttggtggccgcgagggtgactacagcgcagccagaatggtgaaaaggtggcagaataggcttatctgactttgcctgcccagttgctccgtgccaggaggaggagccacttattccatgctggaggctggagctgggggcaccgcagctcaccttgctgtggttggtggtggcgatggagactacagagcaccagagcgagagtggtcacggctgaacaatttcaagaagcgagtcgatgtctcatctccctatcttatcttgaaaaacccgtgtacctaagtcgtggatgtgtctgctgcatccgctgcatcagttcacttctgaaggaaccccatgaggaaggtgtaatgtgctcctttcgctctgtggctactcagaagaatgacatcaggcccgatttccagctgggaaagatggattctaaaatcaaggaactggagccccagctgacaattctatatcagaacccaaagacgctgaagttccaaggagtgggctggcctgtcctgtagaagctacctcatcgatgtgcaggccctggatgagaagctgctcatcatcatcgccctgcagttcctgcacggctactacaagcccatcctgttcgagcccaaccagacctggcccgggcacgtggctgtgtggcaggacacgtgctccatcgtggccatcttgctaacatcacgcagaaggtgcaccccgtcatctgatctctcaccagctaccctttgactgcacccaggctctggccgtacccaagcccataggtggggtggtggtctttgtcgtcagctcgctg

SEQ ID NO: 823 - DNA, 423 bp, Homo sapiens
gcggggccccgcggaggggcccggctttgtggaggattagaggctcccgccctaccctacctgcgtgtgtgtcgcctgtctggaaccgggagcttccccagctgaggaccacagtgagagcagagaagacccaggatcgtatttgaaaccataaaagccacatgaagacactaagaataacttgcagaaagacattttctatgaattgaacacagagtcccaaaacccagaaagttccctggtctctatctcatgggcccgtgtctggggaagggggcccgatgtgaggctggggccagtgcccatcctatttgatctttatcttaaatccacttcaaaatgctgtggcttggtggattgaaggttcgccccttcctgtaattatttggtgtctggtaaagtttttatgagtgtttgtgcaaa

SEQ ID NO: 824 - DNA, 7054 bp, Homo sapiens
cgccagggaaggtcaggcggcccggggcgtcctgcgactgcccgaggtcggaggcccggaggacccgccgccgcctttgtgtcaccagcccccgccccgctggactggcccgggccggggcggttgggccggcgctgaagaggcttggccgcccgggtccacccgttcccggatccgcctcggcggcccccgcgcccgcccaacccctgcccaacccctcggctccgcgagtttgggtgagaagtgcggcggcttttcccagggatggagtttagaggacgctaatcctatgtgcgagcggcggaccccgcccggatttcccggaggcgcccggttagtgaggcgacggcgcccacccgcgttcgcgggctcccgaccgccactccccggagccgccggcccgccccagccccgcgcgtcgccccggagggcgggctgcactccctccacgcacctggctggcagagcgtctccagggacaaaaggtgccctggcatcaaagccgagcccccgcccccgccgggatgctgccctccggaaggaggggcgctgcccccaaggtactctccccgggcacccagggggaggttccatttcaacctccgatgaaaaacacggccctcccgggtatttaggagggtctgagggtaagtgccaagatggagaaaacacaccggcccctcacagagtatctcctgaggaatgacaactatctagtgggcaaggagggcttcctgcatagcagagggcaccccctctgatcccccaacgccaagggaaaaaaatcactcttcaccggctcccctgagccaggacaggctccagtgcagccacccaccttataattttccgcggatgctgccttgatcagatagatctgaagatgactttaaggactacaagcaaatctcaagggaaaaattcagaccttgaacaacagccttgaactttttcagggttagacaagtactcccctgtggagtttctgcccttatttcttcgttcttctgttaattcttccatattttaacagaacacagacctgccgaaacgacacaggatggcgctttgctttttgttagttctccaaccttccaaacccttggggcacatgcaagcactgtggaaaaactccattaaaccaagagtcatcttactccagatcccagactgcttgggaagttggacatgcatattcccaaagagaacagtgttggaaggagacaggagagcagctcgggggttgggggtagagggtaggaaaagagggcaagatggatgactaccactcgaggccagcctccactgcctgttagggcagtagaacctaagagccggtccaaggcaacacaaaagacagtgaggctaggtctttcattgcagccaacgatcaagaaagcaactccatcaaatgacactgtcttttaaaaaaaaattttttttttgagacagagtctcgctctgtcgcccaggctggagtgcagtggtgcgatcttggctcactgcaacctctgccacccgggttcaagcagttctccctgcctcagcctcctgagtagctgagattacaggcacgcgctaccaggcccggctaattttttttttttttggtggagtcgaggttttgccatgttggccacgttggtctcgaattcctgacctcaggtgatccgcccatctcagcctcccaaagtgctgggatttcaagcgttagccaccgcgcccgaccaaatgacactgtcttaaatgatttaatgtcttaaatcgggaaaggagagtaagagaaagcactcaacggagtcagaggtgtcttgcagcctagctctttccacagacaagctacatgggcctatcatctaaccttttcaagcttctccgactgcttctgtgttggagggatttgggctagaggatctttttatttttttttattttattttggtgacggagtctctcactgtcgcccgggctgaagtgcagtggcgcaatctcagctcactgcaacctctttctcctgggttcacgcgattctcctgcctcagcctcccaactagctgggattacaggcgcacaccaccacacctggcctattttttgtatttttagtagagacggggtttcactatgttggccagactggtctcgaactcctgacctcgtgatctgcccacctcggcctcccaaagtgctgtgattacaggcatgagccaccgcacctggcctgtgatcccatttttcaaagtaattaggctgggtgcagtagctcacgcctgtaatcccagcactctgggaggccaaagcgggtggatcacttgaggccagcagttcgagaccagcctggccaacatggtgaaaccctgtgtctactaaaaatacaaaaattagctcggcatagtggcacgtacctgtactttcagctacttgggaggttgaggcaggagaattcgcttgaacccgggaggcagaggttgcagtgagccaagatggcaccactgcactccattctgggtgacagagtgagaccctgtctcaaaaataatgataataaaataaaagtaattatttaaggctgggagcggtggctcatgcctgtaatcacagcactttgggaggccgaggtgggtggatcatgaggtcaggaggtcgagaccatcctgtctaacacagtgaaaccctgtctctactaaaaatacaaaaaaattagccaggcatggtggcgggcgcctgtagtcccagctactcgggaggctgaggcaggagaatcgcttgaacccagaaggcggaggttgcagtaagccgagatcacaccactgcactccagcctgggtgacagagcgagactccgtctcaaaaaaaattattattattatttaaaataatcattgggcctggtgcggtggctcacacctgtaatcctagcactttgggaggccaaggcgggcggatcacgaggtcaggagattgagatccaacctggccaacatggtgaaaccccatctctactaaaaatatttttttaattagctgggcgtggcggcgggcacctgtaatcccagctagtcgggagactgaggcaggagaatcgcttgaacctgggagtcgaaggtttcagtgagccgaggtcgtgccactgcaatccacctggccaacagagcaagactctgtctctaaaataataatttttattattgttattcttgacaggccagtgtagaacaggtggggcatctatggtgacagaactgggttccaattctgtcccttcacctgtcccaggttcctcatctgaaaactgtgacccagtaaacctaatttcatgagcagctttcattaaaattgaaataatggtggaaaatgccttgtaaccgtgcttgatgtagagtagttacttagccagttatttcctctcttcttcccattcctaacaaaatggaaaaacgtttggttgctaggaaagagccttaaggggattttgttgttgtttgactctatcgcccaggatggagtgcaatggcacaatctctgctcagtgcaacctccgccatagacaggagccaagcgtagtggtgtgcacctgtcggtagttccagcctcttaggaggctgaggcaggaggattgcttgaggccaggagtttgagtctagcttgggcaatatattgaaaccttgtctcttaaaaaaaaaaaaaaaaaagaggccaggtgtggtggctcacacctgtaatcccagcacattgggaggccgaggcagtggatcacttgacaccaggagttcgagaccagcctgggcaacatgcaaacttatgtcttttaggccgggcgcggtggctcacacctgtaataccagcactttggtaggccgaggcgggcagatcacgaggtcaggagatcgagaccatcctggctaagatgaaacccagtctctactaaaaataaaaaaaaattagccgggtgtggtggctggcgcctgtagtcccggctacttgggaggctgaggcaggagaatggcatgaacccaggaggtggagtttgcagtaagccaagacagcaccactgcactccagcccaggcaacagagctagacgccctctcaaaaaaaaaaaaaaattacatctttaaaaaaaaatgcagggccgggtgcggtggctcatgcctgtaatcccagcactttgggaggccgaggcgggcgaatcacgaggtcaggagatcgagagcatcctggctaacacagtgaaaccctgtctctagtaaaaatacaaaaaattagccaggcgtggcagcatgcgtctgtagtcccagctgctggggaggctgaggcaggagaatggcgtgaacccaggaggcagagcttgcagtgagccaaggtcccgccactgcactccagcctgggcgacagagcgagactcggtctcaaaaaataataattaacaaaaaaaaaaaaatacaaaagttagttgcacatgttgccatatgctcgtggtcccagctactcagcaggctgaggttgggagatcacttgagcccagaaggtggaggttgcagtgagctgagaacccaccattgtactccagcctgcgtgtcagtgagattctgtctcaaaaaaaaaaagaaaagaaaaaaaatctaggctatgctccctagtatgggaaatctagtctagtcatttgacagaatcaggctttgcaggccatattgtctctgtcgtaactaccaactctgctggttaaaagggaagtagccacaaacaatatctgaatgatggattatggctgtgttccaataaaactttatttgcaaaaacaggttgctggttgcaaggtagttttccaacctctacgtgattctcagactttaggttgcatcataatcacctggagggcttgttcaaacgcagattgctgggccccacccccagaatttttgattcagccagtctggggtggggctgatatttgtatttctaccaactttccaggtgaggctggctgatgatggtctggaaaccactttgaaaacctctgaagcttttctcaactcccttctttgtgtacctaaaacactttatccctactgtagatgtagcattagcgtgttatattagtttagtgattggtgtgtgggtctctgggagcctttctgaatcacctccctagcctagtgcctgacaatagcaatttgctccccattcattgactgaactgaaaccggagggtcatggtcatcatcattgttccaagccatagatagaagatgaagtcaccacccctgatctcagagctcatcagagtagagcttgggctggaccctgcccttctctgcagtgagcagttttctctgtggagctctgtgcaacctggagccagtcctgcctggggtaagaggaaaaaagactccttccccccagccccacagcctgtacgcaaacacaccgggagacatgacctgctcagaggagacctggaaccaagggaataaaatgagagtgggttgggggctgctgttagttattttttgcttgtaagtggacaatttgtggtgtggtgtgtgaatttggggtcttaaatccagatagctgtctgctgtggacagccactgtttctgaattacagggcatttcaagtgacctgtggtcaggatgttttctcagatcaggcaaaatcaattggtcctgataataaccaggggagttgtactttccctatcttgagtagaagaagccacagctcccgggtccacctgcctctcctgactgcccacctcctggctttttctttttcttttttttttttttttttttgagacggggtcttgctccattgcctaggctggagtgcagtggtgcgatctcagctcactgcaacctgggcctcctgggttcaagagattctcctgcttcagcctagcgaggagctgggattacagacgcgcgccacctcgcccagctaatttttttatatttttagtagagacggggtttcaccgtgttagccaggatgctctcgatctcccgacctcgtgatctgcccgcctcggcctcccaaagtgctgggattacaggtgtgagccaccgtgcccggccggcctcctggcttttatcctgggggcactgcaagtagagccaggcatgtggcccatgcatccttcccagcctctttcctgctgggcatggaggaggaggcactgccaggagctccccacagacaggcgctgcttactgatgggttggctgcaaactgtaggcataacagttaccttcctcttcacaacccccaggcctgacgaggcttacatgggaattgctttgatttgtgaagtcttaagactatactgctgggcgaggtggctcaagccggtaatcccagcactttgggaggctgaggcgggcggatcacgaggtcaggagatcaagaccatcctggctaacacagtgaaaccctgtctctactaaaaacacaaaaaattagccggacatggtgggggggtgcctgtagtcccagctacttgggaggctgaggcaggagaatggcacgaacccgggaggcagaacttgcagtgagccgaaatcacaccactgcactctgcactccagcctgggtgacagagcgagactctgtcttaaaaaaaaaaaaaaaaagactatactacctaatcttccatgcctcgctctttccacattaatagacaaaaccaggaaaaaggactgcttcccctccagctcttgattgggctccataagaactgccaaaaggccaggcagcatttgctactcttctggggttcacttctgaaaggtgcgaccctgcaacctagagcacagggaagttaggacagcaaaggagctgggctgagccgacgctggcttagaactctttctgatactccctgttcccgccagctcgttagcccagcctgccaatcagttttgcatcaataaactttatgttctgaggttggccagatgaatgagaggagagcagctaaagactgatctctgaccttggcacgtaaacagcctccagattggacttgacagttaataaaggaaaggccctgcaa

SEQ ID NO: 825 - DNA, 1890 bp, Homo sapiens
ggaagcagagctgaggaaggcagccactgcccacccatggctaagcagggagaaatgaatacctcaacctcactttccccctaccccaagtctcccagcaagtctcctaccagaaggcagagggcagggcagctctttgacacaatccacaaagatcagcccttctggagctcagagctattacagagaagcctggagagtgtgtcaagacagcttttctccaggtggtgtgacgctgctgctaataatggtgatgacatcaaaactgccaagggccttagaaatctgctggtccagcacgaagcagggagatcaccaaaaaggggaggcagagctggaagagaacacagctgtcctgccatccaggtgctccattatgcctgaaaggttaacttcaccaccaaagcccaagaagaggttttcttcgccaaagatggggaagtgctgacaacgtttgacattaaaaacatctatgttctcccagacctgtcaggacagacagccattgttggacactttgacttcagagcaccttctggaaaagagcttctgttggatgacagcgcaattgtctgggcagaaggacccttaaagattagagctgagagaaccctaagaaccaagaccacacagcacctctcacatcccaagctccaggagaatcgcttgaacccgggaggcggaggttgcagtgagccaagattgtgccactgaactccagcctgggtgacagagtgaggtcctgtctcaaaaaaacaaacaaacaaaaaatacatattattactacaacttgagtatcccttatccgaattgcttgggaccagaagtgttttggatttcagattttttcagattttgaaatatttgcatatgcataaggaaatatcttggggataggatccaagtctaaatatgaaattcatttatgtttcatataccacttatacacatagtctgaaggtaattttttacaatatttttaactatatcatgcatgaaacaaagtttgtttatgtcaagtcaggtgtggaattttccacttgaggcatcatgttggcactcaaaaagttttggattttggagcattccagatttcagattttcaaattagggatgccccatctatatctccattttattgaagaggaatctgaagcttagagatgttaagcccaaggcacgcaaaccataaagggcagaaccagaattccaaccatcaagatgtcttgttttcccaccacactcgaaatccggaagagcttattcttacctatcactgtttccctaacaccctgtacagtacctgatatacggaacacatttttaattatctgagcaagaaatggagaaagaggaaaatgaaagagagtagaaaaggaaaacgtgataaagaggggtttaataaaggaaggagtaagagaaagaaagagagagagggacctagtaagtgaaaacgatgaggcttattcctccacgacctgactgcacagatgtcgctcaattccccctgcagtctccccagcactctctcccctccactctcccacctcttgtgtgtaggtcccttcctctgtctgcaacgaaaaacgtcctgtggaaaccaggaagtcaaccctatttgagaagtcaaaatgctgctacaaaagccttccctgacccagaagagaaatcgcaatgtcaccaggtaaggagggaggctggttcttggtcagagggtggccagccatcagccagagtagacttcagatgaaagctgtgtccacatcaaggaaattccttcaatggaaaagtccagggaagtcgagaccaaaaagaagatgtcaatgtgaccttcctagatgctacattaaagccatttgaggctattaaattcattctttcttttatcaa

SEQ ID NO: 826 - DNA, 2387 bp, Homo sapiens
agaaattctttctccctatgtcccagcctacccccactttaccgaggccaacagccgcctcagaaaccagattcaggagctaacatgccccaggtctcacgaggatcagagactccagaggccagggaaggagatcaaggtagtcaagcgggggtcgtctcagatctggttgtgctcgagctatgcaaatgcctctcacggagatgcgaggacctatctattatgatgaccagggccacatccggagggggcaacagactttcatctatcagcccttttcaaccactgatctactaaactggaaacactctgaaccctgccatcttgctcctggtatcagagagccctgtcgtgcataactgtgtagaagtgttggactcggtttactccagcagacctgatctccgggaccagccttgggcatcagtagactggaagctatatgtggacaggagcagcttcatcaacccacaaggagagagatgtgcgggatatgtggtggaaccctggacactgtcgttgaagccagatcgttgctccaaggcacttcagcccagaaagatgagctcattgctttaatttgggccttagaactcagttaaggccttctacggtcccaggctttctgctgcatacactgaagggccacgaagtacagtcatctggacttggcacctggaatacaaggatggaaagcatcatttctgccagcttcttatggtcctgaggcgagacagtcatgagagaggaaaactgcaatgacttctgaccactgccagcctcgcttcctgcattttcttcttcggcttactcttgccaagttggagttgcctaacttccaagagggtatttgctcttttttttttctcactccacaaactcttcccaggtagttcagtccactcccatctaccagtcactatacgccgatgaatgccaatattattatttccagcttagacattgttcttggattgcagatgtgaggtttgacttgtttactagacattgctggctgaggatccctagcataacatggcccaaattcaatttatttccaaagctgtctcatctcctttgttctctgtaatgatgttgctatccattcgatcaacatactcagaaatatcaccccctccttccttcttccaagataagtgagttgctcacgacatgatcatgttttggcagtgtactctgtccattcccatcacttagtaagaatcatctaggttatgctgaagtatgaagttaatctccaaatttctctggctcagtacagaaaaagtccatttctcccttctgcaatgcacccaatgcaggtctgcagggtctctgctgtgcgttgtccctcagggactcaggctgaagaggcccccttgtcttatctggccacctcctctgcacatggctcaggattttccaggcaaggggttgagcagaggcttttcagtgctgggcctggatgtgacataagatgcttctgctcacagccttgtggtcagaacaagtcacatcatccctcctacttgcaggggtgctgggcagcgtagtcatccacagatcaggagagggagcagaggcaggtgttcccgggctgcagcgatctccactgcactgctgtgggctgaactgtgccctccaccccaccaagcttatatgctgccagcctcaccctccacaccttagaatgtggctgtatctcgacatagggtccttacagaggtagttaagttaaagcagggtcattagggtgggccctaaggtactctgactggtgtttttatgagaagaggagattaggacttacagggagagacactaggtatgtgagcacacagagaaaagaccatgtgaagacgagaagaaggcaactgtctccaatccagacggagatgccaggcacagcccttctgtcacaaccctcagaaggaaccaaccctgccgacaccttggccttgtacttctggcctccagaaccgcaggaaagtacatttctgttgcttaggccgctcagcctgtggcactttgttacagcttctcacccagttcaggcccttttaattgattgctgggcctttgcagttgtttttgcttctaatatattcatctctcaatttatttctggaggctgccacccgaggggcagaacttcaattgtgtccctaatgggaaaccttgctgggatcatgtggtctacagcacaaggttgctaaagcatcttctgccagaattctgtgagtatctggttaggtgggtctggaatatactgagtttaaaaaagttaaataggtttctttactgcaagatgtttcagagactttaatatgctactctgctgtatgaatctccaggcaggaaatcttataaaatgtgtttctgaaatg

SEQ ID NO: 827 - DNA, 152 bp, Homo sapiens
gtggacatcaaccgggaagagctgaaagatggcgttaccagataaggaaactgagtctcagggaggtcaagagacatgccaaagcacagcttggaagtggtccattggattcgaaggggtcctcacacgaagcaggaagtcaccctgtatct

SEQ ID NO: 828 - DNA, 1168 bp, Homo sapiens
tttgcagtcacctcactaaagaatattcatttatttataattattgctaagtaaacttctcttttaaacaggaacataaaaacacagtagggctttgcacaagtggaatctctaaacagttggtttgtatacatgtcaaaataagttagaatggaatttgtccaggagtttccaagtcacccgagaggctgtgcacctcttttgagaaggttagggaggggtacagacaggagccttgccaagaccaccccccagctcaaactgtgagttgtgctgtttcctcctcctagctttgcccaggtccaaggcacagggcagggggcgttcaagtatcgaacctcacagagggccagtgctgacggcggggctgggggagggaaaggagagccccaccctgggggccagaccttctcccttcagtttccaagaccaaggccactgcactggcaggagggaggaggaggaggagaggtacagggttctttttggtaccaggggagaaagacgtgggaagaggtagttgcaggggatgatgccttctgctcagcaggagaaaatgtcttatacagtgacggggtcactgccacctgagggtcatcatggcgggcacctgggaggtcgtggggcttcggggtctggaagccatacttgggccaccttgtccacccctcagtcctgatcacagtcaccctgaggcctggcttggtccttcacttaaggatccagccttgggggtggctgcgctgcagattggttcctcccaccgcaggcacttgtgaagagtgtgactgattgacacttttttgccttggttgctgggaagctcagatctcccctctgcatgtcccttgcttaggacctcccatggtgtacttggagttgggacctcacctggctctcccttatctttccggctgccattttttcccctttctaactttctttcccatacacttatttgaaatattatctcacggtaacgaaataaagtgtctgtcacctcctgctgtgttgtcatcttgcatgagctatctaagttctctgttcttcagtttctgcatctgtaaaacgatgacaatgacagagccaacctcgctttgaggatcacatgagttaataaaggcctggcacacagttagcactcaataaatgttagttatgattttta

SEQ ID NO: 829 - DNA, 724 bp, Homo sapiens
ataggcacattccaatgagcaaaccccaggaatccacctgttctcatcttgccaacaatgctccttccacggaaactgaccctgtcctatttcctcgctttgatcattgcccagaaggaacagggactgttgagaaacagaggcagcgtgcagcctgaaggcatgcaccgtgcagaagaggatccctgcggctgcgggctcttttccaggcccaaggacaaggcggtgtgtgccgggttgatctgcactgctttagccaggatggctcttcttagagagacaaaccgctccaacgccaaactgccctcgcaattccaatcgcaaaggcaggctagggccacagttcaaacccaactgccaatgtccacaaagaaaagaagaaagctggaaatgcagttggtcttgccatgctggccgctcagcttctcacccccaggcctaagaaggacaaggtgaggatgagttccatttacagagtcctcaccaggtgccagtcacgatctcaatgtctcacagctgccatcccgccaggctcccaggaggaaggtgctgctatttattatccacaggacagaccccacagctggcaagtggctgggccaggaaccagctagggcaggtttgtcccatactctctacccatgagcacgaggctgtgctgttcatgtctccattcaaacacaggctgatatttccactccaggggaaaaaaggtagaaaaaaa

SEQ ID NO: 830 - DNA, 1039 bp, Homo sapiens
acatccacatctatgataatccaacaggtaaaagatgttgaattccaggtatatgaggagtaaaacttttgggaaattctgatttataactagcatttaacttccatgtaatatgacctcaaagacagtggaacttacttcgccaagccgaggttgggtgaaactctgccagtccgtgtacgcatatctgccagtatctccctgccccactcccttgacggactccaaggtctgatgtccacctcctttgttggaatccaaagtgtagcctcctttgaccatctcaaaactttgctgtgttttgattccctggccaccaacagtaccaacagacatgcttgtgtcacaaatgttggatgtctgcatggggagtctaatatttgcttcctaaaagtaaagtgagagtgataaagtgaatttgaaaaatggaaactaacaattcattttcattttttttcaccataggcaaatcacttgcctgctgtgcctctctgttcctcatacataaaatcagaataatagtatcataggtgtgatgggttgaattgagtcccctaaaaattcatatgccctaaccctcagtaactcagaatgtgaacttatttggaaatagggtcattgtagatgtaattagctaagatgaggttatatgggattagagtgggtccctaagcgaatataatcagtatccttataaaaaggggaaatttggacacagacatgcacacatggagaatcgccatatgaagatttgatttccactgccataagccagggaattggcagaagctaggagagagtcctggaacagatccctccccagttccttcagagggagcacggacctgccaacaccttgatctctgatttctagtctccagatctgtgaaacaatacttgtctgttgtttaagtcactcagtttgttgtgacagccctagccctgtagaattgggaggtttaaatgatttaaaacactgagggcacttgaaactctgcttagcatagtaagtgctcaataaacattagtgatattatca

SEQ ID NO: 831 - DNA, 850 bp, Homo sapiens
tacttacaggtaagtaaacctgggcccaagatcacagagcacacagctggaattcacagcaagacctgattgacttcgaagtcagtggtctttcccctgcttcccacgagacagttttgatcatcgatgattttctggttctaatgagatcaaggacatgaagaggctgagtgcctccatgagcttcattattttccatgatctgacctctcattctcttaagctttggagttggatgaaggaagaactctgaaaaaaagtatctgcacccaaggacccacacccaaggagcagtaccagagggaacacatctgaagagccctatctggatttgccaacatgatttagatgataagatactggactttgagctggtgccataatgggatgaggctttgggagtccaaagggagataagtgtaagtgtatttcaccggtgaagaatgtaaaacataaaaggccagaacatgaactctgcagctaatctccaaagatggctctcagtgaaccacacctcatggaattcatgtccttgcatagtcccctcccgcactgaatctgggttaactttgtgactttctctaactatcagaatgtgacagaagtaacaatatgatacatccctccatttagtgagatcatctttaatttctcccaataatgttttgtagttttctgtgtagaggtcttacaaattttttagattgattctttgacatgtgacttttctatgctgttgataaatgatattttgttaaaatttttattttctaattgcttgttactagcatatagaaacttaattacatatagaaactaagtacaggactttgtttattgactatgtatt

SEQ ID NO: 832 - DNA, 339 bp, Homo sapiens
gtagaagatactggaagatcaactctaatttgtggctgccttcccagcagtctctacttcagcatatctgggagccagaagcactcaagtttgataactcaaaagacagaacaatcagtcaaggggtagaggctaccttccattctgctcatcttacacttcttggaaaggagacattcggtgaagatcactactattctccaaacttcattcgggaccctattccttccctgttgatgtcagtgtgtgaaattctaaattatgtcatgggtgtatacgttcaaaagcaatatattttcaaataaacaaaaaatataattggccatcacatataccaaa

SEQ ID NO: 833 - DNA, 1500 bp, Homo sapiens
ctcggagcccggcgcagtggaaagcgggccaagaagcagaggtccaggttccaactcttgattctatcacaaaacactgcacccgaggcagccaggcagcttccgaagacctcgttttcgttcttgttgcccaggctggagtgcaatggcacagtcttggctcactgcaacctccatctcccaggttcaagtgattcttccacctcagcctcccgagtagctggtgttacaggcacccgccaccacgcctggctaattttgtatttttagtagaaacggggtttcactatgtggccaggctggtctcaaactcctgacctcaggtgatcagactgcctcagcctcccaaagtgctgggattacaggcataagccaccgcacctggccaacaattttttaaggaaaagaagaaaggaaaattattgacctcagcttccaccttaactagaaaagaccaaatgaaacctaaaataaaaagaagaaaagaaataataaaaatcagagttgaaatcaatgaaacagagaacagaaaataatagagaacatcaatgaaacagaacgttcttgagaaaattgttaaatttataaattatagttagattgatcaggaacaaaagagaaaataaaaatgaccattatcacaaatgaaatggataactttactacacattctacagatatttttaaagtctgaggcacagacctttaatataaaaacgctttatagttctgtctagggacataagatctcaggaaaaagaaaagaaacatcagtaaaagcacttttgctctgttttacaaaattgaaaatcaatcccgtgccttgtccaggttgttttaggtacacgagtgtaaaactgtatggtacccactgtaatagacgaagcccagctttccatttgatcatgtgcttatgttttcatctatggggtccccaggacccctgcacacagtaggtgtgcagtaaacgttgagtaagtcaatagatggtggtggttggcatcgtcttcctaatgtacgctagactctgtagtggcacaaaagtcagcacctggaatccacgtgggtttccgtatcctccaccaaatgttcaccaagcactcctctgtgcaaggcctgaaacaacagaggagaacagagatttggaactttgagttaataatggtagttagatgatattttggactccaagttgaccctagaatacttaagccttcggagcatgttaggatgggatgaaggcgttttgcctgcgggaaggacatgaacttggaggaaccagagtgtggactgttatgggttgactaggaccctcaaaaacgacgttcaagtccaaaccctcactacctgtccttctgaccttatttgggaacggggctgtgcagatgtcattagttaagatgagatcacactggagattacggtgggccctaagccaatatgaggggtgtcttcatgagcagagggaaatccgaacacaatacagggaaaaggaaaatc

SEQ ID NO: 834 - DNA, 731 bp, Homo sapiens
tgggcagacacagaagagggagaagcattccacaggggaggaaaggcctcagtggggacctatggagctcccaggcccaccgcagggaggcaggtcctcggtcatctgcggagggagaacactttcagtcgaaggagcctgggacccttgacacagaagtgacatgtgcattcggaacctctctgtggaaaacacagacccttcatgacacgcaaactcgaagccggtgaggccgagtctcagggctgcgccaaccaggaagcctggctgtccaatgttccaaatctggatgtgaaatggaccatgcagacaggacccaaggggcatgggggagctggcagaggcacccgggacaagtggggaagcacctgtcggccaggaaggtagagaggcacctaccccagaacacggtgccagcgtcacactcttattaacagatgcaataaccaccttcggagaccagacccctcaaagagcactcagcccacaatgtgacgcagagaaaccagagacccaggcagggagtgcacccacggggacactccgagggtggcctcctgcctgccctgattacttaaaaaggagattcttggaaacctttgcgggcccacaggtgcaccctgactcccagggatgggggctgagccacccaggaaacaaatatgaaatcaaagatccagacagccctgaccctcctgattccagggtccataaataagtcattcttaaaa

SEQ ID NO: 835 - DNA, 92 bp, Homo sapiens
ggatcgatgatgacttccacatatacattccttggaaagctgaacaaaatgagtgaaaactctataccgtcatcctcgtcgaactgaggtcc

SEQ ID NO: 836 - DNA, 393 bp, Homo sapiens
caggaagacagctggcccagtgaccctcagaagtggattgcagaagtgggggtacctcccaggttctccagcggggataatgccagtgctgagagccgactgtgccaggctccttcacattccctcctcgcagccccacgtcgtgacaccccaccagctttgacaaccagccacggcaggagcatttacaccacggtcatccacaaatgctacaggccagcacacggctgctgacgggagaatctcaagagtcaacagatgaagaaaatgggtgctccatagaatgccaacagctttagtctaaatatacacatttttatacatggaagaatccattgtcaacttttaaacattggttaccttttgggagaataaagggaatgggggcgatga

SEQ ID NO: 837 - DNA, 627 bp, Homo sapiens
acggtgggatttctttccgtgctcgcgcgttcagccccaagtctcagggccactcgtctgggaagttgtagaatctgtatagccaacctacacaacctccaaggggaacagccagtgtctgccagatacacgccacgcttgcaccagcttggaggaaatgtaaggagggaagagaggagacgctgacatcattgaatctggagtcatctgagccagtgacttgtcttcccagatagacttcaacaaggtgtccaactcagtggcccacagtaaatgtcaaattaatgaagacaaaatggcaataaggaaaaggagttccaggcactgtgacagatttttttttaaggttgcctgttttaacactgaaaacaatcagcatggtctgaaagaagattgtctagaggaagaaaggaaaagataatgagattttttgccactgccttgaggatccctgattcctattgattttacctgcccttggacctgtccacctctatcttcacctccacctccctgatccggtctctaatcaactctcacctggacaacagaaatggcagcccaaattgtctcccacatcctgtcttaatccctctggtctctactaaactctgcagcctgagagaa

SEQ ID NO: 838 - DNA, 781 bp, Homo sapiens
gttgaagaacatgtcacaccagcacacgccgccgtcgccagcagcaggaagttgttgatttgcagcatattcacactttctgatgcagtcagagctcactgcttctcagaacagatccactcagaaggaactccagtttctgatgtttattttactttttcttccccccaaacaaggcacaaaaggggaaaatgaaagggacacaagaaaaaagaatcaagggtcttactgaccccatcacacacctcctctaatgtcatggctggaaggaaataagaagcccttcctcgggagaatgccagaggcccttgattgaagtcaaggacataagggatgacctcctcccagtccccagccctcaccttcgccttgcgtttgctgtcatccatgatcatcttccagtccgagccgttgttgctgtacccgatcttgaacttcctcatgaacaccttgttctctcggtgcttcccaccctgaatgatgatgcccctcacgatcttctcctcccccaggtctatttggagccactcattgatgtaggaatgaggtgcgggtggaagtgcccagccagagcgactggttaccaggcggatgttttcaggcatccagtttctgtccccttggttggatgatgtgatctgggagtcagaaataagtccagacaccatacccaacattccagagcaaggataatctgggaagtgaaatgaaacagataatgtaaaatgatttcctgggcgactccatgctaagaaataaaatacaacatatggaataaaga

SEQ ID NO: 839 - DNA, 2311 bp, Homo sapiens
atccgcagcaggggcaggaagcgctcggtggtgaagtagcgcagggtcggcttcggggcgcgcaaagcggtgaggaagacctgcggcggcgggaggagagctgtggccaccgctgcgcgccggaggacgcaccgcccccactcctggagtccagcccggcgctcacctccgccacctcctcagggttctgcgccgcctcgcgaaagacttgcttgctgtgggcgaggtattggtagaagcggtggaaggtgtggatgtccgtgcggtccagcacctcctctgggctgcccaacaccttctccatgaaggcggtgtgcactgggccgcactcgatcaggctcaagctgctggccggagagcaacgagtgggagggggcggacgccagccaggccccagtcccagccccaaccccagtcccagccccaaccacgtcccggcccccgaccgcgagcagcaccgctgcgctgggaagtgaggcggaaagggcgctggggataaccagaacatttgaaacgcgggttcctgccggagcagccctcccaaatccatctgaggctacaagggagccctggtgtcaggattcgaatctagcggggtccctggccgctgtgtgaccttgggccagtcacctaacctctctgggctggagcttccccataacaataccaacacttcagcagctaggtcagcaggtggcacaatgcgtgccatgcgcccagcccaagtgcctggcacacagctaatgtgagccgggcagagagggccagggagatcgccccagagcggctcccgcaggacagggtgctcggcgtctctaggtcagagttaagagggttcggggaacgggggtgttgactcactggaccccaaagggcagcagcagaaccgccagactctcgcataagccttcgagcgcgaacttgctggcgcaataaacgtcattgaaaggcagcccttaggtggggagacgaggttcctgaggcgcagcggccagggggtcatccccgggcagacggtgcccctccaagctgacggcaccccactccaccccccccgcggaacctgccttcaaggctcagctccgcacacaaagaatctggagctgccgaggccactccctaccactcacccatcaatcctcccacgctcccggtcaccaacacgcgtcccgaaccgcgcctcttcatgtctggcaggaaggcctgcagcatccgcacagtccctactacattcacgtccagcacagaggccacggcgtcctcccccagcgcctccagcggccccagcaggcccaggcctgcgttacacactgcggagacaagaggcccgaccagcccgcctcagcatcaccctcagcacggcctgtcccctcgtgctccctgggcctgggaacatgttggtttcaacgcagggcggagaaggctcctaggagcccatatgcttccaggaggctcacccagcacgtccacgcggccctcagtcacgcgttcccgggcagcggccacggattttgagtcccttacgtccagctgcaacgtctccagggatcccggagggcatgccagggcccgggccgcctcccacagccggccctgtgttttcaggtccctcaacgtggcatacactggaggttttgggagaggaggaagatctgacttcccttctggcctccaagggctcctcccttctctccctccctgtccctgcctatctatacctttgaagctctgggatggatctgaagccagacgtacggccaagtgcaggccgatgcccgaggaacagccggtgatgagcaccacggtgcgggccatggtgagactgtggggagaggctggggctctgggcttgatatcacctgcttcgccccgccccgcctgcgggcccccaccccttgttgtgtctcccacgcaatctcaaggataagccttcctgcgggtccctggcccgctctccccaccctgttctgagccaaaacagacatgagcccactgcttggaacaacaaactgtcctggttgctggtcagagggaggggaggctttacaagcaggtgtgggttcccacgtgggcacagagtggccccctgggcagattcccctgggtatgcctctgtgccacaggagcgattatagtgaccgcagtttgctgcagaggctgtgaaagtaaaggcgttgggaggtgggagatgattgtatatgtgctggtttcgtccagggttcctagctcataactcacatgaccatggttacagtcttacgttgtcatgttggggtgcctcaggcctcaaaaaacagcctttcgtctctct

SEQ ID NO: 840 - DNA, 415 bp, Homo sapiens
agtgacatcaggttggtccacatcctagcagttctcttggtgttcctgcgtgatcaaaggatgactgccacaccccagcctgctgacctcagccctggcgtgggcataggagggtctgcgtggctgagcatccagtgtccttcgtactgccactgacagcctcaggcctgatttccagcactgtctgtccaggagcaatgggagcaagagtcactccacgagactctggaggcctgatagacaaaatacatgaagaccagtttctacacagagaatcactaaaagatggccaggcgcggtggctcacgcctgtaatcccagcactttgggagaccgaggcgggcggatcacaaggtcagcagatcgagaccatcctggctaacatggtgaaaccccatctctactaaaaatacaa

SEQ ID NO: 841 - DNA, 833 bp, Homo sapiens
cgccgtcgaccccacgccacgcagaggtgaagatacgcaggacgtcctctaaagcaacttccgtgggtgccaggttgtgggctgggggcggtgctgaccttgagagagcggaggaggcgcaggcgcagcacagtttaaacttgattttgtgaggggacgaacagcgtgacaattaaaagaagatctgggaatcgtaagtactgacagaatacctggagggaaggtgggactggagaatagtttgtgaaacagatcctgctgaggatgaatccagaacttcctgaagggttccgcttctgctgtgtagggacaaggttgtaaatagacaagccacaggcacctgcaaatggtaagtgtggtagagaggggctggaattgcctgttggtgtatctgtgggaagcagctgctatccttgaggaagaaaagatggagaaggtaagtggctatcaacctgtcagagacaacacattctgtgaagttgtactctttcatttctgacactgtggttcttaatatctgtcctaaacctggcagtcattgaggttcgcaaagtatctccttctatgtgacagtaaaactggaattactatcagaatggaatccattcctgctagagtaaaaccatgaaaagaaatcgcagttttgattatctgcttatcatttttaatagatcacagagtgcagtgttccttatttgttgtatggcaagttgatgaataactcttgattaatatcttttaatgttctgtttcacacagttctctcaattacatgtgaaaaatctgttatataagtaatgctatttaatgattaaaatggatatatgttttaa

SEQ ID NO: 842 - DNA, 1662 bp, Homo sapiens
agggcctggcgcacataaggtgtgaccttttcattcccgttgttatggagggccacatctgccagagcctggagtctgcgaaggccgggacccggttccccggcccacagtgggggtgtgcaaacccgagagaactgggtaagttggggtcggcttgcagtttggggtaccccgagggcggtgtacgtcggtaagattgtaacagtattactggaagacttattcgactgtcctgatgatacttgtaataggaagtgccgtcagaagcgataactgacgacgtctaatgtctatctgaccgcagtcgctgaaacctctacaacttagttgaccgtaactgccagagccctgccctgaattcctgtccttactccctctttaagattgcgtacccactgcagagtgctgaagacggggtagccacgaggtgagaggctctctggtgtagggtttaacatggaacgtagttttgtcacttgaatgcacggaaattggcgttttgacagttttctacgtttaggtgttttatacactttagggtaacgttatcatgtcattgcatagggtggaacttaaatagaaactggagatggctgcttcagccacagtcctaacctagaactgcatttaaagcaaactgataatgcagaaacaaactccttcgttaagaaatgtctccagtagcagggttagcttaagtttcaggtagggtctagatctgcggttggaacagtactggagggttgtgaggtgcttgactgctctgatgaaatcactaataggaagtgccgtcagaagcgataactgacgaagactactcctgtctgattgcagtcaagtcttcaccacttgctggttcccaggagtaaacttgtttgaacggtgacctaattgctatattcacctaggttgcaaattcgtgaagaatcagcatcatgtttggcagctgagtattggagccaggagcctgccatgaggttttgagaacagagtgctgttttagagctggcagcagcatctcagcccaagagaaggttatattcccagaggatgtcagtcccaaggaccagtagctgccatcagtttggattctgaaaactaactggcatcaacactgggtgtagaaacatgcttgccttatgtatcagaggacatgctcagcagatccaagagatatatttggcaactttttctagaaaaggcacattgggtatcattcattacattcttgagtttttttgggtttttttttttttttttgagacagtcttgctgtattgcccaggctggagtgtggtggcacaatcacagctcattgcatcctcaatcacccaggcctaagcaatcctcccaccttgtagctgggactacagctcacagcacacctggctaaaattttttttttgttgagacggattctctatgttgcccaggctggtctcaggctcctgggctcagatggtcctcctgcctcagcttccaaaggcacaggccaagttgtagctttgtcccttgccatcatgcccaacaagaggttctataccttttaatgaattgactttcataaattggttatgttggtgggcaaagttctttaagctggaaattgtaaattcctcctgaaatgttttttcatgcagttaccatgaactaatactacaa

SEQ ID NO: 843 - DNA, 982 bp, Homo sapiens
ggttaaaaacaagtagaggttagttatacaataattagtatataatgacatttaggcaacctgacgtcactctgttttgccaattgcaaacatgttactttccattgttagatagaggattgctgaaatgttatctaaaagtccaaacatgtacatgaattgcaaatgcagcttttgatttgtggtcttgtttttagcttgaccttataatgaaatctatttttatttttaagtttatttttttaagacaagatcttgctttgtcacccaggctggagtgcagtggcacaatctcggctcactgcaatctctgccccccagattcaagcgattcacttgcctcagcctccctagtagctgagatcacaggcatgtgccaccacgcccggctaatttttgtatttttttaatagagacagggtttctccatgttgaccatgctggttgcgaactccttacttcaggtgatctacccgcctcggcctcccaaagtgctgggattacaggcaggagccaccatgccctgccttaatgaaatctattcttattgaagagagtggagaatgtgttttataaggaaaattgtagcaaatattaaatgccacaaagttgtctcagtatcgctaagataattaaggtctttgagaaatacaagtaagaatttaaagagtagagtaaagaaacagactaaagtaagcacaaatgtttccttacagtcaagggatttgtacagccctgtaggagacacctccagagaaagtaacagctctcaattgattagctgagccagaattagcttctgttacttacaactgtgagtcctgactgaaaacatatttcttcctttgaagaactgttacctgtaacaggctaagaagaatattaagaataaacagatgcttttacagctcgccttggcgggaagatctggcacaaatgaagtatctataaggagcagcagagtcaaggtggtgatcctgtg

SEQ ID NO: 844 - DNA, 2614 bp, Homo sapiens
atttttgtattcttagtggagacggggtttcgctatgttggtcaggctggttttgaactcctgatttccggtgatccaccaccctcggccttccaaagtgctgggattacaggcgtgagccaccgcgcctggccggaaatcatgtaatttaaaactatatatgggtgtcttaggcggcatcggtcccaactctaaagtacgcgttagacgggcctgggccagaagtgggccatggagacctcgggacccgcagggctgccgcccgacccagcgagcctctgaaggtgcaccgccacccccactgtttatcttactgcctcatagtaggcacattgtcgttctcaatataattgcacacagttttattctggatcctcatttgcctttaagaattttctcaatttttctttttatttgatcgcaccactgcaacctccgcctgctgggctcaagcaattctcctgccgcagcctcccgagtagctgggactacaggcgtgtaccaccgcgcctggcttatttttgtatttttagtagagacgggatttcaccatgttggccaggctggtctccaacgcctgaccttgtggtccgccacgccaggccgaagattttcataatttggaagcattgcgtttcgtaattatgctttctcgtatttttgtgatttgggtcatttttatttttatatttttaggattacaggcgtgagccatcgtgcctggccgatttgggggtaattaacaagtccacgtgtttcatttgaatttaggatagctgggcctaattgttgtctttgcttctgcggtaccttccacatagtactaaccgcctattgtaaagtaattagaatagctgaatatgcatgttaccagtctagaaaccgatttttttttaacaccccactgtggacagggtggaaactcgtttgctttcttgtttaagatctgtagtaacatgaatggatgaaattgtttcctattggattctgtaaatttatgcgttacactgattgtccaacgtggatacacccgggaggtcactctccccgggctctgtccaagtggcgtaggggagcatagggctctgccccatgatgtacaagtccctttccacaacgttggaaataaagctgggcctcgtgtctgcgcctgcatattcctacagcttcccagagtcctgtcgacaattactggggagacaaaccatgcaggaaacagccttctagagcactgaatctggattgaagtctttttttttttttttttttttggagatggagtcgctctgttgcccaggctggagtgcagtggcgcactccattgcctctgcctcccgggttcaagtgattatgctaagtgattctcctgccttggcctcctgagtagctgggattacaggcccccgccaccacgccaggctaatttttgtatttttagtaaagacagggtttcaccatgttggtcaggctggtctcaaactcctgaccttgtgatccgccagcctctggcctcccaaaatgttgggattacaggcgtgagccaccacacctggctggattgaagtcttaatacatgtttaagaaaaattggctaaaaagtagccaggcatgatgataggtagctggaggaaggagaatcgctggagcccaggagtgacctatactcaaacctatactccagtgccactgtactccaaccccaggcgatagcatgaggcccctcgttgaaaaagtttagggttttgctgtactaatagattaatatcttgttttgcaggatttgttaaggattccaagtaactcttatttggagagaagacgatctgcacttcgcattttggcattgacatttaattttagggtcctttatatagaagggagagtaggtaaactgatttttttttttaacagggagggtttgacaatctttggcagacttggagcaaaagattgaggtgcatttcatgcctccttttgagagtcttgctctgtcgcccaggctgtagtgcagtggcgcaatcttggctgcaacctcagcctcccaagtagctgggattacaaacataagccaccacgcccagccctcatacctcttttaaaagtcgacctgttttgcagaaagtctgctgtttttgtactaaaggctttggaatttggcatttagctaggaatgcacattctttcacctcattcatactttaagaaccacagaagtgactctgcttggccagaaggcacactgtgttggtggttatattaaaagtccttgagtattttgcttttcatgatcttgctcactgcaacttccgcctcccaggttcaggcgattctcctgcctcagcctcccaagtagctgcgactacaggcgtgtagcaccacacctggctaatttttgtatttttagtagagatgaggtttcaccatattggccaggctgttctcaactcctgacctcgtgatccgcccacctcagcctcctaaagtgctgggattacagctgtgagccaccctgcccggccacttttgtatgatttctaatgtatttgtaatttacctaacaaattgcctaatctgctatgttaatgtatttatgaattaaaataaatacgactgc

SEQ ID NO: 845 - DNA, 3402 bp, Homo sapiens
tagatgtttcaccagcatcataccttagcacatgcctcgcgttcttcccagaaagtcagccctgggaccaggtgggctggtaaagtcctcagtgctgggccctgtgcctgttgcatgagcctgtgtcactgtgactgtggaagttggagctagtgagaggaggaggaggtgggcagaggaaggagggtcccttgggctcgagctccacatcagccctgagctgctggcaagcacccctggcctgcagccagggagagccagagcctttgccaggcagcgagcctccgtgccttccactcctaggtcaggttttgacagcaccactttattactttgtttaagctgttagaaaatttcagaacatcagacacaccctattcaaatgtgagaacaaaaacaccttccagcagtgcctgcttctggaacaggactcctcctgcggaacagggttttgctcaatgactacctccccggtcatgctgctgtccagtgagcagccgggccagagcttgtcggaccgcagtgtgttctctgctagatgcggcagctgtgactcagggggaatgggggctgtatgcctgctcctgacacacctctgcccgttgtgctttgcaggtcttttatcagaaatcaccgatccagagagcttcctgaaggacctgttgaactcagtcccctgaccaccacacagcagctgcggcggcgaagacgaagctggcttgccttccaccctctgttctccctccttgtgcattaagttccctccgcgggatgctgcattgttaccccgccctcccctctctcatttttcttggtgtggcttggggtttttaggcttcctgttttatctcgtgtgtgtggtgcaccagctatgaggttgtctgtaacccaagccatcaaagggcctgtacatacctaggagccatgagttgtcccggccagcttcatacttgagtgtgcacatcttgagaaataaacaagtgacttaacacacattgaaaaggaaggtgttgcctgctgcttcaactcgtcctcagtggcgcaggccaaatggtttcccttgaatgcacagccatttccggcgtcagcccgggaagactcatgtcagacccgctgtctccaggcctgttgtcagcgctaagtgcaacctgtctattcttggccagcaagttggggcaccacattggatggctctgatttttcccaaaacaaagcccatgccttgctcttaattttttggccttaagagctggaacccaaagacacgtggagcccagagctttcctagccctcggctgaaggaaggctcgcggagtagggcacagtcttgttggaccacagaggcctggggagcatttgacattctcatgctgctgtgaatcgggaatcccttggtgacttctctccagggttgtcatgttaagagagggcctggggcagacttaggatcaggataaagagagtggctgctattgacattgccaagcacccagtgtatcttatttctaatctctttgcccatgagccagagccgcttgcccaagggctcccagccaggggctgtggagttgtcaggtttgtgcctccgaagctgtgtcctgaccactgtggctgccgctcctggaggcctcagacctgctcccctacacacgtgggcagcaggactcccgagggcctctccccagacttcgggagaaggctcacctcgtgggagggagggctcgctcatgcccatctcctttcgttctttgcgggccactcggccaactgacgtcggcctctcctgtctggatgtccagtttctgtggctcactcctcaagccagatcatctgggactgagggtggcctctgggctcctgtagacttccacagccaggatttcacatccctccccagagcctcggaccgaacagccacaagcagccatgagtgtcgtgcctggactaagctggagagacaaaggcgtttgtggcaagggcccagctggaagccctggcaggccagagcatgcatgtgctggcttgcacgagcatactttggtgtttgtgttggggacaccgggcttctgagggactggcgtggctccagggtggggagcagcctggttgaagcgcggccaggcactcactctgttgttcagatcccagctccactgcctgctgtgtccacagtctcctcacctgtcaaatgggaatatctatgtggcgggagggtgctgaggtttccacgagctaatctgcctgctgtgtagtaactagtagcttttcttactgttagtgaacttgttttagtctgaaggaaggcacccatgccccaggtgaagtccagctgagttcagtgaggacgatggagacccttggtcttggcacccttctgccttatactgggaatgcctcaggcttgctcctgctgtgtgtctgtggttgcccactttctgctggtctccgagagactgattcaggtgttcaggagtctgttcgctattacatcacctccttgtgagaaataaagtggagcagcctcatccagacagcaaagcaaggagggagcgtgaggagcagccaggtgagctggtggcatggggccgcctgtgcagaggccggcctcgctgcttcatgtggctcagggaggctcagcacgtccgtcatcacacctcagggcagcgagagtggacctggtgccttcagaagcccacccgaggcctgctgctctggcctgcaaaggtggagtcaccaaagctcattacaaagtgtttgcttatttttgtctgccctgcatttttttatttcttgcaaaggcctcagaggatgtgggccccagcccaaacacatcttgttttcactagtagagcttttcctagtgtctgcacaggggtgcttccagtggctctgccatagccccagacaagctgctgacacggcagccatgaggtctgggacaggttccagggggtgcttttggcctgctccagcaggagtggaggctggactggtctccagcaggagtggaggctggactggtctccagcaggagtggaggctggtctgggctccagcaggagtggaggctggtctgggctccaggagtggaggctggtctgggctccagcaggagtggaggctggtctggggagagagctacacctccccaggcccaggtctcacgaaaggagcatcgaagggcaccgaggaaaaagccacttagccctctcctgtcctgcaccattatctgggcccattggttcttgggtccctgtctttctcaacaggcagccccagttggggaattaagttgattctggactggctatgcctaatgatagctgcaatttgaaacccataaagttcgagttcagcaataaagttggggaggcagtgtcaacaccttccttgtagaacggc

SEQ ID NO: 846 - DNA, 2590 bp, Homo sapiens
cttctcctcgatgtccacgagcttggtgatgaagtccttcagctgcgccacgccctggcgcacggtgggctgcagcggctccatccaagcctccttggccctggaagccggcgtgtccatgttgcccacgttctggactgcctggaggtgacagcaggaaggaccaggttctgctaggtttaactgacgctgctgcactggataccccaccccggtgccgggcacataggtgcagcctgagagtaagcagacctgggttggaaggtcccgcgattcaccaccgacaggatgggcggccttggcaacccccgacccctcgcaggcctgttcccttatccatgagatggaactcggacaaggtggccacaggaaggctttgcaaactgtgaagtgcagtgcctacgtgggcgtgccagtggcctcgccggagccggtagggaacactctgcagtccaggccagggccccggtaggacacccagctgtgcatcccgcccgtggccgcaaggcccgcaccttggccaacaggagcagggtgcggctggtgcgggcgtccgcgtggcgctcccgcaggtggaagagcttgggcgacatgatggcgggagagaagaagcgcaggcacaggaagctggtgacggcgatgaacggtacattctggaggggtgcggaagagcgcgggctggagtcccccagaccagggctcctggcagccccctccccttaggctccgtccctgaccctcgccgggacacagcctccctggtcctccccagcgctccctggttccccaccgctcttcgcccgcccctcgccccagcccagtccaacccggcccagcctagcccagcgggtggagggcgcacctcgtgctgggcgccggggaagcgctcgcgcacgcgccggaagagctggcggaaggtggcgcgcaccacggcggggcacgcgggaaccgagcggctgagcgcgctcagcagggcccccaggtgggcgcgcagcgtctgcgcgctctgctccagcacctcggcctcggtctgcgggcggtgcagcccggaacacctgcgtggaacggggcgggttggcagaggaggtcacggtcagcgccagggccacgacaggaacagtggctctcacagcagccgggacacggacacaggggacaatacacgggtgggcagaagcacaaacacacatgctgacagggcctgatcccaacccgctgccgctgcgccccgcacccccccggagttacccccggcctcaccctacatccttaacttccactttgctggggtccagctccacgtacttctcctcaaacaccttgttgatgatggggcccaggacgccgtgcaggtactgcatcccggccacctggggaccaccgcaggtcacattgatcctgtctcccccagtcccactccagctgcccaccttctcccggcagccgcccttgcaccgtttgcctgccgtatccgcccaggagggggacaggtacacaagcagggcaaactgtttattcatgaatgaatgaatgagtgagtgaatgaatgactagaattcttagcccttgtaatcctagcactttgggaggccgaggcaggaggatcacttgaggccaggagtttgagaccagcctgggcaacatagtgagactgtctctaacttaaattttaatcacacacacattcttttggggggggggggtgcggggcacggagtctagcacggggcccaggctagagtgcagtggcgtgagctcactacaatctctggcttctggttcaagtgagtctcctgcctcagcctccccagtagctgggatcacaggtgcccaccaccatgccaggctaatttttgtatttttagtagagatggggtttcgccatgttggccaggctggtctcgaactcctgaccttaagtgatccgcccgcctcagcctcccaaagtgctggaattacaggcatgagccactatgcccagccacattcttaaccttaaagggctctcaatatggagatagaacactggagtcgaagtcccagccccctctgtcgctctctctgaagctcagtgttgtcatttgcaagatgaggacaatatagcatgcaacctcaccttcagaaaagactccatggactttgaggccagagagttgctccggaacagggtgttggtcttttgttacttggtcataagtaggcgttttccttttgatttggttctaggaggttagtgtgcattggcgttctgttgcctgcttccagcccctattctcctgcctcaggttcattagaaaagactgagtttggggccgggcagggtggctcacacctgtaatcccagtactttgggaggccaaggtgggcagatcacgaggtcaagagatcgagaccatcctggccaacatggtgaaaccctatctctactaaaaatacaaaaattatctgggcatggtggcacgtgcctgtagtcccagctactcaggaggctgaggcaggagaattacttgaacttgggaggcagaggtttcagtgagccgagttcgtggtcactgcactccagcctggctacagagtgagattccatctc

SEQ ID NO: 847 - DNA, 1612 bp, Homo sapiens
aaccaggacagaggctgcagcacccagggaggaacgccgtggtccctgggacggccaccaggccaggaggctgcagcaccagggaatctgtgctcacgtcttccaggacagtgcttcttctagaagctgacatggagctgaccacagctcttggaggcatggcctgaggcttagaaaatagacagagatcatctgagatttcagcagtggggccacgtggcagcgcccgaaggcctggagcaggagcgacccagggactcagagcagcatcttcttaggagacggaaggagagccgccggaggagcacggggcacctgcgatcgcgaagagcctcctgttctggatgggagcgaaggctccgagaggacctaaggttgctcagtgggccatggaaacggcagtgattggggtggtggtggtgctgttcgtggtgactgtggccatcacctgcgtcctctgctgcttcagctgtgactcaagggcccaggatcctcaggggggtcctggccgcagcttcacggtggccacgtttcgccaggaagcttctctcttcacggggcctgttcgccatgcccagccagtgccaagtgcccaggacttctggaccttcatgtgacgcccgagtccccaggatttgctgtgctgatgggtcagactcacccgctcctcagcaagccttccctggccttcccctcctcccagggccttctccctgtccttcccctccagtaacctgtgaacttcccgtctcctcccattccagccttctgtgccctccagcctcagggatccttgttattgggacagcccagctggggttgacccacaggatggggcttaggagagctctgaggagtgagtgaacagacagcgccggagtgcacggtgggccggctctgctgatctacaccaggaactgaaatatcactggaatttattgtaaacggtgtgcctatgatgctggttctgttgccacctgggcacgcagcaccctcaagtggacatttctagaaaccgcttcttacttgctcctaattgattacttttgcacattgcacagaacccaacctcgaggcctgctccctgccagttgcctgaaatcagccctgaaattctgaaaccaaagagctgcttcctgagaacaagttatttaccttagaattgaaaatgtatatccttttatgggcctttccaaatctgattagaaaaaccacaaaaggaaacagaagagaaaataagagccacagaaagtacaatatgttttattaacaggaaagccagaaataagatattttaaacatatttttaatgagactttattgctatattccaacaggtcactcctattcttagagaatgtgaatgacttgtgtcacttcggagtgacagaaaaatcaggaactgaaagataattccagacaagttaaaatgttatgttacattcaaagctcttgttttcatcacaaataaggggatattcagtttttattaacagaaaacccattctcccatggccatggaataaatgccatgctatatttaaggagtttggtttgaagggtgcaaaattgtgagcctcctggctcttatgtctgtatccagccctgaata

SEQ ID NO: 848 - DNA, 437 bp, Homo sapiens
gcgtgaacatccagagttaggtctcaaggctcttctggttctaagtcctaacaaacaatgatcttttcagtgaactgtagaattctggaaagaataagcgtacctccaggctgcttacatcaatagcttacacgtgcttcctgatgcctgccttaacaacaaaaaattcgtgtccatagcaaatatttattgcatgcccactctgggctaggcactgttttagaggacaccgcagctatcaaggcagatgtggtccctgttcccatgaggctcctacatttgagtggaggaagatgtacttgtctacgttgggtgatgattagtgccatgaagaacaaaacggatacagtgagtaatgtggacagggctatcttagctatcactctaataaggtgatatctgaggagagatctgaatgaagtgaggatacaatggat

SEQ ID NO: 849 - DNA, 292 bp, Homo sapiens
gccgcgtggtctctcacgcaggggcgccgggcgggggaacgcggccaccctgagtctggtggaagatggatgcctgaagtgtagactgctgctagctgaataccatctgggagcataaaggtgacctgaaggatgtccttggtgaggattttgaaaatttgatcttcacaagagttgcctggatcatttgaaatttctgggagtctgaggagtactgacataattacctgctggagtctgtaaatacacatttaagacagtgaggatgtgaataaatatattaatgcacttt

SEQ ID NO: 850 - DNA, 954 bp, Homo sapiens
agtgcaatcttcggttgcctggactagcgctccggtttttctgtgctgaacctcaggggacgccgacacacgtacacgtcccttcgatagctcagctggtagagcggaggactgtagctacttcctcagcaggagacatccttaggtcgctggttcgattccggctcgaaggagacaagtgcggtttttttctccagctcccgatgacttatggcactttccttgggtgccttcagtgacacattgcattccaacgagcagtttgaaagtctagcgctttctccccattttgggcctcccagcctgcacgggactcatctgaggctaagctgcccatagttcggggagacccacagggaaaacaaaacaagaaacagagaacttggaaacggacgctgattactttgaacgtttgctcaaccgaggaagcaggaactgttcggccccatctcaagtccgcagggcggactgcctggctctgggcagatccgaggtggataggacaaggcaaaaggtagccctggagaggtgagtggataaagtccctggacacaggggctgccgttggaggaggttgtaatgtcattgtcctcctgtggaagttaactgtggagaattaactagagaccagcgctgagagagaattaattggataaaagttctatctaggacagtccttgagcgtaattttgtgaagcaaacacaagacaacaacaaaacgagtaaaacctaaacacacatccacacactcactgaaagattcagagattgcacagaacacaaagacttttctggtaataaaatctccctatcctaattttctagaaaaaaagctgttgaagccaccgcgcagttcttacaagacataacacaaatcttccacacaaaggcagaaatacagtatcaacctttgtgaggagtacagcaaataaatgatgtttctttagggtccta

SEQ ID NO: 851 - DNA, 738 bp, Homo sapiens
ggaggagggacccggcggcgcggcgtgggtcgggagcgggcgcctgggactacttctcgtttgaaagttttcagaggccaaaagtttgagccggggctgcggaaggatccggctctggcggttgccgcgctcggcgacaactggcgactgaaatttgcatagaagagagtggcccattcggtgtccacccgtcaggccacccagcagccaggcacgctcataagcccgcgttacggatggtgcggccgggtgcacaggcccgagggaagcacaggcctcggcctcccagctcccaacccctgcaccacccacagccgggagtaccccatggacagctgtggccgaggagaagccagggatgagggggatgggcctcacctccccaccagcctgggaagggggtaggcccctggcaagtaggagggaagctgaggctcagagacatcatgaggatgccagctcaaggcccagccaggccttggtcctcagctgctgtcatccagtagggtaagtgggacccccaggaggtgttgggggacactcctcccctcccccacactcacagtctgttcaccgcccaaggcagcaggctggactcggtgcagggaccatggcttggcgtggccaggttggagtggcccctgggactgaaagcagggggcgtgggggctctgaggcggggccgagtgcggggacgtcctgtggcgggtaccctgctgggtcctgggtgggggccac

SEQ ID NO: 852 - DNA, 2388 bp, Homo sapiens
aaacaatctcgacagcgcatttcgggagccacggctccgggcgctttgctgggggctaaaggggtttatccctttccttgaatcccagcaggctagaactaccccctcccagtcttcaggcttgccacgctctccacccgatccttccattgaaaggcagagaaggaaggatgtgcttgggaactttaagacccacgaacgacagcgcactgatggagcagcccagtgtctggggcaaagtcctcgaggttcattcattcaggaagcctctgaccagcctttaccatgcgctgagtgagaagctgaggataaggaaagagcaagacccccaagaaaccctgatgtctggctgaaagccgaagcatgacgcaactttgctatatttctctccaacaaggatttgtatattttcgctttctcctcaagtaacacctggacctgctcctttcccttcaaacgctgagggctcagtctccaagttcctttatgaaacagggtgtaccatcagagacgcaggtatttattgaaacctgctttgtgctgggcaatgtgccagatgttggggataaaatggagacttcagaaatgaagatgcaaagacaacaggggaaaccatatatgtttatggacagtcatgccaaagtatgattggaagacaaaaagacctgtgatctcactatgttgcctcggctgctctgaaactcctggcctcaagtgatcccccctgccttggcctccacagtgctggaactataggtatgagccattgcacccagccaggaaatacaattttcgaaagactaaacaagtttctaaaatcatggcacaattaagtagcaaaattagaatacagagtgggcttgttggaaagcgtcaactattaatcaccatgccatacttttgaggagcagaccccacacttgtaaccaggcccttcaatttatcattcctgcaagtcaagacttcacctgtgaaccagctgccctctgccagcccaacttcgtggatgtgcaatctctacagttgcacagggtcccgtgtttagtttagtactttgcttttgctatctttaaatacttaataatttttaaacaagagattccatatttttattttgcactgagcttcacaaattacaaagtcagcgctatccacagtacccaagctataattaatacaaagctttaaaagctgcatggagtttagctgaaattgctgcccagtccgaagctaattttggaagatgctgttcggtcttaggttatgaaaaacggttctgcccttttacaactccagcaggaagagctaagctcccaatattccgtccattaatgtccctggtgagagtcttcaaaactcacgagcaacaatgcaagaatttcccagccttcaacgtgtgacccacttctacattattgactccaataaactgaccaattaaatgtttttgtggtcacagaacttgtaattatgtggttaaagatgtttcagatatatcacattctttcacactgtggcagaaactattggttaaataactcagccatgtctatcttccttgtccaatctgcacaaaagagactggaaaaaagctggacacttgcttctttcccatcctcctttgcaggtaagcatcgctgtgtgacttagttctggccaatgagatgggaaggcagtcttctgggatgcaaaaagcttttttctttgttaataaaaaggagaatgcctctataggaaaagatctttttcaataccactctgttgcccatttcctaccttgatgttgtttggagctacggcacccatcttgagataataaggtaaaacacatcactaggaaaaaccaacagctgaatttagagtagacaggatggaagggacctggtgatattgtggagcaatgaacgaatgctgtcgactgcctagttaacctattacttgtttaaatctctgataggctatatttttaaaattttgcaaccagggttattcttagtctaagcatgcaactttgaaaaatgtgatccctttgacaagataacaagccttccattacctgctgcaggtgacccagtttgctggctgttgtgggtagctcagaacaggaccctaaggcaccttggccctccctctgctttaaaactcaacaccaaactgtattcattcttgtggtactgcctgtgtcttaacatgcatcccaacatctggcacagagcctggcactggcaacctcttaggaaatttgttaaatgaactgatagtgtagcattctgtcactttcctcagcgataaaattctcattcttcaaaaaattttccttttgcaactgaatttaaaaatgaaatacctaccacctaccacttcaagctttgctaggtgacggcttac

SEQ ID NO: 853 - DNA, 14667 bp, Homo sapiens
cttgtgatagggagacaggagtcctaggaaggaaatggaactggtgatagggagacaagagtcctaggaaggaaatggaacttgtgatagggagacaagagtcctaggaaatggaaggagagcacgtttcactctgtccagcagagggcagcagctacccacaaatcaacagctgagcaaggccagggctgtgtgggagctatgcacaggttctgcctccagaagccttcagtgcctgcctctgagccagagggttccaagcagaagaggtcccgcccccggagagggacctcagagaggtcctccaagcccctctcagctcttacttacggcatcccagatgccctattcctcttctgcagagagaaggtggttcagccactaaatggtgctgggacctcgcagtttggtgggaaggaggaagcttactcaagcaaggaatatgagacaggcaaaaacccacgcataagccaaaagcccctccaaagcgaggtgttgttccaggctgacaagtgtccagcagggtggacttcagactccctgttaggaactgaattgtgtcccccaaaaagagaaagtcaccccagggtatgacctaattcaggaaaggtcattgcagatgcatttaattaaatgaagatgagctcatgctggagtagggtggactctgaacccagtgggacaagcgtccttattaagaagagggaaatctggacacacacagagcagagaccgccgtgtgaagatggaggcagagatcggagagatgctgccacacgccacaaatgcctggggctcccagaaactacacggagcctcccccagcggcttcagcaggagcatggctcggccaacactttgatcttggtcttccagcctccagaacggtgagtcgttttcctaaaattcccttttccactggtgtgtggtgcaagatgaggcacattttccatggatggtgaacagagggaggagccttttgatcacaaccaggtcaccccacttctaagccactgtgcctccagccccacaagactaaggagagagagcgcagcgtggtggagagtgagctgtgctgggaccattgtttccgtaacctcgttttctgtgtccagctgacacaccttcaaagtggcatcaggtcctaaactgtagcttgcaatgtgcctgtttccagaaaccaaggtgaaagtgcttttagacagtgttcccatgcaagagtcccttcccagcttttttctggaaatgcatgtttctctgaactctgagtcccaagaaaaatcacttgagacaccaagaaaatgggggaagtgctaaaattgtgtgggaattcaagcttaacaataaacatcaagacatttttgataaaaatgaatccactgacatcggggaggagcaagagaacagcacgctgacactgggtcagaggctaagaccgacatttctgggaaccactcccggaagggcacagaggagacgctttcagcctctcatcagccagcctggcctgtagctgctgcacgttatgagtgtgttcctggcatgactgcttctaacagtgagttttctggcaaatcaaataaatactaataagtctgtatgcacattatactttatacaaatcctatgagtgatgttccagaaataacaagttttgaaggcaaaataagtccttaaattggcaactttgacacataattccatgtagtagttaatcttgctagaagatcccaatgttgttattctaatacaatctgataatgttcactggcattttccactgttggcatctttactatagcctacagttgtttgtttgtttatttgagatggagtcttgctctgttgcctaggctagagtgcagtggcgtgatcttggctcactgcaacctccccctcccaggttcaagcagttctcctgcctcggcctccctagaagctgggattacaggcacgtgctaccacgcccagctaatttttgtatttttggtagagacgtggtttcatcatattggccaggctggtcttgaactcctgacctcaggtgatcagcctgtctcggcctcccacacacagtgctggggttacaggtgtgagccacgattcctggctgcctacagttctttgtaaagcagacaaaatagtttcattttttaaagaaatgaacatatatgaggcaacctgtacctaacttaggagttcagaaattccctggactgcctatacattttggtttctcattcctaattcccaaagattaaaatctgtcaggaatttggaaacattgaatcacaggccaaaataggaccatgtctccattcattcattcattcaacaattatttattgagcgcatgctatttttcaggcactgtgccacatattgagaatagagtagtgagtaagacaaagtcatcactttagggagtttatattttagaggagagaaagacaaatgaaagtgtttaggctgggcatggtggctcacacctgtaatcccagcactttgggaggtcaaggcaggtggatcacctgagctcaggagttcaagaccagcctgggcaacaatcccatctctaacaaaaacataaaaaattaaccaggtgtggtagcacatgcctgtggtctcagcaacttgggaggctgaggtggaaggatctcttgagcctgggaggcagaggttgcagtgagctgaggttgtgacactggacttcaacctgagtgacagatcccatctcaaaaacaaccctgggccgggtgtggtggctcacacctgtaatcccagcactttgggaggccgaggcaggaagatcttgaggtcaggagattgagaccatcctggctaacatggtgaaaccccgtctctactaaaaatacaaaaaattagctgggcatggtggcggttgcctatagtcccaactactcgggaggctgaggctggagaattgcttgaacccgggaggcagaagtagcagtgagccgagattgcaccgctgcactccagcctgggcaacagagtgagactccatctcaaaagaaaaaaaaaaaaaaaactcagaactatttaatacaatgtactggcaagcggtgatgagcactatggaaacgtgaagcaatgtttgagtgcagcgagtgaagcggtgctgttttgtttgtgattgtcatgaggacccctcagaagagcagagagctgaatgcagtgagcatagaaccttactgaggcctgggcaaggctcttccagacagcaaactgccctgaggcaggactgtgtttggcgtgtcctggaaacaggaaagaagccagggcctctggaatgtggtgaaggagagggaaaagtagtaaatgaggctggagagagaggcaggggccagaacatacagggctgtgtaagtcacattgagttctttagattttcctgtaagtgtggatgggaagcagttggagggttttgaggaggggtggtgtgatctgacccgcattttagaatcatcccgttggctgaagtgtggaggaaaaaagcagggggcagaagtagaggtgaggggcagccagttaggaggctacaggagtagcccagaccagacaggagggtggctcggccctcagagatcttggtggggcagattagagagtgatcaagttagagctaacaggacttttttttttagactgggtctcgcttgttgcccaggctgtagtgcactggtgcaatcatggctcactgcagccttgacctcctggatcaaggtatcctcccacctctcagcctcccaagcagctgggactatgggtgcatgccaccacacccagctaatttttgtatttatggagatatgggtctcaccatgttacccaggctggtcttgaacttctgggctcaagccttctgcctgccctggccttccaaagcattggaattacaggcctgagccactgtgctaggccagagccaacaggacttactgagaaattatctgagagagaggggtcaaggaagactccccctgttcaaccaagcaacgaggtgaatggtgctgctgcttcctgagatggggaagactgtagaggaaacaaaccaggaacgacaaatcagtaatttagctttgaatacattaggtttgagatggctagtctgtacccaaacagaccacactgtggcatctgggcagcaggatctgcagaatccagcaggatggatgctgatgccaagctgagtagacagttgggtctgtgagtctaaagctcagggaagacctcagggtctgggatacaaatctggagatcatcaccctgtccatgaaagccaagggaatgatggaagatactatgagaaaaagtgaagagaggaaagagaagaggtccatggaaggagacctgggagaatccaaccttcgattagatcaggaagaggagaagaatccagtaaaaaactctgagaagtctctgggaaggaagtcttccttccttcccctgtaccaggagaggtgctatcccagaaattagtaaagaaacagtttttgatggggagaacaggatcacctttgtcaactgctgctgcgagacttggaaaaataaggactgggaagagagcaatagaaactttgaaagccattggttatcttgataagagttgtttctgtgggggtggtgagaactggagcctgactggatgggttcaagagagaatggggagttctagccaagaaggctgatgaggatgagtcaaattaaaaatgttttctttttatgagtcctctcatatttactgatacaactgatatattgggtctccattctgccacattactttatattgatcatgtattgtatctgctatgcaattgtattgcatgtatctgcatggcaattgtattgccatgcaatgtatttttttttactttaaaaattatatttataaaggtttgtaattttattccagtggttattttatatgtacactttttaaaatgctcttaattttttttttaagacagggtcttgctctttgcccaggctggagtataatggcatgatcctggctcatcaaagccttggcctcctgggctcagtaagtcctcccacctcagccacctgagtagctgggactacagtcatgtgccaccacaacaagctaatttttttgtattttttgtagaaatggtgtctccctgtgttgcccaggatggtctcagtcaggcgatccagcgcacaagcaatcctctcacctcagcctcccttggctcttactcttattttcttgtttaagcttttactatctggtttataaatactgcagtattcttcatctcccatccattgctcatacaacaatctaggggcatattccgtttttctctatttcccttgtcccatttttgagttgcactatttccttatcatctcttatcagctgaagctcattctctagtataccgtcagaaaactttttattttttgcaaggggccagatagtaaatatgttcagttttgcaggcatgcaatctctgccacagctctaccattgtagagtataagcagccatagacaatatgtaaacaaatgggtatggctgtcttccaataaaactttatttgcaaaaacaggtggtgggccagatttggcctataggctaaagccctgtcttagagtagcagcagataaggagacagaaaaactgtacaggaggtgagagaaaactggcaggagagctagggggatattgacaaaagaggagccctttaaatcttccaggggtagaaaaaatgaaattctttgatgttactcaatagtttacctgctcggaaggaggaaaagtgtctcttccatctcagagttggctcagcatccatcctgctggattctgcagatcctgctggccagatgccacagtgtggtcagctgaaagtgatttgctcatcctgaaaacagcaggtatagaaagcgctctttcagcgccatggcaaccagatcgtgtttttctaaaaaaggatcagatcagcgggtgtgtccctccaggcattgatccattaatatgcactgagctcatttcagagccaggccctgggctgagtgcttggaatacaaagatgcaaaaggctaagtccttgtttttaaggagctcatagactggaggaggaggcagacatttacagtaaacagtgtaatcacacgtcatcaaaggaagggacacacaaagggctgggtggggagcatctcctcctctttgggagaaactgacctggagacctaaggttgagctgaattttggagaatcagtcagagttggtcaagaggacaaactgggatgggtcaaggaaaatggagaagcttgagagctgtggcagctccgtgaaatggcaagtatggccagaggatggcatctccagggtgccggagatggccatggagaggcaccgaggccaggccatgccgggcctctgctgcctctgctgtcaccaaggtcaaccacaacctagtgcccaagccagtggcattttccagcctacttttactcatcccttcttttagaaaatgctgccttgacagtctgattttcatggtatcatgatccgctatctcctgatgtgtcctctgtacatccagctgctctttctcactctcttatttgtgctctcacttccttaaattttaaccttcttctcgtgctgcactttctccaggtatatgagaaacctctccatttttcactttcatctgtattgctctttgcctgttggcctcaatttctcccaccacaagatgagcccctaaacgtatctaagaatgtggcctcaagaaccccagtgtggcaatcccagtgaaaagccttttcccagtactcatctttccatcctggggaaggcatgggattgcttttggttggttgtgtacctaccctggcacacagcactattatcagagtgatgggccaatacaatatatggtgagggaaatgaggttccatgattggccccatcagtcacaaggatggaaaggcagtttcctaagacagatgtatcaggcaggagagaggagctatacaatgtcaacagggaaagtgtaatataaataatcatgaactaataatagagggttagccactaagggataaaaagaagtctaaaggttacagaaacaggtgaatggataaacaaaatgaaatgttattctgccataaaatggaatgaaattctgatacatgctaccccatggataaaccttgaagacattatgcaaaatgaaataagccagactcaaaagggcaaatattatatggtgccacttatacaatgtaccatgaatagtcaatccataaagacagaaagcggaatggaggttttcaggagctggaggaaggggagaatgggaagttattgtttaatgggtgatacggtttggctctgggtccccacccaaatctcatctcaaattgtaatcccatgtcaagggagggacctggtgggagatgattggatcatggaggtgattcttgtgatagtgagtgagttctcatgagattcgatggtttaaaagtatgtggctcccttctgtctctctttttctctctctcctgccactttgtgaagagatctgccttgcttaccttcaccttccaccatgagagtgtttcccaaggcttccccaggcacacagaattgtgaatcaatcaaacctcttttcttcataaattacccagtctcaggtagtatctttatagcagcgtgagaacagactattacaatgggtatagagtttcaccttggactgatagaaaagttttggaaatagatagtggtgatggctgcaaaacattgtgaatgtatctaatgtcactgaattgtacacttaaaagtggttaaaatgataaatgttatgtatgttttaccacaaaaaaaaaaaaaatacaggccagcctggccaacatggtgaaaccctgtctctactaaaaatacaaaaatgagctgggtgtggtggcacatgcctgtgatcccagctactctggaggctgaggcaggaaaatcgcttgaacctgagaggtggaggttggagtgagccgagatcgtgccactgcaccccagcctgggcaatagagtgagattccatctcaaaaacaacaaacaaacaaacaaacaaagaaaaaacaggaatcgtggatataggggcaggcactaggtctagggctgaagcagagaacccaaggaaggaaccaacttggaaaaaggtctccgcaggaatgagactcagatgccattggagatggtgtggctagagcccgcaggatggcagagaagtttgttgtagtgcttgaggccgggctggcatgcaagaaacccatgcaccggtgggggcagcagggtgggggctgacaacactcactgagaagctgccctctgaggtgcaggcattcactaggacttcacccgtggtatgttactgaaactccggggagccaactgctggagcatttatgagacacactatgccaccatccggggcttcagcagcgtttggtgaaaacctgcctgtggggttgctgttgaatttgctggagagctgactgaggtgctagcagaactcctcaggaaatcaccaggaggagcatccctgggtgccccatgcaccagtcaagagcaggagcaagaggaaaggaaggtagcctcttcttcctgcagtgtctctccagagccctccattgacagcacttaatatcgtgctagcaggcaaagaaatgtttacaggattcatctccagtatcacaaaggaggataacgaagagtggatttggaattcagaggctctaaagtgataactgtcacagcccacccctttggctactcagtttccatatgcaccctcctacacatacctgaacttctatatgacaacgaacaaaatacagctatccttcttaccagggaaaatattcctaccctttctcccaaatgagaagatactcgtgccaacaacaattttatctatctctggctatattcattactcgaatttgatcacagtccctctaaatattctgttaccaaaagaccaaattgtaaagctaacctccaacaacttgtatataaactgataaagggaagaaggagagagagataaaatggatggcattttcccatcacccatctatcagtgggaaagaactctggggaagtgctcttgaggaagtatctttgggaagaatccctgattggccctacttgggtcatgtgtgttggaatctgtgaaagtcgggaattttgcccatcttacaagctagtaagcctgttatggtttcatggatgctggcagatgacatgagactggatcagagacaaaggactacactactcatggcagaacaagttgcacgaggtttgtgttagttagcattggttttccttgtccccaagtcccacaggggtgatgtggaggggcccaggtggttactgtacacgcagtgtgtttgtactgcagctaaggaacactgagcttgggaacatacaatttaatagtaagtggtgagcaagtctgccctttgtctggggcagggggatattgctttgtcaaggctgtctactgcaaacacaaccctgagaaatatcccaagcaaggaacagtcaggaccttgcattcttgtcatccccagcaagagcatgcagagacaatcagagcctgtggcaaattgcctgtcacaaaaatccaccacaaggcctgacagatccttggccaaattcacattttcccatgagtatgctacctcatcagctgctctgattagtctgaccaacagagggaccaaatctgtttaatttgattcctatcacatttaaaattaaggctgctattgacaggacttcaagcaatacagtgcagcaagtctgccatattgatctcacccatgtccccagggtcccgggctcaaccaactgtctaaaagttctgggggcaagggagaccagtcattcctatttcagatagctaggataaaatctaatatcagtctagtattcattatgacccactcatgggagtttagattcactgatatcattgccagtgactacaggaggcaatgtagggagcaaagaccctcatccctgatggaaggacattcatggcctctccctttcaaagagacaatccaaaggggagcaggtcactctagtttggaatttgttgttaaatttgatttgaatcatcattgcattggtttggttaggtaagatggttaaattttacgtgtcaacttggctgggtcatgagactaagatatttggtcaaacattactctggatgtttctgtgagggtgtttttggatgagattaacatttaaatcattggactttgagtaaagcagatgactctacctaatgtggatggtcctcaaccaatcaattggaggcctaaatagaacaaaagactgacctcttccaggcaagaaggaattctgccagcacatgaactttgcacttgaactgaaacagtggctctcctgggtctccagcctgccagcccccaccctgcagattttggacttgccagcctccataatcatggcagcccattccttaaaataaatctcactctctctcttcctctagaatatacatacatatatatatatatatacacacacacacgcacacacatataatattatatatattttatatgcacacacaaaataacagatagatagatatcgtattagttctgtttttttggagaaccctgactagtcctagttgcctttcttttctttttccacttttcttctgagctcatgttccaccttctgatatcttaacatcatttccctgagctcactttatccttttccttcttaaaggcgaccatttcattaagtttttaagtgcctggtaattgcttggttatgaccggtgtctgctccatggcagcctcttcctggtgagtattccacatctgccattggtttttcctatccctttcctacatttgcagagatcctgcatgtcttcctttttgatgactcatctttgaacaagtggaatttttttttttttttttttttgagacggagtctcactctgtcgccaggcaggagtgcagtggcgcaatcttggtgcactgcaacctccgcctcccgggttccagtgattctcctgcctcagcctcccaagtagctgggactacaggtgcccgccaccatgcccagctaattttttgtatttttagtagagacggggtttcaccatgttggccaggatggtcttgatctcttgacctcgtgatccacctgcctcagcctcccaaagtgctgggattacaggcgtgagccaccacacccggccaaacaagtggaatttttcctggaccagctctttgctggtcatgtgggaggagttggggctgtgttccaagtcagctggaatttttcttataacccaggattttacatgtgagcttgatcagcctttacttctcagcttaagcaggtctgggcatgtttggcaacctggcctgcataatgaagatttccataatttggtgttcatctatttattcagtttttgcccgaatgatgaaggaggaagtttacatcttgctccctggggacaggcagagacagtgtgtgcacttccatcctacagggaccagatctgaacagtctggagagaggagctgtggtggcagcagacagatctctgcttcaggggccaggtgtctaggtgagacgccacagcgcggcagagagaacagaggcttctctgcatgcctgccagggaattggcaccatgtcaacagaaatcttaggttacaggaacaggaaccagccctgactgacgtgtgcaagcccggagctttcctttctccttgcacttcccacatgttccccacataaccagcaaccacagagccaccccctgccacccaacaactccctcctgagctagaaacttgtaagactcagctaggagtctgaatggttggatatctaaagcaaagaataatctagtttgtaacatgggaccaaaggaagaactgaatatccacaatctgtgtaaaaagaggccactttggagatttctatgcctctcaggggctctatctcaggatggctcagctgtaattatctttggattcccatacagatccaacttccctggaaagagaaagtctcatgtttgttaataatatgaggaaagaattaaaatatatcagctgctatgggctaatgtcatttattttgacttttcttttgtagaagaaatgctgaggcagtgtcacgctggtgtctgtcctccttacagaatgcctgaacagttccattgactcaaagtgaagatcaaaagaaccaaatgacagcaatagccaagtgtaatcatcagtaaccctgtgttctatccacaggtaaaaaacaatcatcctcttcattatgggtttcaattttaaatgtaatacatttttagaaatgcctatttccttttataatctctttatataatctaggttattctggctcttaggtcttcatttagctactgaaaagatttgatctcaaatcaatgatctaaccacccatgaccatctcccacctctctccccgtacaccccccagcatgaattctgggaactcaggtaaaatgctttctggaaacctgcctgtattagtctgttgtcaagctgctaataaacacatacccgaaactgggtagtttataaaggaaagaggtttcctttatagttccacatggcttgggaggcctcacaatcatggtggaaggcgaatgagaagcaaagtcacatcttgcatggcagcagggaagagagagtttgtgtaggggaacacccctttaaaaaaccatcagatcttgtgacactcattcactgtcacgagaacagcacgggaaagacccgcccccatgattcaattacctcccatgacacaagggaagtataggagctacaattcacaatgagatctgggtggggacacagacaaaccatgtcaccgcctaaaaccaactcaatagtctaaggaatttgactggggagaatctggagaggatttaattaatttggcaaaaggattagcaattgaatctaagtgagaaaagagaattcttggaggaaaaaaagatgtttagttacactgagaaattaaaacctgaagtaattgcctttgagatttttttcaggaaatgagtattgattgcctactgtgtgtcaaattatgtgtttcatgtcaaagactccaaagtagataagatataggcccagccttggggagctcattgagtcacagagaaagtttgaatgtttcagaggaatcatcaagaacaggggatcagcaatctattatattttaattgcgtcttttcatgattataaaagcaatgcatgcgtgctgaagagaatttggaaaaacaaagaagaaattaaaaatcgtctctgatcctgccaccagaaataaccactgttagcaattgtatcacttctgtaggtctacatggttatcataataagctctagtattgattacatgcatctcatgtaccagagattatgctagactctcatttaatctgtacattagccctatgaagtagggaccatcattctcctcattttacagatgaggaaacagaggcttggagaggttactctgcctaaagtctcatagctagcgagtggcagagattggactcacccaagctttgtcttattctcaagctctcaaccaacccggtggtgagaagagccagcagcaaagcctgtcatctttgtcttctttttttttctaacctcaaatcagggagaaaatgccctttgtcattagaagggcaaggcaattctgaagacagcccagttggcttgtctccgatttggctttcaggggcctgtctgatacctatggagagacgagggctgaacaagctgtactctcaaaacaaaacaaagcaaaacaaaactttagtctctttagggactctctgatagtaatgcagagggagaaaggctttctttgtctcactgggaggaaggttccctacggaaattgaaggcagtgcctgttgacatagcgctgccacctggtggaaataatggtgtaggacatcatgtccagcaccactagcgctgagacactccctgggaagagaaatgtttggagagaaatttgcaagaagttggaagtctcgcagtagcaggtaggaacaagaattataactgctactgtgaccccctaaggctcctcacatcctcttaaggcttggagaaactcacactatgtatattttcctgtatttttgaaaaatgttttcctttatgctttgttgtaatgaaattacctctgatggtcacataccttaaatatttagtatatatatgaatactaaatgtccattttcaggagttagtttacctgcatctaaaatcaggaataggtcacagagtaactgagcaaaaagtgctgttaggtttgtgcatttcaccctttgcctgggatgagaggacctcaatcatcttggtactaatgacaggaaaagtgccctcctatccatgtgtatcggctacgtgactcaagtctccttatttccttttctagcataacaaggggttgttactgttgttttacatctgtgttaatgagataaataagtttaaaataaaaagatgtgtaccaggca

SEQ ID NO: 854 - DNA, 2744 bp, Homo sapiens
ttacatgtctaggctgtgtggttggtggtgaataggcttctttttacatggtgctgccagcccagctaattaatggtgcacgtggacttttagcaagcgggctcactggaagagactgaacctggcatggaattcctgaagatgtttggggtttttttctttcttaatcgaaagttaacattgtctgaaaagttttgttagaactactgcggaacctcaaaatcagtagatttggaagtgattcaaagctaaactttttccttggccctccttgtgttctaattgcttgcaagtgtaatactaggatgtccaagatgccagtttttgcttctttgttagttgtcagctgcttttatcaaatttcaggccattatccaacaaacactataaaaatgtttgaacaattggatttcaaacattttcgttttgtggagtggtgctcaccaagtggtacagccctaagcaagtgaacacaaacacatttaagtgtattttgtctgattagatgttagccagttatgctatttcattcaaatgtctgaaaaaatcaattgactattcccttttcctaaagggcagagacagataatctcacttccagagaaatgacttggagaaaaaaaagtgttggtctttttgctcttttgtaattaaatccggatgtacctcaaaagacttaagactgtggtgataagatgctttcctcagcagaaaggagggaaaaaaaacaactggaactcaaagcttgaaattctgtggcaaaacatgagatgtccaggattggaggttgaaaagatttcactacagtgttctgcaatagttggagcagataactttcagtgtagccacagccatggactccagatttccagattttcaagacctggacctggaacccgaaagagcttgtcacgatgcggcaggaacactggaggtagatttttttttatttttgaattttgggactgttgaccttgctgtgagaaaagagacaacgactgagcaagcactaccaccagcactgttactgggaattagaagacctgagtttctgtccagaccctcagtgcaaactgaggatgctccatccaaagtgaattatgtcctgtgcctcctgattgctgagtgttcacctggaccttctgactaccttccctgtgctattccatcagcctacagacctggtacctggatttttgcccgagatgattcctaccaccttactactgacgaagacacccattccagtggaccactgtgacccaggaggcattcagccatcatgatgtggcctttacctccactcctgtcttgttctacccagattcagcacagccctttatagtgaagtcagagtcctcaagccaaatagctaaagctgttttatcacaacaaaggcctagtttgttccatgagtgtgcatttcatttcttcagttaaagccttcagagacacacaataaatttggaccaggggattttttagttattaatgctctctgaagaaaggcaacatctttttgagagcagcattggaccacaccccacaatctcaaatgattgaaattcatgaacatctaggatcccgtgaaggtcactggaccctgttttttctacttcaaatcctgtagtagcctactgaatgagaaaacatattctgacccattgggatcaaatcaaaggcacagtgaactcctcatagcatcttctttggaattactcaggaaccagaactttttacacaaatgtaagaaattctaccaaggagtccccttacctaacagcatctcacaaggctgcaccagattccagaaaaggcttctcttgatacatcaaggtagaacctctatgcattttgtgaccgacttattcttagatcattggttttccaaaggctttgtggccatgaagccctttgagtgaaaactgtgcagaagcccagagtaaaagtgaagctgctctggatgaagtagtgaagcaagagtaggggcctgaatcctgctacaactatcttcctttaccaccgtggtgacacctaaggggacttccttacaacaccttgaactcttccgaacacagtttgaaaaccactgccccagacagcaatatgtttgacctgaatggcattccaatcttttctgtacctccactcagcacagttcatgttcagtagatgctgaacattcttagaaatactgtgtgtgaacttagaaaagtgcaagaagacaggcatgtctttgaccccaggaatgatcatttgctgaagatggtgtcaagtgaacctagattaacagccctccactccagatggatatccagtgattcctagaatgggatatagccagagaacaattctatgcaccctacactgacagactcccttaagcaacaccagatgctctactggtacttgaagtacatgactttgaagtcttgaccctccatgaatacctgaattatcagcaagcgggttttgaagctggtgcctcattgaggccatattagagcaacttgtacatttgacctcttgttatcagccatggtactctacttcgtgtgcaagagataactatgaaagccaaattcaaatactggcaacatttcctaaaggggctcaatatctatcattcgtcttcttttccaaactacacatcactgtatgactcaaccagtagcagttatattgccccttggtttttattcagtttaactactgtttccaagataaatgagctaataagcttt

SEQ ID NO: 855 - DNA, 2144 bp, Homo sapiens
ggctgccctgacgtcagcatggccgcggcccctgactacccagctcccttctatccctcgagcggcaggaatccgtccccacgcccttttcctttaaagggcaacgggccgaaggtggggcgggcggcgcggctcccgcgatccattcaggtcaaaagggagagtgatcaaacaggagagccgaggggacctatattcagagacttaaccggacacctggacagaccattacaacttgggacttttcaggagaatgagggaaatgtagttattgcacctgagcctcactccagctctgaggtcctcttcacttctctttggaagaaaattggatatcttttcctagttgaaagagtagagatctgatttctccaaggatcatcgctttttgacacgggattattagaagcattcattcatctatcaaggagttttgggatacttgccataagccaagccctctgataggtgctggaaacatcaagctctgtgcccaggaagttcatccttggactgcacgcatgaacgagtttgctgtcttcccattggattcagccagtccgcggtcctggagcaaattcaggacctgacacataagaactggtggagaattacctgcagaatagatgctgaatctttgtgcctctctgctctccaagaagatggcatgctccttgatgacaagagccacctctgatctcccccatccagtcaaaatcttccagaaaacagaccatcaatatggatttgcagcatgtattgtgattgtttaacataattttccaacagccaattatgtgtggccactatacgtagatatttctttagctcatattttaatacctgtcctgtcattctacattacatatgtggaagacctttaacccagtttagtttatatataataagtacaaaagggaaaaaagaaagcttccttttttcacctctttggggacttcttcagtctttttccagatgtggaatccagatcgtgttattttctttccagactgggcctaggagcaatacgttaagagtcagcaaagcctcaagaatcatccagctcttcagcaaagcctcaagaatcatccagctcttttctcctcttcaaagttgcccttcttttctctgaacattaatgtatctctctgtatcacttatccattgctgtgcagcaaactacctcaaaacctagcactttcagtcagcaaacacttatcagtttacagagtttctgagatcagaagtcaaggagtggttcacgtcggtggttctggctcagtctctcatggggctgcagtggaggtgcagaatctgacggggctgacgattcacttccaagctcacctcactggtgcggctgttttcaggacaactcagctccctgccacatgggcctctccatagaaagcttataacacagcagctggcttcccccagagtaagtgattcaagagagcaagccaccaaggctgggtgcggtggctcacacctgtaatcccagcactttgggaggcggaggtggatggatcacctgaggtcaggagtgtgagaccagcctggccaacagagcgaaaccctgtctctgggaaaaatacaaaaattagccaggcatgatgtgatggtgggcgcctgtgatcccagctactctggaggctgaggcaagagaattgcttgatcctggggggcagaggttgcagtgagctgagataaaaaagagagagcaagccaccaaatgggagccacacacccttttataatctggtctctgaagtcatccattgtatcctattctgtagaagtaaatcactaagtccagtcccggaagggcaattagactctatctcttgaaggaagaagtatgaatttttgcatggacagtcatgcactgcctaatgacgttttgtcaatgatggaccacatatgtaacggtggtcccattagataataatggaactgaacagttcctgctgcctaatgacactgaggccaccataacatcatggtgcaagacattccttatgtgtttgtggtgatgccggtggaaacaaacctactgtgctgccagttgtacaaatgtctaggccatacaattatgtacagtgcgtaatacttgaacataataacaaatgactatgctacta

SEQ ID NO: 856 - DNA, 269 bp, Homo sapiens
ggagctggaactcagctcgctgaccccaagcagtgttcccttcttttcgccaggtttgcatccaagagaggggaggacaggggcaaaaggatgcagggaggctgctgatttccactgaagagctaatttcctgtgagacattaacagtgatttaagaaaaagattcctgtaactgtaatgtcttacaataacagaatgcaggagagcacatatcaatgaagaaaagacaaaatgtacttatccatgaagctgaggttaagaaaccagtg

SEQ ID NO: 857 - DNA, 516 bp, Homo sapiens
gtttattttgaatgaaacgggatcttacactcaatgagcggtaggtttagttgtgctttactgtttgattttgcatctgtatgcctgcatatatcctctacaagagatattctatctctgttagaaatttattttctccatttattaacaaaagactaatatatattgagactatcataactttgctgcttttatagatgctattctaaaaatgtgaaatatgcctttgaactgaattggaaacttttattttattttttatttttatttttgagacagagcctcactctgtcacccaggcgcgatctcggcttactgagaactctgcctcctgggttgacgccattctcctgcctcaacctctactactacaggcatggtggcaggcacctgtagtcccagctaatcaggaggctgaggcaggagaatggcatgaacccgggaggcggagcttgcaatgagcccagatggcgccactgcactccagcctgggtaacagaatgagactccgcctca

SEQ ID NO: 858 - DNA, 572 bp, Homo sapiens
ccctgtgcaggacgccgacacgaaaagatgaagagttcaatccgtgctgtctgaactcacagtgtagcaggcgagatagacgggaagatcggtagggtgggagatgccggaaaggcttcccgtgagactggataagaaatcaaaaatctggtgaaattgccggcaagagggagttaaggacattccaggcagaggcaagccacataatattacctttggctgatgatctattctgtaggaagtctgctggaactggcgtatctctctgatgatgtgtgatatctaacagagaaaaaaacaaaacaaaatgacaacaacaaaagcaaagaaagtcatagcctgtgttttctagagggcatggttcagaattctttcccttcagatgtggaggcctctgcacttctggttcagttccaatagagaaaagatttgcttctagtcttctggcgatgcttgggcattgatgaacattccaggatcctgggttccccaccaccatcactaccacgtctatcagcagtatcaccagtttaataattgtgcatttataatgacacaccaaataaaaggaa

SEQ ID NO: 859 - DNA, 1342 bp, Homo sapiens
ataatcaagtcatttctctccctaacaagtgaggattacaattcaagatgaggtttgggtaggaacacaaagcctgaccctatcccacagcatgtccaggctgccctagcaccacccaatagaagggaaaatggcagagggaaagtcctagtggaaagagacctcagtctcagctaattgtggtgacaatatattgcttttgcaaattgtacataaacatatgaccaggtgaatgtatcgccaaggctcctgccaaggcctgggatggaggcctagagaagatgcccgaaagtttatgctgtgtgagcttcacagaagacctgccttccatgtatacccattttacaggtgtctgtgcggtgcagaaactgtacaactgtatacagtgaccatttctactctgggtctctaaacaagggctggtatcgttacagagactgaagactgaggaagaccatctctgtaggatgccaaggattgactggagaaagtctggaattttccacaaatgagttcatttataaagagaaaggcaagctttgatgacaacaccttcacaaaatggaggcctttgaaaacattggtctggattgaggagttggagaagaatgaagtgcacatcaaccaaacagaagagaagcaatttggaggaggaaaaaatcagttcttcatgaaaggatcacattgatcttggttcatcccagtgcctcctctgcagacaatcttgtcctcagtctttcaattgttttcttcccatgccctgacaagcgaaccagatcaggaatttaggagcagcttacctaatggcacctggttacctaatggcaccctcaacagcttacctaatggcaccctcacttggttctggctccgggcctctcacaagattgtacacatgatgatggccaagtttgcagtcatctgaagtcttgactggagctggagactacatttccaagatggctcactcatattgctaaagcaattacagctcactgcagccttgacctcccaggctcaagcaagcctcctgcctcagcctcccaagtagttgggactacagatctttttcaatgcagaagcttaaagaagacactaaaaaatgtgtttaagatctctttaaactgaagtcttctgaacaagtgaagcaggtacatgcctgggaagacagccagggaacaggcagctacatcaaccaagaaggctgacaacatgttccatcccacaactatgtggtaattgcaaagatgagaaaatagcagagatcctccagtcagccctggaatgagtttaggggagagaaatcatgcaatctcttagtaacatggcatctgtaaattca

SEQ ID NO: 860 - DNA, 4374 bp, Homo sapiens
ctctccaggaacagatgtcctgcgttctaaatgaagagtgcagagcccacagcaaacaactgtccccagcagcccggatccctctgacatcagcccccaggaatgtgctgcagaccctctagcacgttcaggcctcccaggggataccctcccctcccctcctccatcccagtgtttcactggggacaggcctctgagctgcagacggaggcccacggagggtggaagacagcccaccccgctccagacctggagactggaggagtgactggagtgagtgaggcagccttgagtggagtggagcgggaagcctgcctgtgaaagaggcagctaggccaatagctggactgtaggaagaacacggagctggactgattcaaccaagagtcctaccgaccggtgctccccttgccaagagtgaaggcagatgccgtgggattctgccagctgctgagtacatctatttccatgatgctttccggaagtggggaaatagcacagaatgggtttcagatggacgtaagctaaaaacccataagcccccactttgatgttctgggtctcctagaattactgtcagctcagaaccagtggccagtagtccaaaagatctgattatttccttttctccaatgcacgctcatcctggtgaaaggtgtctttggagaactgggagaaagaatacagtatagatttctggcaggctacgagggtgcttccttgagggtacccagcctttccctcattcaagagcttccagtctgataaaactggctcaagtacgggaatggattgaggggtcatgactctactctgcttttatgatttgggatagacttttgtttgcttgacctagaagttttctgcttatacagattaagtacgaacttagtaggcttcctgtctatttcacttcgaggaacatcatgatcaaccagccaacaccacaggtctgcagcagtcagactgatttctgctttgactccactgtccaatagggtcagcacgtccaccttgcctttggtagtactacagccacggggcccccgccaccctggagccaattactccggtcgcattcaggttactggttcagtggctgctgttcctgctgtgaggtctggccttcagagaagagtgatcacagctcctcaaggaggctggagctcctttcatatatttacttctcaccatcaaggtgaaaggcatgtcttcaggagcttcccagcgtgggtgaggaggtcttaaagggaagccaaacatgccgcagaccacgcgggaattcttggccgtccagtgcttgtcacagatctgcttccaggtcttgccctccttcacctccacgtagccctccatcactggggtgcgcttgcgtccttcagaaaagcaatgcattctactgcttccacgatgtaagagaaaagcaaataaaaacattcccattggagagattagaaaaccaaggaaagaaacggaggctcttcaaggtcgataagcaccccggggccagtctcctgacgtccaggccctgctgaaacgtgtctgttctcacggctgctggtcagggctcaaacgacagcaccttggatccattgtggagaacaaagagctaattgaaaacatctgggctgaggttttccaactggcttctcattttggcccggtttccaagcagtcaagctccactgaaacatacactccctaatcgattgctgtctcaacaacaaaccaatgtttgtcttgctaagttactagcaacagggaagaccctccatgttctaagcggaatgttctgtcgcaaagctgccaaagtgacagagatggtgaaaagcagtggcaccctattccatctgcagtgagagaaacccccctcgctaaggacctggaagtcgaccagtgcatcatcaaaggaactgagaacagctgcaaaccagagaccctaaggagcctgccccaaagagctgctctcttatgaaacttccatggacccccaataatcttccatggaccccttccacatatgcttggtcaatttctacttagatggcagatatgtgaatctgtacttagcccaagacagcatcaccatgcatggtatactcgtttggcctgatttcataacaaaattttttttgttttttgagacagtgtctcactctgtcactcaggctggagtgcagtggtgcaatcatagctcactgcaacttccgcttcccaggttcaagcaattctcccacctcagcctcccaagtagctgggaccaaaggcgcatgccaccatgcccagctaatttttgtattttttggtagagataggatttcaccatgttggccaggctggtctcgaacacctgacctcaggtgatctgcctgcctcagcctcccaaagggctgggattacaggcatgagccactgcaaagggcccttttttttccctctacaggcttagtgcttattaactagactactccgattccaatgcaaccagcttctgggtctgcctgctgaaaagcagggcggttctaggtacaatccagtagatgcctcctcagagctgccaggaaagccgtgtccttgggacacaagatgacagtcaaactttggacacaagaaagccattcaatcagaagccaaattttatgttactctttgcttccaatgcctctcctgatgaaagaagagataaatatatatatacaagttaacagatcattaggaaggtgaaaatcataaatgaaattcagttggaatgccagagcccaggacaatggatattattcaagttagactgtgtggggtcacaaatgggtgcagtgggtcacgcctgtaatcctagcactgtgggaggccaaggtgggcagatcacttgaggccaggagtttgagatcagcctggccaacgtgggaaaaccccgtctctactaaaaatagaattaaaaaaatcagctgggcctagtggcgcacacctgtaatcccagctactcggggggctgagatgggaggatcacttgaattcgggaggcgaaggttgcagtgagcctagatcccaccactgcactccagcctgggtgataaagcaagactctgtctcaaagaaaaggaaagaaaaaaatctgtggggttacaacaatgtggttatcgctggcttcgtcgctgtggtctaaagaatgagggatgtgactgggaataggcttagcctcctgattctgaagacaggtgaaggagagcaaccaccttagcttcagctgctataacctcgaacaggggttgagaatcaggacagctgctccctccagaactccctaaaagggcctgtggtttacctgagctcagagatgctttgggagaacagtctgtgaacaggccaggctagaaaacccagaacgtccctggtgccctccctggtttcactgctccagcctgaagttcagaggagcttgaggggtcctggaggggcagtcttatccacggtctgaccggcacgttaagcccctaagccccaccggagcaagccctgggcgctggccactttctgtgctcactatacccagaactcttttgccaactctttttcctattctgccaaatcaaaatgaatcaattagctaatattcactgagtgcccaccatgtacccagtgataaagatctggactgatgctggtgaaattcaaataaatttagatgtaaaaaggtctctcatgtcataaacgaagcaccacttcacgtaagcagcttaactcgtaaagccgtgaacacaagacagagttttttttttttcaagcatctgtttctttctcctctctttgatgttattccttttataaaccttgatgatttccatgtccacaaagatgacctttccagtactcctggtctcttcgttaatacacctcctctctcagagactgtcctccatcctgctccagccgctgtcccatggtcatagctcaggtctctcattaccagagattgcacccacccttcaatctccatttcacctttcctgctctgcacccacacacagctcccttcatcttttagtaaacttcttgtatctccatctgaacagagactcgcaatccagtgatcacagcagctatgcacaatccttcaacttctccacttattacaaccctccttacccagcacagtctccttggaccatgagtttaatccttccctttcatattccctccactccttggaacttttcactcttcaccacgcttggatggcaaagtcccacctgggtaaaaacctgtctcctactaccccgtgcctgctcctgatagggaaaaaccacaacccccttgtctgacaacaggtgttttaaattgaggttgaaataaaattaagttgtcactggaaaaata

SEQ ID NO: 861 - DNA, 442 bp, Homo sapiens
cagaagtctggcaagaccaggaccactttcccaccaggcagcaattggctgaagccaaggagcagctgtgctctatagacaagtcatgtgcctccttgcctgctacagggcaggcccttcctgctgctcctgcctggccatagtcacttattggagaaacagaagcctatcagttgctgaagaaggccacccttcaggataatacaaatcaaactgaaaacaggtttcaaaagacagatgcttctgtgtcacacttgtcaggtttgaatattggcagcggtgcattcgagacaaagacagctaacaaaattgcttcggaagctagtttttcatctagtgaaggaagtcctttgtcaaggtaaagttgtgaaagcctttctgaatagcagcaacaagatgagaaatgtcacagcgcaatgaattaaactctggctgcgtatta

SEQ ID NO: 862 - DNA, 974 bp, Homo sapiens
attagggctctggtggcggcggcggcagacacttggggtctggacgcaacggaggcgggagcgtgaacgcccctccagccttcgagtcgttcttgctcttcgagggcgagaagaagatcaccattaacaaggacaccaaggtacccaatgcctgtttattcaccatcaacaaagaagaccacacactgggaaacatcattaaatcacgtgcctgcttccccttcgccttctgccgtgattgtcagtttcctgaggcctccccagccacgctttctgtacagcctgcagaactctgccccagagcacatcagctatgtgccccagctctcaaacgacaccctggcggggaggctcaccctgtccaccttcacgctggagcagcctctaggccagttcagcagccacaacatctctgacttggataccatctggctggtggtggccctcagcaacgccacccagagcttcacggccccacggacaaaccaggacatccctgctcctgccaacttctcccagaggggctactatctcacactgagggccaaccgggtgctgtaccaggccagaggccagctccatgtcctccgtgttggcaatgatacccactgccaaccaacaaaaattggctgcaaccatcccctaccaggaccgagcccctacagggtgaagttcctggtgatgaatgacaaaggacccgtggctgaaacaaagtggtccagcaacactcgcctgcagcaaggacagccacagtgtggaagaccctgtgccccttctggggtgaggagtaccaagtgcacctgccgcccaccttccacgctgtggctttctacgtcatggatgaggatgccctcagccgggacgacgttatcggaaaggtctgccttacaagggacaccatagcttctcaccctaaggatcatgaagaagtcatgctacccacgctggaatgagacgtttgaatttgagctgca

SEQ ID NO: 863 - DNA, 640 bp, Homo sapiens
attcaccaaatgtccaattacatatcctccctgcctggaccttcagaacaatataaaactgaatgaaggctatgaaagaagtcacaggaggatttttgcagagcttccatccagttcagaaacaaagcaattcaatacatgtcttcaagatttctaaaggcaatgacttaattctaagttccatgaaagcaggcattgtgtgaatttctcctgcatctggaactggcctagcacaccaatagaaccatggagaattgccaagattgctgactagatgtggccaggagaaatatctcccactgagagactgggacattggaaagactataacacacctctgagtagatcttctgatggaagacattaagagtggatgcagagaggatgcagatgctgggctgaagagagaggaagctggaaaccctgcatagtgtggctgagcctcaggacttgtacctggccctcagagactcctgggggaagggtgagtttacaggtgaggagtggcctgctctcaccatggacccattctggtaggtccctcaacctctatgggcatctgagatggtaggaaaagctgctcagagaggtcatatgggcaggactccagcctatgcagagcccagagtggtgggagaac

SEQ ID NO: 864 - DNA, 674 bp, Homo sapiens
tgaagaaggtgcttgtttcccctttgccttccgccatgagtgtaagtttcctgaggtctcccagtcatactgctggttaagcctgcagaacggctggtcttgaactcccagcctcaagccatcctcccgccttggcctttcaaagtgctggattacaagcgtgagccaccgtgcacagccaagacacaattttaaatcgagcggtcaggaagcctcctggagaaaatgacgtttgaacaaagacatgaagaaagtggagaatatttggagaaaagcatttcaggcagaggaaagtgccagggcagaggccccgaggacaggaaaatgagacccacagaagttcaagtcaccaggccagttattgttgggctagcacttgaagccaggtctgcctgaatttagggcctcagctctttcccacgcatttttagcccagaaccaagctgttcataaaaggtgtgcctgcaaataggaaactagagagcatgggccctcagagagagctctgaaccccatcttcgacctcgaacctgtccttggactgaacctgtctttaggaggtctgcccatacggatgaatctggagcagaggccgggctcagcaggagagcttcacaaaactgagattcgatgaagcagagccccgttttaagggctgcacaaatccacccgga

SEQ ID NO: 865 - DNA, 3472 bp, Homo sapiens
gttatttgactggagtgaggtctcatgtctgcttatgcggtggctcgctgctcagaacaggatggcagagatgagcaccaccatcaaaaactcaaggaccagtgctgtgggtccagtcatctgtttcatggaattcaccagtctggtatcttcaaaatccagaaggatgatggcagatggcaggaaagtaatgcaaacgtcatcaggtgtgaccccactgtagcagctgtgatggatgttttctctcaccatagcaataaataacacaacctcggtcacactgtatgcattgttggtctgcaaaatccatgttttgcaaaactcttcaggaaggtggatctgtaatattggcattgacatgagaacaacagcagtatttattcacaatctcaagctctctgtcttcccgtctctctcattagccatccaagtagtcctgaggaaccaagcccatcagaacattctgcaacataatacacagctccattctccattcaaattttgttgttgttgttgttgttgatgagacaacatcttactccatcagccaggctgacgtacagtggggctatctgggctgactgtagtcttgagcttccaggctcaaggcatcctctcacctcagcctcctaagtggcttgaactacagacacacagcgacatgctgggctagtttttgtatattttgtagagacgtgctctcaccatgttattcaggctggactcaaactcctgagcgtaagtgatccaagcaccttggcctcaaagtgctgagattacaagcctgagccactgcacccagcccaatctccattctactgataacaatgtcattaccaggtctgatggacaggaaatggtaaggtttctgaaaacctaaggatcacacagcgagttccaaaggctgaaagtgcatacctgtcgacactgataccaatgacatccaatggaggaagagggtaatctggaagagtttcctgacctactctgctgctgtgattaaacaaccaccaggaaattttgatgacactgttctcctgagctcctccctttcctcggggaagaaaagcattgaaactacaaaaataaagtgttatttggctggagtgaggtctcatgtctgcttatgcggtggctcgctgctcagaacagggaaccattggagatactcattactctttgaaggcttacagtggaatgaattcaaatacgacttatttgaggaattgaagttgactttatggagctgataagaatcttcttggagaaaaaaagactgggtatattttcaatatgctttccttttaaggtccctcacctgtggaaagtaaagaatgtcactttctgacaggctcaggaacctcaagttatgtagggatctcaagaagatgggggaattcacccagttcatacaggtgaaattgctgttgcaaagattatgaatatgagagaagtccagcatggctgacttcatctcgtgtctggcctcaggctggctgcccttgctcactcttgggcataggccaagctagccatgggaggaatttagtttatagtttaactttgaagcacggatgataatagtctctccctaaaatgaaccccttccttgctcagggactgaaactacctttgtatgacaaatgaaagcccacaagattaagattatgagaggggcctgaattctgctaaaatgcaggtgtagctgactgataacaagtcattgtcccacagcttgcctttctataatctcttgcttctcaggagtcacatggccagaggtcctgagatttccagtcctgtgacccccacccagagatggacttagtgcatgaggaccattttccacacccctatgatttcatcctcaaacaatcagcagcaaccattccctagccccctgccttccaaattatccataaaaatcctagcctctgagttattagggagattgattaataatcccagtcctaccccttgggttgctctgatttaattaaaccttctctactgcaataccacggactcagtaaattggttttgtctgtgcaatgggcaagaagaacatgttgcatggttatacaggtactacaagcacagtctgatggcaaattattggttttgcttcctgcccttgatgtttctaaacatctagtccaaaattacttgtgaaaggtccagcaaagccaattttaaaagaggctatatggccaatcactattctttctacacattattgcaaataatcaggccacggctgggcacggtggctcatgcctgcaatcccagcactttgggaggctgaggcaggatcacctgaaatcaggagttcaagaccagcctaggcaacatgataaaaccctgtctctactaaaaatacaaaattagccaggcatggtggcatgcacctgtaatcccagctacttgggagactgagggaggagaatcacttgaacctgggaggcagagattgcagtgagctgagatcacaccactgcactccagcctgggcaatagagtgagactttgtctcaaataataataataataatcagaccaagtataatgaaattaaaatttattttgcaaataaattggtcctactacaatttatccttcatagaaatgtggaaactgaagataaaaaaaattaggtttcagaagaaaactatactacacctgttattagattctagccctaaacattgtttttgaggtttttattatttacctgcaatttggtctaaattctgaattatttcctgactacaagtatccaaggaataaatgggttttctttttctttatgatagttttagttggcttctaatgcaacaacaatttttattgtaatcctgtgtgcattctattcctactattcaaattattaatgttatagatctttcattgtagtacttctgaattaaccaaaatcacagtattctgaagatgattctacaaagcctgctgtttctacaaaggctgctgatgatttctacaaagcctgctgtagtgttgctgtggcctctgcttaaaaaagtagaaaacacattgatgcagcatgttcaccccaacctccctgcctaaaggctcagggaccatcttggaagaggaaggcgcgtgagattgtaagagccgaattagggggatggagtgtggagaataaggacacttcatcttggatgctcacctgccaaattgacttctgatgaaagccagctccagaaatgtgcctacagttactactttcacctaaaccctgcccttagtcaaatccttctcttcttctaagcaatcaacttcaattccttgtataacccacagtataaaagggcttttataccattctatcctattgcatgtaagccttgggtctgggaggtaacagtgtgggattccaccatctcatctccctgccacccaaacatgcctgctcttctttaagcaatattaaatgtttgtacttcagaaa

SEQ ID NO: 866 - DNA, 863 bp, Homo sapiens
ctcctgggcacagagctgaaggggaactggaggctgcggcgttcctctctccgttcccctctctctggtgactcgtgataacgaaccgaccttttggagacattctgtgccctcaacaaaagcggcccctgtctggaaacccccccgagggagactgacttcctcccctgctgcctgggctgcggtagctcttccggcacctgctcttcaggcacctgccctgtgctggcccctcctgcaacaatcgggagccctcacctcagtcggcgctgcagaaccagcccaggagagcagctggcctgtcatctgctgaggagcggaggcgtgcggggatccggaggggaagggggtctggagtgctccgggggagaccctcagggactgccctgctgctggcagcgcctgggcccacggctgatggaggcgtctcctggcccccagggctgtgcccaggactgcaatggcctcccacactacctcactaccctggtccaggctcactgacagatgaggaaactgaggcaggggccccggtctcacggccattggtgcagagctgggatccacgaccaggtgggctctttgttattacttcctccaaggacaagcccaggttctccagggtgtggggtccacgtgtggccacagcgggccttagagacagacaggcctgggtagggggaggggtgggtgggcaaggccttagagacaggcctggcgggggaggggccgggcctgtgcactggcagtggtggcaccacgggcccttggggacaccaagtgagctctttaaagtggctaaagtggtaaaccttgtgttttgtatagattctaccaattaaaaaaaggaaatgtgggccggg

SEQ ID NO: 867 - DNA, 5637 bp, Homo sapiens
tgctggggtagcccagcctacgcctccgggggccttcagggaagagaaccagctaaggctggggggaccaggagaagggtcccccaaggttggaaagtgcatgcaggaggatgctcagcaggggctgcaacaggggggccttgggagcccaccaggcagggatcagcaaggggtctcactcagcgagggactgcaaagcctcacttcagtctctaggtccagggatcaggctcaccaactccctgcagaggccccagcagcaggggaccgcaggctcacagcatggacagtgggtgatatctgttgtaagctctcctcttccctctcccgctccccatggcctccgctatcagaacatattctgcctcttgcaatatggacagagtgggtccttaaaaaaaattacctaaaatgttagctcagggttcacttccagaagagaaaacaggtgtaaggggttctgggacaggcctgtggaaatcgggagtgataccaaggctgactgtagcattggggataaaaaggagggaggagtcccagagtagggtggggaccacataggacaccacttccttagggcccagacagaggcaggaggtctgatatcagcagtcagttgggagttcctaggggtctggggtggtggagagagaccttcacaagttgggcaggctgctctgcttcaccccagattagagggcactgctggacacccacatggcaaagtggccaaatcccaagggaagacccaaggagccgagttgaaactgccccctgctcctgaactcaggggtcagcgatattgctgctacttgctaagcccagttgcccctgtgttatccactcccccttggagacctcggggcagcatagattccccccacccaggacttggaatgggtcatcattcaatgctatttaattccaagggtagcctggactccagacgacacattcttttactactcttcctactttcccatcctaaattaggtccaacctcaaagttcaaatttgagtcagaggttctgcagatatataagatgccagatacccagataaaaagtcaacctagaaatgtctttcataaatttcctagggtcaaattcaagtcaaaaaattaagttcccttgtccttttaggttaaagtccaaagggaaaaaaaagtcttaaggtcaaaggattcaagcccaaagcaatcaaagagagcccagggatccgtcagagcccagtggtgttaacctcctccccgaggctctgtgctcacccagtgagcaaagtggcccagtaggcacgggagggctgggtgtcctggaaagtgagatccttctctccacatctcagcattttcactagcctgccatgtgctccagttttaaaagacccagagttactaggaatgagcagatggtgatagcctcagcctcctgctcgccaaccacagggaagtccttagagcagcatgcaggccatgagatgtctccaggatcccggacccagccccatgtagccctctcttcctgctacctcagtactccagcaggaatgccctggcagctgatggaaagagagtagacagggaagacaaaccctagaccccacagcatatctaaccaggtggagggttagcattagccctggcgaccccgctggggtggagcaggaagcaatttctgctgtcctcctccctgagcgtatctgtacaagcagtcatcacctgcctgggtcttatttataataccttctccttttcatatgtgtgaaatctcatcatttccatttccctctgtatgcccattgcatggatgtcttcagtcctaagagatcctgccccagtcagtgcagcacagcccagcaggttgctgagctgagcaccagggagcagtggctgtgtcccactggctctcaggacactagctgtcctccactggggatgttcccagtcttgagcagcactgtttctgcagcacagttgtcagcagttggggacagatgtccacagctgtgcttcctcatgcgactgctggcttgcatccccagcatggctcagctggggccctggcagttgtgctggctgctggcagtcttcacacacagggctggtcatttgtgttcaaccccagtgccttccctccttttactttctctttgctttccggcccatatatttactttttctgatctgttcctctagattttgtcacttgggggtctcccctggcaacagaaaacaaaaccaggcaatcccaggtttgccacaagaattgctgttgaaacagtcccacagctgcgcccaagagatggcggccatggccatcagcctccctgccgtcagcccctctctcctgactggctgtgctctcctcagggaggactccactgagccctccttgacacctaatccctacatttaaaaaatgcattcccttaggtcctgagcaaccccagacacccacccacagtaactatgctgtccccaggtatacctaaaatattttcaatgtttgatgctgatcttctgtcctttaatttgcccaaattccctacagcctctgagggctgccctggctcatggaatggcttctgattcttacggagttgctgtctgcagcattgaatggccccccctcaagagtgttctgggtcacctggttccctggtggtgaccttgtctgttcccaacgtctgccctcccctcacatcagggagctttcctgtcccctaagttggtctggcccactccagggtcccatgatccctcatctctgcacagcctgcctcctgacaccactgctcccattctaagggtaagactgtggtgtgtttttcaaaccattccagttccttctggatctcccaagtaaacccaattccctgggacagacggttctcagcacaagccatttgtatggcccttgctagctttggatgcgtattgatttcattgtttctctatctcaacccaagaaaatagcatattctctgaagggccctgattccttttaatgctgttgtccattaacaaactcttacctttctgtgggcaaagccacgactttagtctcccaattcctgggtcaaaatgtacgtaatagccaggcacggtggctcatacctgtgatccctgtaatattctgggatgccaaggcgggaagatcacttagggccagcctggggaacctagtgaaatcctgtctctacaaaaataaaaatataattagctgggcatggtggcacaaaactgtagtctcagccactcaagaagctgtggcgggaagatggcttaatcccaggagttcaaggttactgtgagcttgattgcaccactgcattgcagcatgggcaacagggagagaccctgtctctaaaaagaaacaacaaattaaaacaaaatgtatgtaaggcacaaatcgagagccaagctgagccgcacaaggggactaactcagcagacctagggatgtgtttcgtgggctcaggagggaccctccccagtccctgttctggcaggaggctttgaggacagctcatctggcacaactccactgtgggtggtacaagactcataccaggttgcaccggccccttgctgccttcgcagttggaagtggtgatctcagacctggctgagaacacagtaaaggcagcaagcctgggcctgccctcctccattcatgcctcagaggttgggacccttctgtagcctcctctgcactgtctctctttggattaataggaggcccgtgcaggagtcagagaacacggctctgagctgtgaccatccccaaagcactgccctgagttgccaaaggtcatatccccacatggaccttactttataccagcaagatggaacctccggcctgggccactagttaaaagccaaccctaagactgtaaggatcagctcgtggctccaaagctctgtggggaactgccaaggccagaagccagtgtggtccctgtgaagcccccgcgcacacaccaggcatccccaaagcctcagactttatgtggttacttgaggactcaaagctcaaagcctctgctggatttaagggggcttaaatagaacacgcctttcttcccattccaatcctggggcctccaccacagttgtgagggtcatagcacatgccagaaggcagggagcacacagcaaagcagggcccagaaagactgagctagacggggggcgctaaggaggtgcttgtttagggacataagcacctcatggggaaacaaggaggtgaggaagaacggcccccactcccagcagaaacactgtggtgggaagctcagggaggctgggggtgggctggggaagaggccaacaaagtgggaacagccctccgtatgggccagtgtctggcaaggtcttagtgggatggggcagttgggcagtgcttctgcatggcacggtacccaacggtcggcctggtggtggtgctcttcacttcctcttcactcccttctactgtgcatgttaacttttgtatcagggagtatgagatatggaaaaatgcataaatgcataaggtttaataaatatatataggcacttgtaagaacagagagaaaaatactgcagcaccctgccacctcccaaatgcccctggccagtgggaccgctgtcctgacagtgatagaaatcatttcttggctttcatcacaattttcccacctacacgtggtcctctgaacagtacagtttgggggtccttgttttcaaactttatataaatggaactgcattatatatatatatcttgtggcttttgctcaatatgtttatgagatttgaccgtggtgatatttgtacctatagcttgttcatttcactgctgttgaatattccatgaatgaacaagcataatttatccaattattgatggacattgggttgcttcgagatacaagtttctccgggataaatatatcgaggagtgggattgtgggcacgttacagctgaggaggttagtagtggtgtgtcatggtggttcttatttccctgatttctactgacgatgaacaacttttccattggatattctgttttgtgaagtggcttctaaagtcctttgctcatttttttaaatagggtttcctaataatgtaatgttgagataggagatcagcagaacttgttttccaagcactggtcaagaccttggtcatgatcccgctgatcaaaacagaatctggtcggaacaggatgcagtgaagaaatcagctgaaaccagctggaaccaagatggcaacaaaagtgacctcacttttgtccctcactgctcattatatgctagtgataatgcatgctaaaagacattcccaccagcaccatgacagtttacacatgccacggcaatacccaaaagttatcttatgtgatttaaaagggggaggaaccctcagttccaggaactccggatccctttgctagaaaattcatgaataacctgccccttatttagcatataataagaagtagctatacatatagatagctggtagtccaggagtgctgctctgcctatggggtagccctgtaaaccccatccacctgtatggatgctctatgaaacccacttttctgtactctgttgctctaataaacttgctttgctttcactctt

SEQ ID NO: 868 - DNA, 2859 bp, Homo sapiens
ggagggaggtaaaatccccagacctgaggactcgaaggggcagtcaaggagaggatagctcttctccagagcttaaaggcaaatattttctttttccctggtttctcaccttattgctttgtgtactgagtgaacttatttgtttttgagatccagtaacccatgcaagaaatttcataacacttctcatttagtactttaatactagttgaagaatctagggttacacacacacacacacacacacaccaggcttagttccattacctatagctgtaaaaatgagatttttttctcagttttgtgaaaatgaaaggctgctggactggaactcacagtattgtatatcaaaaagtatcagattgtgataaaatagaaacccagaattaaacttggccttatgatttttagaaagtcaacagattttgaaggagcccacccagtgtattcatttcatttttactaatcctttctttcatgctaagatagagatgaaaaagaatgacagacttcctgttctcatttcattacagcaaaataaataagttttagtgttccatagctctgtaggatgactatagttaaaaataacatataatttcaaatagccaggaggacattgactgttcccaacacaaagaaatgataaatgtttgcaatgatggatatgctaattacactgatctgatcactatacattgtacatacataaacatgactatgtacctcatggatatgtacaactgttatttgtcagttttagaaaataaaaaagcagaagagatctgctaccaaatgcaggaattttctatagagtctgttatagctagccttctacaggcttaactcttctcatgatggagtattgaccatcaccaacaggaaatcttttgttttaggcactccaggaaattatcagggagttctctctgtagataaccaaagtttccctagttgtacttctacccatttttcttagtgtgatcatttaaagcagtgcctcaccaactatcagagatgggggccagtaatttttgtttcatttttttccagttcattacaaatcaatgcatatgtctgtaaaacacaaaatcacacccttaaatgtgatggcaacatcaaattgccataaaagtttctaaacttttcaccccaatttctgaatttatcacagactggtaaaaaacagctcacaagccagcaccacgggcagaccacactttgcacagtgctcaaacgtaggcctaacaacctggcttggcttggcacttctaaaaaccgatcctgaggcaaggcttcttgtaaaagagtttatactggaagttaaaaatcatcaaattattagatactgggaatggagtagtaaagtagacagagcagggaaggaataaagtatgaattttcaagctggttacccatctgggcaactggagctcagttttgctgggaaagtctggaagacagtgtcagatataactaagagttattcccatcaaggggaaaggaaactgtgcttttcatccaccaaatccttgcttaacattggaatacagatgcttccaagacattaactttgtggcacttctggcttttcctacacacttattgtgtatgccaccatgtctagggggaaaaaggcccacaggcaaagaggtaccagcattcataccaccagctttcagcttgtagaggtggccgccaagaggaactcgtagttggcagtgccaactacaactactacaccaaccagctggaaactatacaaagagtatgaacaaagttcacaggagaaacaaggctctgcaacatatgaaaatatattctacttcattcataatgagacgcatgaaaattgtaactgtatcaataccatttctcacctagtagatgggcaaaaatccaaatgtttgagcacacattctgtgggtgaggctgtggaaacgtaggttcacatacattgctcttggatatgcagattaggaccgctcctgtggagagcagttagggaatatctttcaaaattaaaaaatgcagagttaagttttgatccaggagtctcactcctgagaatttatgctatagatatgcctacaagcatttgagatgaaaaagaagcattgctatttgtttttcttgtttttcatgaataacattgtaaaagtagaatatgggcagtgattcaagcattcatctttgggactggttaaggaaactatgatgctttcacagaatgaaattctatgcagctgtttaaaacaaaccaagacaccttctttcacatatatggaaagatgtccaaaatatactgttcagtttttaaaaaggtacaaaataacatatatagtatgattccttttgcatatgtgtatttgcttttaattgcctaaagaaactctcagaaggattcaaaagatccataccaaacaagatgggagaacagaggagtagtgacaggagtagaagcactgtagaccttttcatatcattttggtttttaaattacatgagtaggttacctaattattaaaataaatttaatttaaaaggtaatgggggataggaagaaatttgttaaaagatacaaaattacagctagataggaagattaagttgtagtgttctatagctctgtaggatgactacagttaacaataatatatattctaaatagctagaaggaggatattgaatgttctcaacagaaagaaatgataaatgcttaagatgatggatatactaattaccctaatctgatcactgtatattttgtgtattgcaatgtcactatgtaccccataaatatgtataattatcgtgtgtcaattaaaaatttttaattaaaaaattataaacaaaaaa

SEQ ID NO: 869 - DNA, 618 bp, Homo sapiens
cacttgtaatcccagctactcgggaggctgaggcaggagagtcagttgatcccaggaggcagaggttgccatgagctgagatcgcgccgctgcactccagcctgggcgacagagcgagaatacgtctcaaaaaacaaaacaaaacaaaaaagtgttatttataggaataagaactaaaatgccttgttaatatattgttttggcattgccaaatttagcctatttgagtgcatggattgcatttggggattgctgttttcttttttgttttgtatgtttgctttagatgcgtagacagagggagtggagtaaggctttacagagattactacagaaggcatttttttttttcataaagaggggaaaacgcacccatctcataacaagaatttggagtcaaaacgagacagattccattcctgccttccacattaattagctaggtgactttgggcaaatcacttaacctctaggttttctcatcagcagaatgaaagcgttggcctatagacacccatttaaatccctcctccaaatactcattcgttcgatattttctcagtgtctactaagcacaatcattgttaataaacactatgattcttggagagctccaaa

SEQ ID NO: 870 - DNA, 451 bp, Homo sapiens
gccagctgtcgggcactgactctctgggctacattctcccgtgggttctctttaacccgcttggtttcaccgcaggggaatgctgaagagacacaagtgtttttgttttctctcttaaaaaatacagaaactgtaatctgttttacatctgggtctgactgcagacaagcaagagcgggcggaatggagtgatgggcaatccagctgcaagaagaggtgcatacccctctgtagacagcacatctgtgcaggtgtctaacagccgcctcatggaaggagtcatggaagacgttaggcccctccagttgggatcaagcaactgatgcaagctttggaccaaatgaaacatttcaagaactcagattgtaaaatcacaatcagctggaggaattcggatctgcatctggcccagaagaacatttttgaggatcttttgaaagtatcactaaga

SEQ ID NO: 871 - DNA, 1166 bp, Homo sapiens
cgggcggatcccggagagggggagccgcggggacgcagcgacagactcggggtgctggcagcggcagcccacgcctcccagggattgcaggcctgggcgccggggttggaccagtctcccgggcatggcacgccctggttattctgtacccgtgatttgtggcggggcaagacgttaagttgggtgacaccgaggtgagccacggtcctcggcaccagatgaggaaccactgtctcaataaggtctcagtgctgtgtgtgtaatggttaccgtgagagcttccctgcaatccgaatttgtgtgtctcattctcagtgacaccagtgatgctgttaaacaaggacaatccggttcatggattgtgacaacgcacgctgacatcaagcagaccctgccgtcaggtacagagggcaccacagtgaccaggaactgctgtcctttcataccaggttttaggaggctttaccagaaggaatggaaaatgctggtgggcagtaagattgaaacagcatctgaggactggttctgcacaaaaccttaaattcttcaaggactttgacatttgtttattcttgtaacaaattaaaacctatcctgtgtgttggttagagatcttcaaactgtaaataccttgaggcaggagtgaggtttttatcttttaaaggacaggcccctactctcctacgtaatgagtttctaaaaatggatgtgagcaccaatcaatatttctctggttgttaaagtcaagaataaaatggtatttttaagctcgcaactgtgtaggatgaattctgtacacttttatttccctctgttctcctttcctatttgaaagtttattagtttgtggacttgggatcggattattcatgcattattttttgatgttgtatgtctcttggttcttgggtatttttgacacatattctgtcttgtaaccatagttaaacaattgttttagaccaactctctgtgtgtaattggcttcaacactcactgctagtcctttgacgctctgtttttttccattcttgagtaattttaagtcatcacttgggcagttgaaatatattttaaagtgatttaaagaatatgtgagtggcagacattctgaactcttttggttgtctgtcctcaaaaactaaaacttatttgtgagtaaaatt

SEQ ID NO: 872 - DNA, 1838 bp, Homo sapiens
atgaggaggaggaagcctgaacagaaattcctgaaagggctaagagagactccccaacacagccaagcctttccaaaagccaggaggaggagagaggactccgactccggccacaggcccagggcaacgtgctgggccccggagcgtcctgctccctggggccccagggtaggtgcggcccagctcaccccagctcacggtcacaggctcacatgcagctctcacacagcagcagccaaggcccaggcaggaaccacaggcagggcctggggaacatctctgccccctcccaggccccgtctgtactcgcctagctaaaaagagccactctcgtcattagcagtgtaaaaacgacaccttccctctcagtttggatctggcctggcacacagggtcactgctgagtcacctgtgacttgggggtagggaccagggagggtggacacagttgagtcagaggcaggtctgtgggcagcaatgtctgcctctcccccaaagggagtgagggctgccctccagggacaacctgggcagggagagaagggcccagacctgccaggccaccaggagcactctctacctggggagtagctaggcaaaggacaaatgcatctggcctgtctgtgctgcagagcggggcaaggccaccaaagcatcaaagggaaatggccccaaaaccggctctctctagaggaaagccgaccagcaagctggggttgaagtgtgctgttctcgcctcctgtgcaacagcaactggcaaagcccactctatgggcccagatgagccggcagcatgagaaggctgtgagatttctgatgcacagatgtagaagctctgaggggctctgagaaacttgaaccaaaacacaaaaggggcgtgtgtgacggtggtgtctgcactccctggcgtggtctgcaggagacagaagcaccctgggtctgctgatgccagggttctctcagaccctacttcagcaactggagaggcgtggacatttaaaccttttaggaggccctcaggcctctctgctccacacggaagtcagcagccctctctgctctggctggcttctccaaggcacctcctggccccacctagggctcggggcaggactctctcgtgcagtgagccagcggggtactaactgggctcacttctgacagtaccgctcccagcatgcgctcggcttccagccccagagaccaacactgctaagtaggataagggatccggagccctcgatggcaccctccactcggcagcctgctcccgcaccactccaacccctcccgctcctcaccacgcaaacctgcctgccaacacagcaggggccacagaaagctgccaccagagccaccacagggatatgtaatgggcccagccaggcctaagggcccatcacagggagacgcaagaaagggagcaggtgacagaagcacggcggctccctccacaaagctgcggcccccgcagggctccctccctggtgaagagttccaggaccacagcgggaggggcataaagagccaaacacacccggtcccctcggccacagcaggaccagcacacagttggggcagggcgggcgcatggttcggactgatgctaggaaaaactggtgacaccaggtctgtccactagtctgggcgggactgggttgacgtgcatggagctgggtccccacggcaacgagggcacacggaggcctccacggagcacagagagcaagcaaagcgaccctgaattcctttgtgtttgttactggttttgttctttgtgtggttgggtgttttttttcttcttttcttttaaataaaaatgctgcaaggtttccgcc

SEQ ID NO: 873 - DNA, 576 bp, Homo sapiens
agcttctgctagtgtttaggtactagtgcagtgtagaacccttttctcaggcaaaacctaacatctgaccgcaccctttttgctattaaaaaaaaaaaaaagcttctatttttttcctgctgtcgataagataaattctccagtagacaacctctcccactaattgtgtattagcaacgtattttatcttgagagcttgtacactgggctctcaacgtggtgtggaaggtagcctgttacagtgctggattcataaaagggcctttatggtttgtgaaagaatatctgtgtgcttagggaggaaactttttgatctgcagaaaagccagaagacatctaggacatccataaaaattcatcagagagcattttactactgagctgcaaagggaaaaacttaaaatggatatgaaaagtgaagaaagtgatcataggagaaaaccatttcagatgacaagagcacctcaaaggcagcagcctcaaggagcagccatggccccagacttgtcgcacggatgcagaaaacttaatggaggaggctgaggctggagtgcaatgacgcaatctcagctcact

SEQ ID NO: 874 - DNA, 1333 bp, Homo sapiens
gcggccgctcagacaccggagccggcagcctggggaggcgcgccgggggcggggggcgggggaggggcggggcgcctgagatgggacgtgtggtccgtggctaaaggctgggacggaaaggcgcatgagccaccgccgcgtcaggctcggctatgggtggggggagcgtgatcgcggacccggggtgtggggcgactggaaaaacgggcctctggaccagcacacgccctgtgcggagagacactgtctggcatctcgggatcatgtgaggggctcccactgcccagtcacacgtctaaagcatcctagttcttacctattgtagcacggccggaaagtgagccgccttagctgctgattgtactagagcaggcaatacaagagtcggcccatcctcaaaaccactgataggatgtgagtttcactaaccccgttttacagatgaggaaattgaggcaaggccagggctcacacctgtaatcccagcactttgggagtccaaggttggagggttgcttgagaccaggagttcatgaccagcctgggcgacatagtgagacccccatcttcccaaataaaaataaataaatcagccggacatggtggcatgtgcctgtagtccctgctgctcagaaggctaaggtggaaggatagcttgagcccaggagttcgaggctgcagtgagctatgatcataccactgtactccagcctaggtgacagagggagaccctgtctcaaaaagaaaagagacttacacgaggtcacatagctaataagtggcagatagggaagagaacccttgtccctctactttaaggccctattcgcttgccccattatcccatgctgcctctctaagagccagagaagtaggaggtagaaaaagagcatctctgcagctctgggactgatgatgtgaatgaactgggtagatggtaagtgtgtaactgggtgatcttggacatgggatggggtgggtgaggaggcttaccaatgctgagaggagtggaagctccaaccccagctaatgctagacaccagactccaaatttaaacacacagtggaaactggcaagaatgaaatactgacttcaatacagatttcaagagacatgacattagcactggtggagaatggcaagcctaaggttggaaaaggttcagggaaggaagatgaaggtctgccatgttctactgaggaggagtttttcaaacagtggggtgctgtctgcaatgtgtacagccttaaaattattatataagtaatcaatactcattgttgaaaaataatatatggataaacaggaaaaataaacaaaaatcataatcca

SEQ ID NO: 875 - DNA, 2348 bp, Homo sapiens
agttagaaaaagcccgggctaggaccgaggagcagggtgagggagggggtgggatgggtggggggtaacgggggaaactggggaagtggggaaccgaggggcaaccaggggaagatggggtgctggaggagagcttgtgggagccaaggagcaccttggacatctggagtctggcaggagtgatgacgggtggaggggctagctcgaggcagggctggtggggcctgaggccagtgaggagtgtggagtaggcgcccaggcatcgtgcagacagggcgacatcagctggggacgatgggcctgagctagggctggaaagaagggggagccaggcattcatcccggtcacttttggttacaggacgtggcagctggttggacgaggggagctggtgggcagggtttgatcccagggcctgggcaacggaggtgtagctggcagcagcgggcaggtgaggaccccatctgccgggcaggtgagtcccttccctccccaggcctcgcttccccagccttctgaaagaaggaggtttaggggatcgagggctggcggggagaagcagacaccctcccagcagaggggcaggatgggggcaggagagttagcaaaggtgacatcttctcggggggagccgagactgcgcaaggctggggggttatgggcccgttccaggcagaaagagcaagagggcagggagggagcacaggggtggccagcgtagggtccagcacgtggggtggtaccccaggcctgggtcagacagggacatggcaggggacacaggacagaggggtccccagctgccacctcacccaccgcaattcatttagtagcaggcacaggggcagctccggcacggctttctcaggcctatgccggagcctcgagggctggagagcgggaagacaggcagtgctcggggagttgcagcaggacgtcaccaggagggcgaagcggccacgggaggggggccccgggacattgcgcagcaaggaggctgcaggggctcggcctgcgggcgccggtcccacgaggcactgcggcccagggtctggtgcggagagggcccacagtggacttggtgacgctgtatgccctcaccgctcagcccctggggctggcttggcagacagtacagcatccaggggagtcaagggcatggggcgagaccagactaggcgaggcgggcggggcggagtgaatgagctctcaggagggaggatggtgcaggcaggggtgaggagcgcagcgggcggcgagcgggaggcactggcctccagagcccgtggccaaggcgggcctcgcgggcggcgacggagccgggatcggtgcctcagcgttcgggctggagacgaggccaggtctccagctggggtggacgtgcccaccagctgccgaaggccaagacgccaggtccggtggacgtgacaagcaggacatgacatggtccggtgtgacggcgaggacagaggaggcgcgtccggccttcctgaacaccttaggctggtggggctgcggcaagaagcgggtctgtttctttacttcctccacggagtcggcacactatggctgccctctgggctcccagaacccacaacatgaaagaaatggtgctacccagctcaagcctgggcctttgaatccggacacaaaaccctctagcttggaaatgaatatgctgcactttacaaccactgcactacctgactcaggaatcggctctggaaggtgaagctagaggaaccagacctcatcagcccaacatcaaagacaccatcggaacagcagcgcccgcagcacccaccccgcaccggcgactccatcttcatggccaccccctgcggcggacggttgaccaccagccaccacatcatcccagagctgagctcctccagcgggatgacgccgtccccaccacctccctcttcttctttttcatccttctgtctctttgtttctgagctttcctgtctttccttttttctgagagattcaaagcctccacgactctgtttcccccgtcccttctgaatttaatttgcactaagtcatttgcactggttggagttgtggagacggccttgagtctcagtacgagtgtgcgtgagtgtgagccaccttggcaagtgcctgtgcagggcccggccgccctccatctgggccgggtgactgggcgccggctgtgtgcccgaggcctcaccctgccctcgcctagtctggaagctccgaccgacatcacggagcagccttcaagcattccattacgccccatctcgctctgtgcccctccccaccagggcttcagcaggagccctggactcatcatcaataaacactgttacagcaa

SEQ ID NO: 876 - DNA, 438 bp, Homo sapiens
ctcgcgccctcttcaggaggggacagctgagggacctgtgcacccccaccccatcctgatatggaaccacagggatgagagatcagatgcccccctgtagccatgggccgtcggaggagagggcggatgatgggcatccctttgtgccccaggcatgaagggtctgaggctgaattttcgaggctctcggttgtctttttcctctccttcacctttgggtctccccacggctcattagggattctattggaagagacgcaaggaactcaaattccacaatttggtttctgtggagaaggtttaattaggagggtgtattaacttaattggctatcatcaggcttccagcttctttgtgtattttaagtaattttctctccttttttcttacagccagtagagcatgcctttaaaagattaagtcttttctttggtctc

SEQ ID NO: 877 - DNA, 2362 bp, Homo sapiens
aacatgagcaaaagatacaaagcaacatttcactggagaagatatacagattgcaaataagcacatgaaaagatgtttgataccattagggaaacgcttctttaaaccaggagatatcaccacgtgttagaatcaacaaaataaggccaggcatggtggctcacacctgtaatcccaacactttgggaggctggggcaggcagatcacatgagatcaggaattcaagaccaacctggccaacatggcaaaaccctgtctctgctgaaaacacaaaaattagccaggtgtggtggcacacgcctgtagtcctagcaccttgggaggctgaggcaagataattgcttaaacccaggagacggaggttgcagtaagctgagatcatgccactgcgctccagcctgggcgacagagcaagattatgtctcaaaaaaaaaaaaaaaaaaaagaatcaccaaaataaaaaatagtaacaatactattgtcaaggatgcaaaggaactgtaccactcaatcactgctgtgagaatttaaagtggtgcagccactctgggaaacagcttggctgtttttttttatgactgaatgtgcaactactatatgatgcagtaatttcatttttgcacatttatcccggagaaatgaaaacatatattcacacaaaacctgtatatgaatgctaataaaagtcaattggccaggtgtggtggctcatgcctgtaatcccagcactttgggaggctgaggcagtggatcacctgaggtcaggagtttgagaccagcctggccaacgtggtgaaaactcgtctctactaaaaatacagcaattagctgggtgtaatagtagccacctgtaatcccagctactggggaggctgaagcagaagaacctcttgaacccgggaggcagaggttgcagtgagctgagatcgtaccactgcactccagcctgggcgatagagtgagactctgtctcaaaaaataaaataaaataaataaaaagattagataatctgcaaagttcctgtgagcgctgtcattttgtcactctggtttttcagattcttcccctggaggctggagtttccaggatgtcaaaattacctctgcttgggtgagctatttcaagcagctgggatacctgtgtcactcctgctgtctgccagtgactgcccaggtgtctgctggttcctccccaggagtagggaggaaccaggtgggctggctgggatgggtggatatttaaagaccaggccttggacgctgcagcacttctatctctgcttgatgcctgctgccacgtggctggtcctcctcctcctgctgtggctgagccttggggtgaagacagctgctcccaaccccagaacctttgctgtcttgggacggatcaccgctgcaagaggggaagttgctactgtgatgaattctgccatgtggcaccagactgccacccagaccacagtgtcctctgcaaccctggtaactcacatacaggcccgattccacctacagcaaagctggatgcgatggctggcagaggcaaaccctttgcctgcacttcaggccaaagccgggatgtggcctagatggttcctaaggtccctgacaatcctgagatcttgcatcttgtctatttcaggtcaaaggtgcctacatgctccttctagctttgtttccctgatgttccttgccacctgctactcctctctgagctacttttccaggttccacagggagaggttcagctgtccgtggtagacatgagggtagagaatgaggtggttgggttccacttacctttctatcatcttgcagtatggatgtctcttgactggtaccgtgtagacttttgagggcacacaggagtctgcagagagatactggggacattgagcagcagcagtggggttgggaggcagaaatgaggacaggaacatttaccttgtgtttctctcagcttctcagatgaccaagatggtgctgcagatggtgctgaggatggagaacccaccaagccccgctaggagccacctagactggatgcagagcatggttcagtgagttctccaaaccagcctcccaggaatgccattcaacatggctgtgaggagaataaagaagagagcctgactcctctcctgaggccccttccccaccctgagccagcaggatccacggagcagaggtcatctgtccccagcttggcccactgaggccagcatggctgggcccaggatgcttgtctctcagctcccatcctgtgtacttccacattggtttaaccagaggaaaaccgaaatctacaattgtcataaacacatttaaatgtgcgtagaatcagccatacaaattgtgaaacat

SEQ ID NO: 878 - DNA, 1471 bp, Homo sapiens
cggcctcctcgcttcttaaaatgtctgagctctacgaagtggaactgttagccctccgtttattgccttacttcacactgaaataagccaacgtttattttattttatttattttattatttattttattattttttttcgagacggagtctcgctctgtcccaggctggagtgccgtggcgggatctcgactcactgcaacctccgcctccgtgttcaagctattctacctcagcctcccgagtagctgggattacaggtgcccgccaccacgcccggctaatttttgtatttttagtagagatggggtttcaccatgttggccaggctgatctcgaactgctgaccttgtgatcctcccgcctcagcctcccaaagtgttgggattacaggcgtgagccaccgcgcccggcccccaacgtttctttttaagcctgtcatatctcacattaaatgtgtaagtctctgaactgtagggctttgaacaaaggaaagttccatgagaatactatatgatgccaatttctactgttaggaacgcgataacagagtgcagtgggggagaaaataccgtcctcaagatctgagaaactggagaggaaaagtcacaggacaaccaacttctctatgacatagcccagcatctgaggaaagtcctgcaatagtggaggtggagcagagggtatgagctgggaagcaaatggagcaggagctggaggctgccccatccactccaagccagagaacaagcagaggctgccacaggagatcctgggcaagtaatcagccacagcatctagattagcatgaaggaaacactggccaaattaaaagatgaaacttccaaaagagtctcgatctattgcccaggctgcagtgcaaaggtgcagtctcggctcactgcaacatccaccttccgggttcaagcaattctcgtgcctcagcctcgcgaatagctgggattacagtgcaaaggggaagagtcagaaggtgaataaatactcacagccgaagctcttcaaaagacttcaccgagtacagaggggagtttggatcccgctgcaggacttccacttggtttgtgttatcaacaaggttgcttctgatcagcttgttgagtaaggactgggcagctctgtcctctgtcaggaaaaagaaagcaaagaattttaaaaagtccttgaaacctaccaggcgtttactctaattcaactgccatttgtattttaaataataatgtactgaacattcaaattcaaggtacgtcatagttttgacttataaattaaaatagttttattaaagaaaaaagttatgatacatcacccatttaggcctcatattcttttccagactctattctaacagccctcttttcctgcagttatctattcctcctatccagacccacatatttactccccaatttgtactatatataaacctaaagtaattaatgtagcaatcacaa

SEQ ID NO: 879 - DNA, 1901 bp, Homo sapiens
cacaatgcaccgctcacggcgtcggttgcccgggcaatgggccgcacgctacgaggcccacacacccagaaggtggagccccggccgggttacgaggaccacccagctgtctggagagatgaagaaaatgaggttcaaagagatgaagtctcttgcctaaagtcagtgacagaaagtgacagagctgggatgtgaatcctggtctgactctacagtcccacatggtagatggaacctccgagcaacacctaaacaaaaggagttgatgcctccgaacagagtaatgtcgctggagacactaagcatcgtcggcccctggcaggagctccctaaatatgtgttggatggatggaagaaaggatggatagttcagagtacttcagccttgattcctccgcaacagacacctgaaacttgaccctacattggttcttggccatcgtgatcttccttggacagaatcacctttcagctccggtcatcagactttcccagggccctcagaaagcccttcagagttgttactcacaggcaggctgagggattccttacggggtctgcagctctcctcacctcatccacaagtaggaccgtggcctgttcctcactactgccccaggatcactctgttcccagcccagtccagcaatcacttgtctagctttctggaaccttgagtactttcttgaaccatgagtcctgtgaccaccctagcagctctaaccctcccttatctgaaaggaagtgtgaggtgaccttgcaggtcccagagttgattgaagaccccatccagaaagaaggcaccctgtgggagagattgcaaggcctaggtctgaatccggaagcttccaccccatggagaagggctggcaccagcctggggctggcagtggagctgagctttggagccaaggactgtactgcagtgcagggagagtgaggccagaaaggctgagacaactcagggaaagaaaacctcccttctggctaatagtcaagcaccgcctgagtagaccaacactctcctgtccacaggggcagcagatgaagacacaaccagagaggactaacaggccccctcagctctcagtcagagggcagagcaacacagaatagacattaaaggaacagactttgaggccaggcagccttgggtgtgcatctgtccctactaagccatgtgacattaaacaagtgagtccacctctctgagcctcaggttcctcatctgtaaaatggggattataagagttcttgtttctcagggacaatgtgaggattaagtgagatgatacacatagagaatgtggtgcagtactgggcacatggcaaagatcagtgatgctagctaccacttatcattagtgttcctgtagaccaggacttctcaaccttggcactattcaccttttgggccagaaagttttttttgttgttgttgtggggagctgtcctatgcatttgaggatgtttaacagcacccctggcctctacccactagatgccaatcacaccacacccccagtttcaacaaccaaaaatgtctgcagatggtgccgaatgtcttctggagggtgaaatcactccccagcagttgaaaagcaccaccctaaacaatctggactgaatttgaatgtcacagatcccaagctcacagctccatgtaaaggccacaaggcaggcaggcctacttgcagatgaaggaacggaaagagcaacaattacagatcaagcggctagctccggtgtagactaagaggcgggatctgtagtctgctctaggagctaacaaggcctctgtgactcagtaggtgacctcagtgtcactctttaattatatgcaaagtggtcttgtgttaactcttaattattctagggctccaaacaagaaaataggtagt

SEQ ID NO: 880 - DNA, 3951 bp, Homo sapiens
aacatcgagaaggagagggaacgatgactacaaacaagatggccttctcccccgacccgacctccttcccaggcactcacacgccctcctgtccacaaccctccgcgtgtgtggtacctgacgggagtcgcagtccatctgctgccttcccgctgccatttctactcgtcaggaacaatggaaaggtgaaaaggaaagaggactacaagcaagatggcggaagagggacatacacctgactagtagtcgatcttacgaggtgcgatgggattagtagttttatagccttccagtgttccttaagaatggcggaaccaggaggacgaggagactaccgtaaagatggcaggctacctagcctctcccggtctccgctttccaccaccttgggcacctcgcccgcctgtggtctcgaaatcccccccaccagtggcgcacggcctgacgggagttgcagtctcccggctcccgtctatcatctcaagtcgagacaatggaaggggatggggcggggccaccggcaaagatggcggctgcagggccggggcgactgcgacatgggatgtgtagtccaggcgtctggcctcttccctgcggaaatgagggagaggactacgaaaaagatggcgacctcgcccctcgacctctgcgccggtgcctgctgggaaatgtagttccttgccgagtccaacagagaaaggacgtcgctgttgaaatgtgaatcccggcggacacgccaaattgcgaggcgacggaaacggaaagactcttttctcctctctccgccaccggcttctgaacagcctggcgggaaatgtagtcccaagctttcactcgcgagtggaggggaaggatttatgtcaccagtggggatcagtgcgggtgggggagaaaaacgtcgggcgatccgggaataaagaatgtccgcctctccatggggcgaggacttcgcgtttcaggggagggcccttaaaggaaggcagcaggaatcagtcttgtcgaacaggggggcgtggttctcgtcgagagtgcattcacactcttgttccctagaaagcctgggcacctcccactcgattcctgctcctcagacctccgggaatcagtgtcttacaagacgtgcgggctccggggaaaaggacctggagtcacagcgaatccccgccccgccccgggaagccaccaaaccttgctttttctcatctgcaaaatggggacaatggggataatgatccccacctcgaagcacagttgtgagtgttaaacaagccaatgttcttgtcaccaaagtgcccaactctggcacggggcacgcggtggtagatccctttctaaggtcccttccagcccagccgttctgggagcccaggaatccatgatgccggacagagttcgctcctgtgagaagaaaactgacccgcaggctcctcccagattgaaccgacccccgcccctcctcatcggggtcctccagcgtctgttaccgagcactgctcccagggggcgctcaatctccattcgactgaggtactacaaacacgatttccgcaacctggagttggaggcattgcaggctgtccagcctcatcccctgcctgatatccagtcagccttggaggcctctgcctagacacttcaactgcctatgcaaatggaacggcttctcatctttctgccgttttttggttttttttgtgtgtgttttaaggtcttgctctgtcacttgggttggagtgcagttgcaggatcatagtttgctgcagcctcgacctcctgggcttaagcgatcctcctccctcagccttgtgaatacctgggacttcaggcacgcgccactacacccagctaatttttaaactataatttttttttgttcagacgaagtctcgctatgttgcccaggctggtctcgaactcctggccacaagtgtgcctcccgccttggcctccctaagtgttgggattataggtgtgagccagcagccatacccctcttctcaatcttccttctcccctggaaaacctgctcacttctgaccccaagacagccccctccccttccctctgtcttctgtgtttggcagaccagccccagcgaggacttgttggttgtggtttttctatcagggaagtcaatggctggccagtgtagtgtgaagtcccagcttggcagagacttgcccaaggctggataggaggcttctttgccgctcaggctttatcagtcaggaaatccttagccctccctagaggattggctgtcccctctatcctcactgcttgaatttggtgttgcatgattgatttctaccctgttccctctgcttgagggctatcctccccatgcccatctcacttctccaccaagttcactgttcatcatttacaggtctctatttatgtatttattatttatttttctactttcccacttttctaaaaggtctctatttaaatgccactgtcaatcccagcactttgggaggcctaggcgggcggatcatgaagtcaagagttcgagaccagcaatggccagtatggtgaaaccctgtctctcctaaaaatacaaaaattagccgggcatggtggaatgtgcctgtaatcccacctactcgagaggctgaggcagcagaattgcttgaacccgggaggtggaggttacagtgagctgagatcgtgccactgcactccatcctggacgacagagtgagactctgtctcaaaccaatcaatcaatcaatcaatcactgtcctggccagttgcagtggctcacgcctataatcccaacacttcgggaggccaaggtgagaggataacttgaaactaggagttcaagaccagccaaggcaacatagtgaggccccatctttacaaaaatacaaaaattagctggacgtgtagtcccagctacttaggaggctgaggggcaaggattgcttgaggctgagagattgagcctgcagtgagctatgacgatgccactcgctgcattcaagtctagatgacagagcaagaccctgctcctggacatactactaagtgctttcagcatttcatgtggtcctcataaaaatcttgagggccgggcatggtggctcacgcctgtaatctcagcactttgggaggccaaggcaggtgggtcacctggggtcaggagttcgagaccagcctgaccaatatggtgaaaccccatctctactaaaaatagaaaaattagccaggtgtagtggtgtgcacctgtagtcccagctcttcaggaggctgagaaaagagaattgtttgaacctggaaggcggaggttgcagtgagccaagatcacagcactgcactgctgcctgggcgacagcgagactctatctcaaaaaaaaaaaaacccacacaaccttatgaggtagaattccattttagagacgaggaaactgggaccctcaattatgcagaatggatgagtggtaccgccaaaattcaaaccccagactcccgaactcatgctcagaactattacaacatgcagaaacaacaaatccagtcatgtgtgcatttaatttggcatagcaacaacaacacatttctcaggcaaaatggatttccagcttctcttgaaaagtcctgaaatctagtccaggaccgtggattgtatttaaaaaaataaaaatagaagaagaaaaggccgggcatggtggctcatgcctgtaatcccaacactttgggaggctaaggcagctggatcacttgaggccaggagttcaagaccagcctggcaaacatggtgaaaccccgtctctattaaaaatacaaaaattagctgggcgtggtggcgtgcacctgtagtcccagctactcaggatcctgaggcatgagaattgcttgaacctgggaggcagaggctgcagtgagccaagacaatgccactacactccagcctggacaacagagcgagactcagtctc

SEQ ID NO: 881 - DNA, 287 bp, Homo sapiens
aggaaagaggtttaattgactcagagttccatatggctggggaggccttgcgatcatgcagatggcgaatgaggagcaaaaacacatcttacatggtggcagaagattccatgaagctcatcaccaggttagagaaaaaaggatccttcagcagctaaggtgaagataccatccaggatgcagaaatgggacctggaaagactccgtattccttttagggaagaaaaggtccatctcgaattacctcattgttcagagaataataagtatttgttcagcaataacaa

SEQ ID NO: 882 - DNA, 1711 bp, Homo sapiens
tgccggggggcggggacgcgggcggctccgggcgggcgtggtccctcttgcgggcgcctgggctggtcgggcggatcccggagagggggagccgcggggacgcagcgacagactcggggtgctggcagcggcagcccacgcctcccagggattgcaggcctgggcgccggggttggaccagtctcccgggcatggcacgccctggttattctgtacccgtgatttgtggcggggcaagacgttaagttgggtgacaccgaggtgagccacggtcctcggcaccagatgaggaaccactgtctcaataagtgacaccagtgatgctgttaaacaaggacaatccggttcatggattgtgacaacgcacgctgacatcaagcagaccctgccgtcaggtacagagggcaccacagtgaccaggaactgctgtcctttcataccaggttttaggaggctttaccagaaggaatggaaaatgctggtgggcagtaagattgaaacagcatctgaggactggttctgcacaaaaccttaaattcttcaaggactttgacatttgtttattcttgtaacaaattaaaacctatcctgtgtgttggttagagatcttcaaactgtaaataccttgaggcaggagtgaggtttttatcttttaaaggacaggcccctactctcctacgtaatgagtttctaaaaatggatgtgagcaccaatcaatatttctctggttgttaaagtcaagaataaaatggtatttttaagctcgcaactgtgtaggatgaattctgtacacttttatttccctctgttctcctttcctatttgaaagtttattagtttgtggacttgggatcggattattcatgcattattttttgatgttgtatgtctcttggttcttgggtatttttgacacatattctgtcttgtaaccatagttaaacaattgttttagaccaactctctgtgtgtaattggcttcaacactcactgctagtcctttgacgctctgtttttttccattcttgagtaattttaagtcatcacttgggcagttgaaatatattttaaagtgatttaaagaatatgtgagtggcagacattctgaactcttttggttgtctgtcctcaaaaactaaaacttatttgtgagtaaaattttcatctaagtgttttccatataaaaactctgtcagctactgctccattgtagtagacacaaaaaagtcagcacaattttcatccctccctccctcccttctcttccccttccccttcttgccctccttccttccttccttctttccttccttccttccttccttccttccttccttccttccttcctttttcttttgtttctgaatgtacaaagaaaacacttaaaaatttgcttgtaatttaaaaacttgtcaggatatttctggatttgagtgtttcttggttacttttacctggaacctggtgaactgagtccattcctctgtttgccctttctgtacttttttggaaagttttctttaattatatcttcaattattgtttctcttttgattgttctagattcttcttcagaaacataactcttaggctcaatctctattcctggtcttccatagctatcgtcttctttttaaagtactgtattttattgaatctaagctagtatttgttgtaagaagcactattattatatgtacaactaaggaag

SEQ ID NO: 883 - DNA, 3018 bp, Homo sapiens
ggaattatcagagtaacaatagttcctgttactgacttgatatggtctctgccagaatagcttctcagattaatggccactctcaggggaagcatttctccttgcattggtttgctggtatggatggcccttagattttggcatgagtgattatgcagcctatttgaagaaaacctgttttcaggacctttttaattaaatatggcctgttacatgagttaaagtgtcatacgataccattttttgaccacttagttgatgcctctgaaaggaagagagaatcagatcgctaaaatttgatgtgtcgtcagtgtggatcctactcagtagtgtcacaacgaggctgaaaatcatattaagtgcttttaggacagaaacgtaaactgctcaggtaaaataaccttataaagagaaataagcatatattgcagaggccttggctaggttcatgatgacacaggaccttgtctgaacataatgatttcaaaatttgagcttaaaaatgacactctgaaatccagtcagtgtgcctcactagacttttcgatttcaagattttctgcagaaaatgttttgaaaactttgaatacttaaaaatggcaggtgtagtattgcactttgctagttgctcagatacccttttttatttgtatagatattctgagttcctttttttttctacatgttgtacgttgtcgaaagctaaaaggaaacttatccttggatcacggaaggcagaggcatttggtgagatggaaacaaggatgtgtaaaaatgagacgaccacctctcggattaaaaaaaaaaagtgccagagttctagggttctaagtgatgtccaggaaggaggaggaataatatttatggagcatatattatggaacacaccattatgaatggtttttgattgatctcacaaagagcatgtgctttagacattaatgcagcgactaccatgaaacagagtattggattacctaaggaaagaagcagaggatggaatttgaggcaatcaggatgagtgaaaaattgatttgcagctgacctgcaaatggaatcatcaggaacatccctttctcatggagtcccttaatttacaagttaactgcaaacataggagatgatagttccaagaaggaacattttatcgtctttgtttttaatctcaagaatggtacctaccatcagtgaatgacctgttgcagtgctttcattgaagtgttcttcgttccctcagcaatatgattgtgatgactgaaaaagggaaactgtgccactatttgtaccatcattttcaccaaaatctaaaaatgctttttatgacgtatggagacattcttcatgtttgtttcagtggacactccttgcagatgtaaaaaactgagaaaactcacttttggaaagtgacctaaagagtgtcattgaagtgaattttaagtaggcacgatgattgttttcatggttgctgttggatcatatctcaggagctggaatgacagacattattgaacaaagaaatcaggatagtggaacttaaagggcttcatctcagtgctttcataagtatgaagtgcatatatttataattttcactaatcacaggaatattccctctgtatacttgcatttttttctatcaattgacgcttacaattatttttgcaagttggaaaaaaatgcagtattaatttcatttgcaacaaatttaatagattaattaggagagaatagatatctttaaaattgagtcttctgtccaactgcaagttatagctgaggtggtaccagtttaagaagtgagaacttcttcactgactgaaatttgcatatcaatccaaatcattgtgcttatttactatttttgtagacgtcattcttcaaaagtgctgcatcttcaatagtcaaggaggacaaagacatctttcctgcaggtggtgaccatgtggataataggatcatagacaaatggtggttccatctacagcatcaccgaaatgctgttgttactgcttctttctgggatcttcttgcatctttgcttctaaaggggcacaccttttatagaagtacgtccaggaatagaagtgacctgctttttcgcaagtaattgcctggaatgtttttatgtacttctctgcactctcaatacatttcatgcttccctctatttttgtatattaactcattgtatttcttaaatttatattttactttatgaatggaagtgagatttgtgtatggtaaatataattaattcaaccccatggatacgttagtcactgtccagatgatggcaagtctttctcagaagcagagggccttggtgtgccagtgattttttttccccatgtgtaagatactttttttcctcatttgaatcaggagcccacagtttttagacaagtcccaaatgaaatcttaagcatttgtgttatctggactagaccttctgtagtatcctttttgttagacctagtatatctcattgcagatcaggatctgagattgactatagttcacctctttccaagtacacaaacttggatgacatgacaactgagtgtgtaagggagagcgagacccttgcactgccatttgagcccttgtgatctcatcttgtagaacatgttgtacaatcattttattggtatcattagtgttatttggggctggaataaaaatctcagtgcaccaaagagatttcccctttatccacgttaccctggttttcctttgttttctgtttaacctaaacgggcttaatataaaatagtgcttatttggtgttttaattgtctgcttctataacataagctgcactgtccattggggaactgctcaccatattgcccaacctgtcttgataggtttatacatgggaggcattcagtaatattaattacctctctagaccagtgttagcaataacaaacacttgctagaattttaagactatataatcaatcactttgatgtcagttaatcctaccaacacaagattaaaggtttaaaaatctc

SEQ ID NO: 884 - DNA, 971 bp, Homo sapiens
tcttcaccccgcccctcccttgcttagtcgctcggctggcccggctcaccttcggggtgaaggctaccagcgagcgttatagcagacgactttaataaatgcaggcggcagcaggaactctgggaacttgggtgcccttgcctggcagtaagggttgaattatccggatctgaaatactttacagagccgaggggtgataggctctgcaaaagcactttttgcccctctcctttatgccaatactcgctgactgtgcacacaagtcatattcagtattaaatacaaaccggtctgtaattcaatggctctagcaagacgcctctgagagggccaggtggcgggtgcaagttgctcattaaccctttagagtcgcagtttgcagatctgagttagatccccggctttgaggtccttcagttgccctcctcccccacctccccccgccactgcgagaaaaatgtgcaaagagaaggaaatttgcacatcaaacgaggggcaatcgcggcggtagatgaacttgattaggcagacgcgtgagatcaaagtggccgggaccaaagcggacagggtccaacgtgccagcactgccaagagaaggccttttgtactcaggttaaataagaacatcctgcaaggagtctgttcttttatgcagcctaaagatcaagtaataatcattgacactgatactgagcatgtcgattttgaagagactagcatttcctggtaatgaagtggagtatatatccatatatttctgttttctggatgagaagactaacctaactaagtaggaaccttgaagaatcatgttcttcctaggaattacaaatcccccgattccatgtctaacataatttctactggcctctttgcttctcatgctttagtaccagtgcttctgaatttgaaagtcttcatgcaaattgcccagctgacagggcagccactgttgaggaaatgctgatca

SEQ ID NO: 885 - DNA, 497 bp, Homo sapiens
aattgtgtctttgagcgcgcagcatcgtgctttgtgctgccggggataacggattctgggtctcacacgcatccgtcacctaaaacacccttaaactgaaccagggtctccacagctggaagggaaacaacgtgctgggacccaggctgctctgagctacaaggatcccaggagtgaaggaaatgtttcagggagcagcccaggcagcggggggaggaagaaagccctcgcactcttacctccacattgaaatactgctccgttccgcagactgtagcacataaaatccaaagcaaggtttgcaagaaaaacacccccgaatgatgcacgaaatccaaccgtcttccagtgctgaatccagcagaggggaagaggagcccacgggaaagaaaagcaggcgaggttaagaataaagagtgttccaggatagcacagaagcagagactttaagtctaaacagacctagattcagagccgacccgatgctgcttgaagaa

SEQ ID NO: 886 - DNA, 789 bp, Homo sapiens
caggtctgacggggactccggctcggagctgggcccccgaggccgccagggagggggccggtgaaggttatacgagaggctccatctgtccttattgaaagtgctcttaacgcagggaccagccgtcttgctgacgcctgggccaccgagcacagggacaggacggggttgctggaggtgcaagctgggagaaagcagagaactgactccatgcagagttgggattaagagcccctggacaaggggccgaggcagtgaaggacgtccatcactcatctgccactatcctcctcacatttaatcctcacaacacccctgtgaggtttatccgcttcacctgttgctggggaacactgctctccgggggacttgggggacgacactgtaaacatgacttcctggcctgatggtggcagggctgtgtgtgcgagtcactgtccagggacagcactgaggtagaccacggtgacatcgaggatgccgctgggagctgtcactgcaggaaggttggtggggagggaagtcatgtcacacccaagcatcaggggagaccccctgccaggtcaggaccctgaagtccaggtcaagaatcttctaccttgctacggtcccctgtgttaccctcctgtggtgagaagcgtgggtgacatgcctcttccaagttggacagctgcccgccatgactccaacaaatgtggagatgacaagttggccatctagctcaagccaagtggacgcagaagcaagcaaccgggaaactgacaggactcacactaactgggcttctgg

SEQ ID NO: 887 - DNA, 535 bp, Homo sapiens
aaatggaggaaaaggaaaccgcctttcagttcaaccgactcactgcatgatatattggcctttctgggtctttggtggctatactcgtttggcttttctccttcccagcttggaggctgctttatccaaatgctttcttcagtcctcaacttggcgtttcaacccgaatccgccttttcttccatcttagatctgccttcttatgtgtttctccagctcttcgtttaaaactccttcaaatcgtatttcagttttgactggtatagcatacattggcaactgttacacgcagcggctcttttcctcataataccgtatttggtttaatttgtgtaagtcctgccttgcgaattggattttaagttcgagaagggcaagggcagaaccgttcttttgtctgttccacaccccgggtgcggggcctgggaagtagaggctttgcttactactccatactgcaaaccttagtgtacctgcctttgcagggcagctattctcatgctcttaataaccctgaataaacctcagaattgca

SEQ ID NO: 888 - DNA, 541 bp, Homo sapiens
aacgaagaggacactggggcatttaactgccagtgcccagcagtcgtagttgagtcctgctgatgaaacagaaaacctgcaacctgccctgtttgcaggcagaacagacagttaaatatatcagccaaggaacagcaggggctggtagctgaagtttggacagtcgagcccgtaaatgatggagtctggctctgtcatccaggctggagtgcactgatgcgatctggctcactgcatcctccatcctcctccctgattcaagcgattctcctgcctcagcctccagagtagctgggattacaggtggaagaattctaaaatcacacaagaaaatgtaagtcaaagaagctgagatctcaatggatgacaagatcagctcaaagttacaaacacagacttagaggcagggctgaaccgccatttcttagcatctccctttatcatcatcctattttaaagagtaacactgactcgcaaacaatttagttttactttattacaaaattcactgtttctatttcctatacatatggtttacctt

SEQ ID NO: 889 - DNA, 1677 bp, Homo sapiens
gtctcttccttcctaggcctacctctgttggtgcttttgtcttccaacctccctatgtagtaagaccagccaagcccacatgcccactgggagccctgaaaccagatctggttttctgtcttacctgaacaggttcccagaacccacaccaggcctctgaatcagtctctgagaatctgattgatttaaagccacttggttgcttccattgcactacctgggttgcgatcccctcaattgatttagtaaaaagaaaacttagcggccgggtgcggtggctcacacctgtaatcccagcactttgggaggctgaggcgggtggatcacctgaggtcgagagttccagaccagcctgaccaacatgaagaaatcccgtctctactaaaaatacaaaattagccgggcgtgatggcgcatgcctgtaatcccagctacttggaggctgaggcaggagaattgcttgaacctgggaagcggaggttgtggtgagccgagatcatgccattgcactccagcctggacaacaagagtgaaactccatctcaaaaaaaaaaaaagaaaagaaaagaaaagaaagaaaactcagctaggaattagaaacatcatttgtcctcttggcctgttcagctggtgactgtagatttgatgaaaaggaaacttgggactccggaggaccaagatggagcgagacggtcaatactgatggacttgcagctagcaccatggcagccctgcctggtctaaggaagctggcaggaggcgatggtacctggcgggggcagactgcccacctccccactccttcagaggactgtttcctgcccttcacaccatcatcatgttgggccctgcatgtatgttcctgcacttggagcgagcccagggacacagggcagacactgggctcacagatgttgctgcagctgagccagaaaacattccaggcaggaaaagcaggtgcacacattcacacaggcctctggtcactcgaccagccagaatgagacggactccttgacctgggaagtcaagtcccagtgggaagggctggaaatcacacgtggtcaacttcttggctctctctgctccccaaaccctggccctaggcttgctttatcatcacatcccaaggccagagggctgctgctgtccccatcttggccctgctagaagagggataggggtggctggcatgatgggtgaggggaacatgagaatatgcagaggccttggaggaagaggactggcagttatgacaggaaggctctctatacctggctccccagtgttctgcccctggcactgagcatgaggagccaggctttggggagactttgcaatcacccccccaacctggtccattttccacaggtagctttcttgaactcaccttgacccctcctcagccagcagcccccacctccaggggcaaaggagctgaaagacagtcctgaactggggggagctgggatcacatcagccaggccctgtccctcacaggaagtgagatgaggtgataccatggatggtgactaaggccccaaagtccctgcctctctgcctccccagaaacctcacagccaggccagcccccagagcagagcctgtgtaaacatgcccaggaggggaggaggggttgctacatatgagaaacagttaaaaataaatttaaaaagc

SEQ ID NO: 890 - DNA, 430 bp, Homo sapiens
cagctgttgagataaaaaaatttgttgtcatttattcccaggcacagctgtttgtcatttgcattgaaaaagtctccattcaaactgctgtcacatataaaatctatttatgtaagtctgtatttttctgttgtcttggccttggtgggcagtagtgtgttttaactgagcaaactgtctttccaaataatgaagctgaagtcagcctacctgcttgccatttttcttccccttccatttttctaatctccggataattgtaagaatgaattaagatttgtgtttaaggccgggcacagtgtcttaggcctataatcccagcactttgggaggcagagacggacgtatcgcttgagctcaggagttccagaccagcctgggcgacatactgagactctgtcttgtataattaaattaaaatttaaaaaaa

SEQ ID NO: 891 - DNA, 712 bp, Homo sapiens
agccagggccgcggttcgcctgcacgtcacggctactcaaacccaagcacgtcccgaaagcggtattttctgcgtctgggaggtttttgcatcctcagttcccaccgctggggctggcggcgaccaactaagtcccactttatcattaatgatgacaataactaaggctgccaggaacagcacatctgctgagctttatcaacaccagattctctcattttgccttctggatctccatgcttttttataccaacaaacaagaggaagaatattctctacccacttccttgactgaagcctgctcttttatgaagacatggcatctcttccaaccgtgtcaaacagatgcaatttatatgtctgctgcttccataccctgattaaatgggtcagtggcagaatcagtatccttagtctcccctttggtttcaaatatgtactccttatttcagtttcatgctcacctttctgtagagaccaaggcatctgcctttgcagctttacctcttcctccaggttatagtttccattcatggaatcttttagctgctggctggcagttttcctgtctacctgacttccattcctcttctcatgacttcagctcccatgcagatgtcttatcctgacatactagcttctccattctatttctgtgtgtgtgtgtctgtgtgtttccctactagttcatccacatttccctatggtcttt

SEQ ID NO: 892 - DNA, 705 bp, Homo sapiens
aggattttaaaacaatctatcacctatctttgaccatatggactaaaattgatatccaccaatagacactgatgcctgcaagtcaacagcataaagagtggtaaagtcagtgctgcaaaagatgaaatgtttttaatgtgctctggaggctaaccatccaagaccaagatgtcagcaggattggttcctgagggccttgaggaagaatctgttccaggactttccctttggcttgccattggccatattctctctgtgtcttctcacgtcttccctctgtatttgtttccaaatttcctcttcttataaggacagtagtcatattggaaaaaggaacaccctaataacctaattttaacttgattacctctttaaagaccttatctccaaataccatcacattctgaactattaaagattaatgcgtcaatatatgaattttgtgaggggcagggagacagaatacaaccaacccacaacacccagatacatagcgaaatcttcttcttctaggccccctgtgcctgtgtccaccacttcatcccccaattagctatatttgaaaaagtaagagggaaagaacagttggagggggaagagagagagaaagaagacagacaacttagattatgtgccctagatgttggccttacaaaacgggagcaaatcttaaccaatcattgtagcaaaaccttttgtttatga

SEQ ID NO: 893 - DNA, 472 bp, Homo sapiens
ctggcagttttcctgagtacatgggagttagggcagagaacatgatgtggtgctggtagtcaacgcaagctggcacggcctcagccagaagactggagctaggagcaagcaaagcaccaagtaaatgaatcaaattaaaaaacaactacaacaacaacaacaaaggaggaaactagagaacatcttgggaactatccgcttttggaacttatcccatgctggaacattgccctgagacagacatccatgaagaagcctgggatgaaagaccacatggagagaaaggcccaccatcattctgcaccaactaccaacggcgtaagggaggttgacttggatctcccaccccagttgactctccagctgaaagcaactgcctgagcccaaacaaaacctgctgaggaacctccctgctagcaaatggaatcaggagaaataataaatagttctgttgttttaagtcaccaactca

SEQ ID NO: 894 - DNA, 555 bp, Homo sapiens
ccaccatctcttccttttagagtttgccatctccgtaccaccaccaccaccacacacagcaccctcaagactccctgtgatcctgggatgcactcaacgaagagtgtgtggcccaggatttgatggaaatgctacaagagaagcaggctctccccttctgaaatgatgagtgataatgaccatacaggtcaacttttccaccacttggagggagcctgtcaaagaacaaaggcaacagagaagagagcagagctgaggttgggtgagagggagaaattcctgagtgcttgaatcccacatgccggaagccgcaccacacttggacttctcaatacaggagccactctgcaggcatttattggcaggctacacctaagactttctctgcagaaaaatgttctagatgcacagatttgggggcttgattgacaacctgacacctcactctaaatccgcatgggtctgttgacctcagggaatatgccctagacacagccctacaatcgaccctgtgctgacctggtgatcctcccacttcttcccaaaataattccg

SEQ ID NO: 895 - DNA, 422 bp, Homo sapiens
acctgagttctaaatttatttctcaaagaagccaagctcctgagagagaaatgatactgtaagagtatctgcctggaaaccctgttgcctggagaccactcttgaagaacatccactgctgtggcctcttaaagatttaagacatctaatgaacagctgacagaaatcatcaatttgctcctcatttcagtgtcaaatcatgatgcaacagcagagtgaactcagtgtttttggtatgaagatctccatgtgtttccatcatcagcatctcctgtgctcttaatcttaccctggacacctgacccaggtgcccattctgtgaattctttcattgtaggaaagagaaacagatgttgacaccatgctcttggacttcccagcttccagaatcatgagccaaataaacctcttttctttataaa

SEQ ID NO: 896 - DNA, 566 bp, Homo sapiens
acaacaggagaggcaagcagagcacagtaggaactgaatggggtttgcgtgaaagaaaaatccagggaaaggtgtcctgcagaacgtgcacgagacggggcttcaccatgttggccagacatgttggccagacgggtcttgaactcctgacctcaactaatccacctgcttcggcctcccaaagtgctgggattacaggttgcctcccttgaacacacctgaatttgccaacatccctcttaaaaagaggcaccaagaggaatgcagaaggccagcatgcaatgctatagcccaagttccatgccagcacttgaactttgagatgctcttagcttttctagcagtcataaggcacttttgcccaagaccaagcttgcagtcagggaaagcctccaggtttttcgaaatggccttgaacaggttttaagccagctctcttgcttttaatcagaggtcatttggccaagttgcagcctgttgttccagcccaggatttctccacctaagcagatacttctaattggggagagtggagaagcggcaacttcaattgtcccccctgacat

SEQ ID NO: 897 - DNA, 866 bp, Homo sapiens
ggcttggtgaaccctcaaaaaggctgtcaaacacccagaggccttggggatcaggaaggagctatcatgtggtctttcatctaagagagaattgtcctgcctgatgggcttcaaaccaccagaacatcagttcttcctggttctgcagtagtctccaaccttcagactcaaacttcagcacctgttcttcagattttggacttgcagcctctataatcacatgagccaattccttatataaatttatttatacatgctgacagttggttctgtttctctggataaccctgactgttagagctgttacctcaaatttgttttcttatatttggtgtctgttttggagtacttacaagtgcttaaaatgttctttttcaattaggtgagtctcagtctctaagataatttttttattgttctattttatagattacatgttaatgtcaattaagctataaacattttattgctgatacattatcaaaatgcttttcaaacagccatttccaacagtctattctttggcaaaaaaacaatgccattctcttgccatggccaaatgtgagtgctactaacaggtaaactcttaatttgtaagtgaggctgaaatcttaaaatgccttcctgaaacttatacatgattgattttgtttatttgtgtaatttctttgttctatggtttcagcttcaattgctgagaaaatgtcaagattatttcctgagaatttcctttgtggctaagacaaaggagaagttttaattttactagaaactgtgaaacgaggcttttaaaaagtttcattaaaaaaaaaattagggaagaataggcatattcagaaaacctactttcatttaggctggattgg

SEQ ID NO: 898 - DNA, 1151 bp, Homo sapiens
tgggtttttgccatgttggccaggcaggtcttgaactcttgacctcaggtgatccgcctgcctcagtgtcccaaagtgttgggattacaggcacgagccaccgcgctcagccaatttttcctcaactctctctttcctggacgggctgcgttggggggaggtgcagggaaagaacacctctttgcttagacattggtgtcgacagtggggatactaagttcatctcctgatcctgctaggcctggaagcaggaaagaaatgtcctggttagagataaaattgttctatccttttagaaaagcctgttaaggaatatgatgcaaagccaccttcgacgaaatctgaaatgataccccacagccttgtccaccccaattattcagtgacagggctccagttgcttaagccatagagaaggcccctttgcagtgggagtcactgaagacagaaagggaagcccaggatgaacccagtcctaagggctgctgggggccaccaaataagactgttttagccctggacacagagggagacacagtcatcccagatccttacaaagaatacattgccaaggaccccgaaggaaatctgcttgtcttaagagaggaagacccacgaccagctctctgggactacctgtcaactcagcaggtgcagccagggagcagccatgcttcttctgccctcccagtaggctgggctatcagttcctgggaggggtcctgtccccatgtaaggggatatgtacattgctgagtacgctgatatctttttcatgggtatgattttttaacaagaaagctaaatggttctcgtgtaacataactgatatagtttggctgtgtccccacccaaatcttatcttgaactgcagctcccataatccccaggtgttgtgggagggacccagtgggaggtaattgaatcatgggggtggttaccgccatgctgttctcgtgatagcgagtgagttctcacgagatctgatggttttataaggggctttccccctccttcgctctgcacttctccttgctgccatgcgaagaaggatgtgtttgcttccccttctgccatgattgtaagtttcctgaggcctccccagccatgttaaactttgagttaattaaacctctttcctttataaatta

SEQ ID NO: 899 - DNA, 649 bp, Homo sapiens
caagcatcctccttactgaatttagattttgttccgattttgtggcctgcgtttcttcttactgccctgctctgtggccctgttcttcctgggtttggagatcctcaaggatgggcttcgggaaggcctctggccggatgatctggtgacgtaatcccatctgacgctcagccttggactttgaaaaggcacgactgtcctgtctgatggacaggatgcagaagcctttgggaatgggcattttgccagaataaataaaagaagacaattggcaaaagatggactgtaccccatggccccaggctgctgtgtggagagacttgtcctctcctctgcccacggtcaccagtgagcaccagggacggggtttcctgctgcacctgggcctcttcctgctgccaggagctgccttgctgcctccacctgtgacagtccaccccccataccccccccacccgcaccatgagaggatttccagggcccacccgcctccagtccccgttctctctgctgctttcgaggtcaccctgggctggaaggggtgcctgggatactgctcagacgtcttggccgccctcccaccccgcaacaccccgctcctggttttcaggatgaaattgtcctcaaataaagcaagcttttgagtcaa

SEQ ID NO: 900 - DNA, 1439 bp, Homo sapiens
agcacaaaataattcccaagttcaagatttatttctgccttctggagacatggtctctgtcactggaaaagaaaaagagtcagggccttccgtgcttgtaggatttggatgtagaggtggtgggaatgtctctggacttgggacagcacctccgatgtctatgaataggacggactcactggtgtgtcctccacatgttcttgaggaagttaacaaggctaaacaaggaactcactgtcctgcctgctcagaagactcagcacaagagaacacacagcaagactcaaagttttggaactgcaagaaagcagaaacctggctccttctggctctcagatcttatgactcaacaaagaatttaaaaagaatattctccctattgaaaggtctcaattttcccatctctatggacaggcggtaaaatgagatagtttacatgaaatgctgtctggccctcagcaggagctcagtaagtattggtcttcttccctcttgcagatccactccccagagtctgtctttccagagtttctctgctccaattcatttcatatcctattgccagatgacttctgctaaagccaacctcattctctctcctccgtgctcaagccttgtggcttcccactgtctgtcagagtgaagtgcacaccaaaggcctaggttttaggcccttcctgtgtgactctcctcaccagcacaatctcctttctctcttccctccttcacacactcagtgccatagccaactgggcagctggctcacccttctccatgccctgcttcatgccctgcttgtccgcagcctttgctgacgctggagagaaggcacttcctctccagccttgcaaccttctagctcagcatgacccttagccctcagaaagatacacttatcttctaatgacatggaaatgatcaactgagcttgatttgtagcaaataatagaataaataataacgcacacatataattgacccaacttttggaactctgcagggatcatttaatttctcaaagttagataatgtttatgtgaagcagatgctactactaaatatataaatacacatttataataacttagtgtatttgtgggtatgtgagtatagatagggagagagatgctcagagaagatggagatagatataagctagacaatagctttctatataaacatttacatctttctatctagcaaattagtttgagaaggaaaagtcatttgcagatactctctagtgaagtattaatttccaaatgttatcggctgaccaactatatccttttatgtaagaagcatattgcagacattaaatactctattgtgaagactgaaaacgacctaaactattccaacaattggtatatggttatagaaattatggtatactcacattatgagctattacacagccataaaaatgatgtttttgg

SEQ ID NO: 901 - DNA, 943 bp, Homo sapiens
ctacgctgggaagagatgagctgatgcccagctcagctgctcttctgagtcttcaatttccagaccaacctcccttaaggtgactgacagtggggacctcaacctcacctacagggatgtggactgatcccatggtctcagtgagagacccaggcaatatttctacatgaagcatgttggatttctgaattatccagcctcaaatgacaccgggatgggacagtgttaacccagataagaaaactgaggctctgagaagttgagggacttggtcaaggccacatgtcagtgagtgccagaagtttctgctactcctacaaaatcagaagttccccaaatccaaaccatctcgacctacccctgtgacccgccaaaagaagctggccttccccatcctcctgtctccgcagtgccatttgcctttcagtctcctaaaaagaagcacttactctcttccccaaatcgcagagggaagcttcaaatacacttctaatcatcctcagtacccagcagtatataggaagttattgtcccaaagttgtgtgtcatgcccgaagtgtctgggatccccgagtgcctgtggtgcccaagagctatgaatctgctatcatcaacacagagggtaccttctgaatgggctatgtctacagtgatgctgcaaatggaagctaaccctaggatgactggcctctgacacttgagccatcccatcatctgtcatgggttgacccatccatcccctcaatgagcctgaccttcaggaccactgacagaggagcagtcaatagaaattaattgttaaatacccagaaaatctgaaatggtatttaatatgcagttcatcaagagcaaaagttccttaaatcttcatctagaaaagttatttataagggatgaatatgttgtatgaatatgttgtatgcaaatattatattcaagggca

SEQ ID NO: 902 - DNA, 628 bp, Homo sapiens
aacgaacaactccagacgcgccaccttaagagctgtaaccctcaccgcgaaggtccacggcttcattcctgagccagcgagaccacgaacccaccagaaggaagaaactccaaacacatccgaacatcagaaggagaaaactccagatgcgccaccttaagagctgtaacactcaccgcgagggtccgcagcttcattcttgaagtcagtgagaccaagaacccaccaattctggacacgctacctcgatccagatgaaggtaccccaagcagcttgagatgtgatgatggagaccagtttgagaagacccatcatctctgatttccctctgattatgaagtaatacaacaaagctacagtaagtggactgatacggtggtgattgcaaactgtttctaacttctctcatttactggctggtgtctttagaggtagcattgcatttcattggcatatgttttatttagtctttctaaattaaaaaagtatatatctgttattttcacacattaggaagtaagaaaggatgttaaagatacctatttctgtttttagtaaacaaagcttattgaaaaagtcttttttgtatttgctaagaatgtttttcattaacaatggctattttct

SEQ ID NO: 903 - DNA, 557 bp, Homo sapiens
agactgctgtgctagcaatcagcgagactccgtgggcgtaggaccctccgagccaggaccctgggccagggaaagaaatgaatgaagatgccaccttatgcccagaacacatctctcattcaatgataaaggatttgtggttgggtcaacttttgtgatgctcaactctttccttcgtaaggacgggctctttctcaggaggcttttgtactcccaattaacgcactgctaatctgatgaagctctattttgtagctatgccatctggatcacatagcctccaaggccagcagagcagaggaagacaaagagcagagcaagatagaggtggaagttacacgtcctttgtgcttactttctactggcctcatcgggtcgcaagatcccactctgataggtgcatgggggcttggaaaattagaaaaacatgtgaatatttggtaggcacttacaatctctgccagcatctgcccttctaatcagcaaattttcaattacttttttcttcacccacataagacatcttaatccaacctcaggggacacatcctgatgtc

SEQ ID NO: 904 - DNA, 2705 bp, Homo sapiens
aggctggtgggggcggtgttgctcggggctgcgatgccccttaggttgcgggcaaccagaggcctcactcgtgggcaggaagcaagggcggaccccgagagatgactgattgtgggggtggggaccgtctgctcctcctaatggctggggaccgtgcacgtctgcgcgggccggacctgctcttctcgggaacttgcgcgggaggaggcccggagctgcgccgctttaccctctgctccccggtgcctaaaacgcacacgcatcaaagtcacaggacgagttagaggagaaaggcagagggagatttgaaacacagaggaggtgatgagaagacacagcagaagatatctgaagactggaaagaatgctgcaaccaacaggagaaggaaaagacagaaatgtgttttccatttggagcatccagagggagcacaaccatatcaacaccttgattttgatccagtgacattgattttggacttgtggcctccagaacttttagagaataaatttgcattgttttaagccaacaggttggtggaaattttttacagcagccacaggaagcaaacacagactcctaactggtgcttagtcctagaatatcagtttctgttccacttctggatctcataattgcatctcagacatcaacactgacttcatattcttaatgcaccaattctaccatttcttcaggctgcaaacagagaaaaacttatttaagcattccagaattgacccaatagaagactctccagaaaagactgcatggtctctgaagcagcatgatcagcatgactggctgcatctgggctccaccgtttgccacttcagacaggtccttagcctcttagaggttcattttccttgctgtagcccggagtaagaatgtttagcctacaagatttattttgaggcatcaatgaatcactatgtgagcctcacacagtgtctggcactgatattacaaaatatggttgatcttgccatccttgttattgtcctggtggggattcctctctgttgaagatacggagcctctaaaaatgagtggcagaggctcccagctcaggatccttgtccaggtcctaaagatcctccactctgcttgtcactctgttcattatgtttgcatggccaccacggtcaacactactgcggcctacctcaagttctcatgcctcactctctgagctcatgaggacacaaggatcctttggcaacacattaactacactctgtggccatcccttgacttctgagaggatgtttccctcctctcaatcaaaagctctcttccctcctgggcaagatccttgcatgcacccagcaccctcacacctggtgccctcacacccagcactctcacacgtggtgccctcacacccagcaccctcacacccagcaccctcacacctggtgccctcacacccagcaccctcacacctggtgccctcacacccagcaccctcacacctggtgccctcgcacccagcaccctcacacctggtgccctcgcacccagcaccctcacacctggtgccctcgcaaccagcaccctcacacctggtgccctcacacccagtgccctcacacccagcactctcacacttgcactgtcctcatcccaactctgtggttcctctggggaatcactgtggaatccctcatgggaggatgttttcaaaagaaacaacagcccaatgaagggtatttgaggatgagaagcaggaaagaagtcagtgggtggctgagttgtgtccaggttttgcgtggccatggaaaatcaggtgaaggacattaaatatcttgcagtggcttctccattaggagcatgaaatgaggaaaggggctgtcctcacaggccagccaagagggatgcctatgccaaacagaaagactgacagtaaacagaatccaggatgacatgactgaggtatggtgtgcagggcatggcccagggaggagggtagataagtaagcctgggtgcaccttcagaggaagaaataacagaggctgcaggcgagagagttacaaggaaggaggagcaggaagacacgagaaaaattcagataaactcaacatctccagcctgggggaaacgtgagagggtggtatgaagatacacacgatgcatgttgcttagtgaaagcagccagtcggaaaaggctacgtagtgaatgaccccaactatgacattctgaaaaaggcaaaactatggagacaggataaagatcagtggttgccagtgaggcaggagaatagggtctgggggcagggagcctaaggctgattcatgctgacttcatgaacggaatcaaaaggaaaaccctaaatttccatgcccacgtaacaaaaggatcagaggctactccctttgcaactccccccaactttctgtgttgcagatgaaaaatggaaagtgcctcggattggtcccctcctgcaaccagtcagacatctgcatagagcgtaactttgtaacttcacttcagcctctgcttggtcaccttccacaaccaatcagactggtcatgggccactatttcatagggtgtaaaccaagtgaccaatgggaaacatctagagggtatttaaaccccagaaaattctgcgaccagtgcttttgagccttgcttgggcctgctcccactctgtgaagtgcatttttgtttcaatacagctatgcttttgttgcttc

SEQ ID NO: 905 - DNA, 659 bp, Homo sapiens
cccgcgcgcccgcgcggcggaggagaggtgttaagtgtgatgcttccataatacatttggatgctgtcagctaagttcacttctgaactaaggggttcctccaaatgttggctgaaattcatcccaaggctggtctgcaaagtctgcaattcataatggagctactgtactggctattggaaggaggagattctgaagataaggaggtaaaacctgtttagaaattaaaaatgagttacgatttaaagaaaattcagatgactcattgtgagtgctagttctcttgtaggatgccactggaaatgttgaaatgaaaaatattcagccgttggtctttgaaatttcctgtgatgtgtttcaatctagatgcaaagaacatggaaaaatcaaagtgctcgagtggtttaaatatgttttgggtattcctgtttatagactataatacttttccaattaaaatcctcagttgtcacgcagaagaaggttaagctgtatttgattgccagttttactgaaaatgcttagtattttacagtatcaccaaatatattttgtttagccaaggtataggaaaaataaaataaattgtataggttgacttttttctaaaatgtctttattggattgaatgaatgtttatacctgaaaaaaaaaggttc

SEQ ID NO: 906 - DNA, 582 bp, Homo sapiens
accttctctgagcactagctggaacacggcggctcttctttcttccactctgagacaagaacacatgcgcttttcctagtttcgctcttgtggcccagtctggagtgcagtggcaccatctcagctcattgcaacctccgcctccccggttcaagcgattctcctgcctcagcctcccgagtagctgggattacaggcacccgccaccatgcccagctaagtttttgtatttttagtagagacggggtttcgccatgttagccaggatggtctcgaggtcctgacctcgtgatctgcccacctcagcctcccaaagtgctgggattacaggcgtgagccaccccgcccgggcaatttgtaaatttttaagaaacgccctttgttgtacacaaattagacttcaataaagttagccttaaaacagaaaactagaggaaaggagaactggctcaaattttctgtacttttctcctgtaaccacccctcatttcctccttgagctgtctccctgtcatgtgaacatggtcgtcaacgagtggcttctataattgctcagactatctttccctcaactgaattcct

SEQ ID NO: 907 - DNA, 4489 bp, Homo sapiens
cagagagggagcgcgccttggctcgctggccttggcggcggctcctcaggagagctggggcgcccacgagaggatccctcacccgggtctctcctcagggatgacatcatccgtccacctccttgtcttcaaggaccacctcctctccatgctgagctgctgccaaggggcctgctgcccatctacacctcacgagggcactaggagcacggtttcctggatcccaccaacatacaaagcagccactcactgacccccaggaccaggatggcaaaggatgaagaggaccggaactgaccagccagctgtccctcttacctaaagacttaaaccaatgccctagtgagggggcattgggcattaagccctgacctttgctatgctcatactttgactctatgagtactttcctataagtctttgcttgtgttcacctgctagcaaactggagtgtttccctccccaagggggtgtcagtctttgtcgactgactctgtcatcacccttatgatgtcctgaatggaaggatccctttgggaaattctcaggagggggacctgggccaagggcttggccagcatcctgctggcaactccaaggccctgggtgggcttctggaatgagcatgctactgaatcaccaaaggcacgcccgacctctctgaagatcttcctatccttttctgggggaatggggtcgatgagagcaacctcctagggttgttgtgagaattaaatgagataaaagaggcctcaggcaggatctggcatagaggaggtgatcagcaaatgtttgttgaaaaggtttgacaggtcagtcccttcccacccctcttgcttgtcttacttgtcttatttattctccaacagcactccaggcagcccttgtccacgggctctccttgcatcaggtaggggctttgcagagaccatcgacgggctgacttgagtaagaacacgaattatgcatgtggccatttccagagcactttctatgtgatatgaacatgtgatttttatgtaatatgtgtatgtaaacgaggcagcctcatttccaggtgaggatgcatttggtagtgttgatttttgtaatttaaagaagctgaaagggagagaggacccgtgaggactgaactctctgtcccatggggtagggcttacatttacattaaagaaacagaaacttgctgggaggtgtaagtatttggtcacattgctggcaacagaaggggttggagttggacccagggtgccacgctagctgccctcaccccttcttcccctctggcccagagttatactaagagtccttttatttcaaaccaaatgtttgacaatgggacagtctgtttgaaatcccagctgcctggggtggtcttgggggtctgggtggccccagtgctggtaccatgtgctggcttcaccttttaataacagtgtgaccttaaacaagtcgcttaactactctaagtttcagtttctttcatggtctaaatggagattaaaacacacacacacacacacacacacacacacacacacacaccccctcgtgtatctaccccacagggcgcttttgaagaccaaatgctgtaactactatgaaagtgctttgtaaattgctgtggaaagtgtgagctactcaagcacccgaggctgtccctccttgctcacatgtccagcccaattctcccttagtgagaacagcactcagtaggtgctgtgtgtgtttgtgttcaattaagaaattccagaataaataaaaatgaattaattcaacaaacattttctggggcaccgacaatctgcccagtgcaccaggctaggtatctgatacaaagataatgaaaacagtctcttggaacctaattggggtcctcatttgaccaggaatttctttcgtcccgttttaagccaaccagttttgtccggacaagacaaaaacaacttgggctgctttagagaagcccagctcagtgtagacaatagctgcccagcctctgaaaggggctgattggattatgtggcaaatggaggtgcaaggatgacttggacggtgacaaatgaagtgggcggagacctgctttgagttaatccaggctattaggaggggaccttttgtcttccagagactggcaggagcttttaccagtggtttttacatccttaatgttcaggacgaataatttatggtcagtgaaaatccaggccccagtgagattcgagtgggctgtaaaatcgagagtcctgctcccagtgagtaatggtagtgaatgtttctgtcactttttgcaaccgtccattcatttgatcctcacaactccctgtcctgagccaggaccggccactgccactcccagggaaacagaggctgtcaagaggctccacagattgggccccactggatcattgaacccctgttccctgagttctagaggaagaattgtacctgtctcagtcccggccacctccagaaggcctccctctgcatttctgactttgctgtgccggcagcctggagcctcccaggtccctgctgtcatcttttctagccactacagtctctgtctttcctttcacagccaagcttcttgaaaggcctgtctacacttgctgtcttccttcctcacctccaatttcctcttcaacccactgcttcctgactcgctctactccgtggaagcacgctcacaaaggtaaagacttttctgtggcttaatccttgtcatgttttcggctcatggacacaaggacacattttcatgccttctctcacagggctctgcgtctccggttcacttctgtgtctttacactcccttcacagagacacttgctcccccttctctcgttcttagcatcccctaggaacttgcacacccaggtctctcgacttctggacctgcttcttaccatgccgtcttaagcagtcaggagtcgctgcctgggttcgagtcctagttaaattacttagtgctgagaccttggggtaggtaaacttttccaagccaggtttatctcagtttcaaaatagggttaatcgtctttatctggcaggtcaggtgggatgtctcacaggtaagcaccagatgccatttgaaaggcttgaagcaaagtcaataaagcattcatgggaaaatacaactggaggcaccactagattttcgtatacattaggttcccacggggaggaccgaagagagaagaaagaagtggaaagggaggagcgtgcaggagagacaggagaagagaataactaaacaaagacattaaagacaaaaaaaaagtaggaaagggagacttagaaaatattaaaagccaccaaaaacacatccaaagacggtttccccttacgttagttgggctaaaagaaagcaaatgggaagaaggttttaaattgattatcccagtgacaaatcccaggaagctttcacatcaaatcaccctattctgggtttttaactccttccatcgagtttaacctctttacctcccacatcctggtaaaccctgccccctccctaccgccccctttgctggtgattaaatcctgaaggtacacgaagtatttcagtgaatgaatggctaacagaaaagggcctcccctcccccttaccctggcggtgtttttcagttttattccactttccgcccttttcccttaatgaacacagggctaatctcgggccttgtcgaaggaagaggctgcagacgttaatgaggttagctgctggattccagtattcgtcgcataaggatccttctttgtctgcgaaggaaaaacacactgattatcataatgaggtgaactggccaccgccgggccggggcgatgtggcttcttaagccacacttctaattttggtgatggagccgacatttctttggcttctcatttaagtctttgcctctgtcccagtgcgaagtccattcagcggggttgaaagttgcaggcagctttgggaaggggggcgtcggacagggttgcattgtagaaagtggctttgttcgatccttcgcacagatgcaaatggccagagcattcattccctttcttcaagagctgaggactgggggggccactggtgatcagttcccaactctagctctcctctgactcatctcaggacccattgaggacatccaaaactcactcaagatcaccaagtggtaggaaagtactaactcctgggcatagccctaggggagtgactacaatgtgaatactcatggaatgcctagccaggtgaagaagtgaatgcatgttggcatcccagagggaccccccttaagagggcatagtttggggttcagatttgactccagcatactgttgaaattgggcacagggggctagtgattagtcaggatcaatcagtggagaggagattaaaactcacatctgggagtccggaatcagaacttgtagttcttttttttgaaatggagtctcgctctgtcgcccaggctggagtgcagtggcgtgatctc

SEQ ID NO: 908 - DNA, 3473 bp, Homo sapiens
atggaaatactgaaccttggataattctctaagtcttatagaggccaacagattaaggaatactttcaagagtatcccttacactacttagactactggtcatccttcctctccaagacctttttcctacctgctagggtagccgaagctgaaatgcaaatgttaattagtcctatttccacagtggcccctggcatgggtaaattggatgatgccagctgtcacaaacattaagttgtaaatgaaaatatttcttacagcaagtataaggatatactttacaagaatattaagcatttcagaatcagtagtgcttttgagtcagtagtgcttttgcagtctaatggtgaggtacaaatctgcttttcaactttcctcaaggggtagaatataaggatgacctttacagctaatttccaaaggtaaatttgcagatgggacctgaccatgtttcaggacatatggagaaatgtgtatagaactatggcctgtttttctagtgtaaagagtattagaatacagtcaaacacacggaagctgagttcgtacttagggttcctcatatgcagaatgaattccgttagtctgtaggattacttgccttacatccagtagcttattttgttgtactaatcaaaaaacccctctttgagaaagagtgtgtcagagtgaagtctctcctgattccagcaaaattgaacctacgccctaaatcgttgcccaaagagagactgttggctgtgtcacagtgaaaacccatgatgggaggaaagagcagtgttcagattgctgactctgaacctgttatttggacctctgggatgaatacctttaaatgttggtgttattcctcatttttgtcagagtagaaacacagtgtgggcttcctgtggcactgagtcttgcaaacttgtcttctagcctggagtgtgatgtgcttctactagctacattatttttctatggctgattcttttcccttggtaggatgtgtgtgattctaaaaatgccttttactgcctgttttgcctgaaggtcaccacttgggaagttttccccacttttgcaggaactatggcaagaagaatgttatgtttctattatggtacttatcatgttactgcttatcatgcttttatgaacagttttataatggagcactttcgtgatgaggtagggcatgttgctgataacttactgaactgctgaaccaagagagtgaagacaggcagacagaagcaactcactatgctatgaggccaccttgggcaaacatcttcaatagctttataatcatgtgttacttcatggctacctgttttctctatgggaagaagttcttcacatgagagtttattttagtagtgatagataaagcttctactctcttcagggacttttcttaaagttgactttactataacaacagacagttcttcagttttcagttttattgctatttctgctagaacacctcatccaccagcttggccccataaatgatagtggtctctcaaagcatgtcccaccagacaaatgaagactgtcattcagactttgcctccagcaattacctaggattccctggaataagaggactcagtgtcattatcccctccagaaaacagccagtcctgagcatgcagggttgccagcctcaatttcatcgtttgcttttctgcttttaaatgtttgcaaacaatagcagtccatgtcacatgttttattctttttagattaatgaggtggcctgttcaagttagacaggccatattaatttcagcgaatgcggtccttagcaccacaaaagcaaacaaatgattttaactcaactggacaaagagtcttggcatagtaggtgcgtaattgttggtttttggatttgactggagagtgagagttgtgattttgattctccaaaagcagactatatgagcaccaagtatattttaggtcatttagaaagtttgttgtttgaacaaatgaggataagacatccatcagtttttgacactgcaccaaatctgcttgatttcaaaaggaactaactaaacactccatcacaagagtcctgacaaagatgcacggatggctatattaacgagactgtgtcaaaatgaataataataaatggctgtcttgagaatccaacgtaaatttccttatctaaaatagtggtttgtttaaatgatgaagcaaagatggcattggagctgttggctgactgtccctttttttctgctaactgcagaagcacggaatctgatgccctactttgtggggtaatggtgtgcttatctccccctcctcaaacagagtttggcacgttgctaataacagccagcctactgctaaaatatcaatgacagaacagaagaaatagatatttaggaaaacataaatcaaagctgaggaagtaggcaaaaaaaaagcactgatagaaagcaaataaagaaagatctataatattgggacaggcagcatctccctgctcacatggtaattttctttagccagtaaccaacgaggatgcctgccatgggaagaaggtgtgattttgtgatttaatgatccaaagcccatttttagacaccacttagccataaagagaggcccaagtttctgtggtccaggagtcattgagataagtatttatgacaaggtccacccaaacacaaggggacacaagaagggggcatgtcaggcacagggaattttcacagtggcttacaaaggcaagtcttactcttacctaacacagtagttctccacactggctgcatgttagatccccacagaagagcttttaaaatccccaatccaatattcttggaattggggggcaggagagagtaggagacccagtcattagtggtttttaaagctccccagttaaatatttaactcccatttgaagaggggctaataagctgagattaagaaatactgacctaaaacaacatgacgtagacaggcaaatcatttgtggaactcaggccagttaattggtcatctccctgaaacaattcaaattggagaaaattctgtacaaatgtagtaatagtgatgttttatatgtgtatagtattttaaattttaaggtgtttttatgttcatgtcagggtgctctcaggaaaatgcttagcatcttgtaaaactgcaaatgttagatatcatcaacccagtgttataattgagaaaacaagcagagtgcaagtctaggacttatttggagtctcaccaaagaagtggctggcaaagcctaaaattggggcactggacactttcctatattcttctatcctgggaatcatgatttcctttgaagaatgctgtaaaatgttgagtgtatttgtttttgtctgttatgaactgtgattggcctcacacataaataatgaattcttttaggttgctttaggaatgtgttactttagtatctcaaatcaataatacaatcacaagtgaaacaa

SEQ ID NO: 909 - DNA, 150 bp, Homo sapiens
aaaaacaaacaaagacatggatttactgtgcatattagcagatccatactggaaaatgcatggaggtttcatatacaccacttacagttttcagctcctcagtagtgacaaagccatccccatcattgtcgattcgatcaacaatcttcc

SEQ ID NO: 910 - DNA, 723 bp, Homo sapiens
ttggatttaagacaaaaagcaagtcccccatgagtgtccacttctttgccctgccctctcagcttgtgagacaacacaggagccttctatagtatgttgatatgctagatctgtgccgttaataggcatcgtctctcagcctgagggaggctggattctgggttcctgtagtcacagggaggaaaagctttcttaaaaatggacatgtatgtgcgtgtgagtgtgtgtgtagatttatagtttttggtagtggcaggaataaaaaaaatccatcctacatcttccctaagcactgcctctctctcaccccccaaaacaagttgacgaaagggttttatgtagctgtctatgaggaattggccgtgtctgggtgggttatgggatgtgggcatccctgggttcttggaagcagctcttatgctactcatagagatgggattgactttatttttttatagtgcttaattcaccattatgagaaatgcttccagtcacaaaaatgcagcccagctcactctgaggaagaagcaggacttgctgttctctggtccaccaagggctatgaggctcaccccttggatggtgctcagaaccacaaggaatactgaagaagccttgcctatgatttcaggtggcatcagacattgggctaattttcaaggtgtctctccttcccaacaggacagtcggagtctggttctttaataaatagctatatggatc

SEQ ID NO: 911 - DNA, 1039 bp, Homo sapiens
aaagtggaagaggaaagagttaccccagcgagaaccgggaaccgggctgcagactctccggcccgggggagggatgagtttcactctggttgcccaggctggagtgcaatggcgcgatctcggctcaccgcaacctctgcctcccggattcaagcgattctcctgcttcagcctcccgagtagctgggattacagatatgctctaacttatttatccccaaaggacgtgcatttgggtcattttcaatcttctgctatggtaagtaacacttcagcaaataaatctttgctcatcactgtctctcttatataaactcctgggcatggaatttcaggtcaaagaatgtgcttgctctgaaatgtaatggattttgccaaattgctattcacagaagatatacccacttacactgccccaaagcctacatttttctcactttagtttggtcacattgtcctggttggatactttctgtctcccgtatctcatagttggagatatcctaaccatggcctcctggggacactgtgcagtttcctttctgctcatcctgctgcctccccccctaatccaaacaacccctcatatctgtgtatgtcagagggctgtccacacagcatctcatttgatcctatcttgtggggtaggaaggaaaaccgtatcagcacagtctggggtatgaggaccagaggtgaaacaactggcccagggtcctaggatggaaggagagcctccttgctgagcactttcccaccatacaccattgtccaaagatggcctcctaagtctgggaagggtagtaccaaggaggtatatcagttggaagtgatgccactaacacactaacacttactgaaaacactgatgtgggccagagactggggatatagaggtggacaaaacctcctccctgcctccagggagcatgcagagatgggagtgcaatgtggggtagttcctaggcagcatggggagccatctatataagctgagattggaagggtgaatgagggttggccagactaaggaatggcattt

SEQ ID NO: 912 - DNA, 1048 bp, Homo sapiens
cgggcgcgccgcgtgagtccgagccggccgctcagagcgctccaggctgggttcccgggccccgccgcgccgcctccttcccagctcgcccgcccaggcctggcctcctgcttttccatttgattccctgcctctttctattcggactggaatgccgggccaggctccggggcgcgccgctgcggcagccgcacctcgcaggtcccccggccgaccccgacgcggaagcggcggccctcctcgccgtcggggagccagggagccggggacgatcagtcacataaggcttagaggatcaaggatcctgcccagatgacttaccgaaatgttacagattaagttggtgtggtaacctgggctgagcactctgggagaggaagagaagagagaagacaggaaacaactgaactatgaccaatcccagcacggaggcccagaaaactttaagatttgagtattaatgtctcaaggtcaggagcaacctcaaggctaaaactcagatctcaggactcaatttcacagaagttccactataaaggcaataatctaaagctttaaatgatatgaaaattttgtaataagagttcagtatttctgccaacattggcgcatggattgcaaagttcacaggattgaaaacaccatcgacataatggaaattgaacagcatctgattactgagtgctatatcagcaagttaaaaggatcttttgcataccttttaatggtatatatcctaaaactgaagtgttcaatatagacatccagattgaaactcaggcagtgaattacatacacaacaaatcagttgaacatggcagagcttgtcagacttatgaaagattaaatacattttacatttccacaagtgtggtattcacaggtctaaattggaaaattcttgggttgaagaagaataatcataatcttagcttcactcattgaggaaacattattcagggatgataagaggtaaaatcttaaaaatattgacaagctaatgagagaactttgaggtaagctgatatgcaggtatagttaggactgg

SEQ ID NO: 913 - DNA, 549 bp, Homo sapiens
ggtctggggaataaagaatgggatgaaatggtgagagtccagaggggttgagcaaagaactcactatcacacagcaaggcactaatttgaaatgcctgggagaagtagaagctgcatttgactctcatattcttattggaccaggaaggcaggaggagacaccagtgtgcaccagagaaggagaagtcagagatgacagtccctgcctgaggccatctctggtccaccagacaactcatcaccaacttcccaacagccactgctctaggccagacttggatctgctcttgaatctgcccctgcggaaagagggccgtttggacaggctgtgcctggagatttctggcctcataaaatcctcctggtctcttaggagagctggtgacactctccaggtccttggtggagcctgatgattgacatcttaagcaaattctctggagaagtcgatgctcctgatggaggctcacacattgataacccctggtttagagacactactaattgttccagctcatccagctaataaatgacagatctcagacttaa

SEQ ID NO: 914 - DNA, 5109 bp, Homo sapiens
aattacaaggaaggagattatatccagggattctttttgttttcaaggcaaaggttaccaagttacaatggaccaaagtagctggaatgcaaaggagtataatccttgtctttgaaaaaagagcatttgtttcaatcatatggcatatcaaagtaaactttctcccttcctccctcctttcgttgctgctgcttcttttttttctctttttttttttctttttttggagagggtctcactctgtcacccaggctgcagtgcagtagtgcaatcttggctcactgcaaactcagcttccctcaaacaatcctcccacctcagcatcccaagttagctgggaccacagccatgctccaccatgcccagccatccttgcttctttactacatttcttttttcaacaaatatttatcaagtaatattgtcaagtaatatttatgagcttcccctcagataggcatttagcatcatgatggcaccatcctctaacaataatgggaaggctattttccactgttattaatcattaattctccaaatcattttagtattattattaattctaataagtacagagattaataaatgcattcaaaccacatgtgaatatttgctataggtttatctgtgcctactgtatgttcagatttttctttatatctgaactttgttataaataaatgacagtaaaaatggaatttatagttcaatgaacttgacaaatcacttattctgccattcattttccataaagaccattcattcttccttgttttacaggtaactgagctccagaaagctcaagtgactttagaactcagttcttagtgtgtgaattatgctcccatctcatccctcttccttgatggagcactttcctcctcattttttcttggatagtctgtacaagctgcctgaggtgtgcaggaaagtgagccacgtcgaagtgtactgcttttaaatttttgccaggatgaagcatagcccaaagttgccaataaaaatggatttctttacctttctgaaattgtgtgatgacaatttctaagtaaaggacccaaatcatgtcaacttcaggaaatataataatgagggagccaggagcagtgaggggctcacacctgtaatcccagcactttgggaggccaaggtgagcgggtcgcttgagcccaggacttcgagaccagcctgggcaacacggcaaaaccctgtctctacaaaaaaatacaaaaaattagctgggtaaggtggtgtgtgtctgtggtcccagctattcaggaggctgaagtgagagaatcgcttgagcctaggaggtcgaggcttcagtgtgccgtgatcgtgccacagcactccatcatcatcatcctgggtgacaaagtgagaccctgtctccccaccaaaaaaaagagggagtttcatctcccaagaaaatgaattagataggaataatagaaaatttactctcagaataatagggttctagctcctgcaaccaaaaaaagatagttcttttttacaacctgagattactttttcaagcatttctccagttccactggcattgaaataatagttagcaatgcatctgagcttttcttcctctaatgagcaggcagagaagtcatagatcatcatttggaggactataaaataagacatagcttagcaaaaggaccaaaatacattcagaggaggatgctattggtgaatgtcctcaaagcctataatctggaaaaatacaaggcatatctctgaaactgtgaggattagcaaactagctaacctgaatctctgtcttctggtagtataaactaggtagtttcaaatctgagtagtttctccataaaagcatttcttcccaaacgtttcttaccaaactcccaaataaatgagaaaaataaaatacagttttataatttttgagaaagattatgggattatggtatttaaaaagaaaagcattctgtagagttggggaaatctggaagactcttgaggacatagctttgccgaaattgctggttgtcacaagactcttcaaaaactacttttcatcagacatctcccagggctctgaggtgaatattaattcagcagaaagatccttttctgctacataggcaggaggtccagacacaggggagtgggtgcaacccagctggtcccattttctgtaatataattaacaatgaagctcatactttctcaacttctagaagcctggaggatggaagcagcccgagagtagggtgaatgatggcctcagtgggcccttcttaatgtgtctcagtactgaatgtgtggagattgtagaaaaatagaaggcccttggaaaaaacctctgttcgtttctctgttcgtttcgctccctgatctccctgccggattgcttttctttcctttctcttccttggctgtcctttacctcatggtgtggggtgtgcagatagcaggttgtggcttggtgagtgctcttcacttcaggtcaaggtgaggcacagttaacatgctaactactttcctcagttctctctgagttgtgtaaagctcccgatgccagacttcctcttaattttgcacattattaaagtccaaagagttaagatttggtgatgaggggcaaagggccagctgtcacagaaatcaatgaaatgatacacagaaatgggtatcatgaaaaggccactggacttgggaaaactgggtgcctgtccttgccctgccatgtacttacctgtgtgactggaggtgagatgttttacctatgggcctcagtttctcattacaaaatgacagagaagactagatacctaagttcctaagtttgtgacatttgtgaatttttcttggccctctgtgagtagagtgctaaatttagaggcttcctgtggttgaactgatgtccaattctcagggaacccagacttctcagttcagaacccagttccagatttttgtgggaatagggaaaggtattaaataactccattgaattctttcctgcataatgccctgctgtggctgagactcaatgaggtcatcacctccaacacacagaacccctcatcatctccttacagccagactggagcttccaaggacatcaggttggcaaggattgtgagtaccctaaacatctaaagaggccctctaataagggacatatttgttcttcaacagtttcctaacttgagaccacaaatgcgtaatctctctaatatcctaaagcttggacaaactgggcagcccctgagcagaccgcacagagcttaaatgtcagtgctttccttccagaaagaaaaagaatggtcctacacctcccaatccatgggctgatacatatgccaagggagccggatgaagaagtgggtgattttaaatagctaagactgcccatgggcaaacgttctttggcttttctcctctgcaataagtataccttcctctctcctggtccttttctcctttcccaggcccctctatcaataataattctggctctcagatgactacagttgattaggtggaactgataggataaaggtgacacccttcccaaggctatctataatgcaaaaagatatccaagaaaaagagaggtagggaacaccttgggaaaccatttctggaagacagccagtccctgctgtagacaagcctcattttccttcccccaaatgttaaagagtaaattcctcctgtagccttagctctcttttctatctttggcttgctttttatgaactatctttagagtgccaaattagaacagggtaggcagaggcaggaatatgcccaaatttgggaagacctggttgggaatagtcgaaagccttgatatgtgcaaagaaagaaccatttgatcaacccagttcttaatacaggatactaacttaaaatttagactcaagttatacgataattcaaacatttattgtatttatactattctatatgtacttttccaggaaccaggaatacaaaactgacatttctctgtacagaggctcagactagtagagaacagttaggtacgccgttaattataaactaatatgtatcatcaattatgggtttttatgggggtttggcaggtggaagggaccagggagagatgatgagtgatgatggttatgtagtctttaggaggatgcaattataacattgctcttcctttcacgcaccacatgatttagcaagtacttcatattggctccaccattaacatggtcaatggcttctggatactcacagttcaggcacagtttctcctgaagattttttacctctcccatctttaagaaattgtctggatgtccatgaaagatgctgacacttgtattaattcattaaaaaacaccaccccctccctgaaataaactaaaaagtaatgaattcatagaaaaaaatttcaccaagattgaaactagagaatatacctagacttgcactttgagctttgagaaatgtgtacctattcaccattccaacgtgaagaagctctgcagtaggaaaaataattaacacacttatagtctactgcccatgtaaggatcagctccggctaagaggccaaagatgggtgacatcgttatgctctgcctttattttttctttcttacccacttagcttcctaattggaggaaggaggcgtggtaaaggtatatgaagactatggtttaattagaccagaaaacactgtcataatctctggggtcatcagaatgtccagttttgtctttgggccaagataagggcagtgggatttatgatgtgttgtttatagtctgaaactactctggtgatcaccagggtcagtttctttaatgatggtttccaactggcctaatacattaagtaagactggctgataacatgaccagacagacataaagaccctgttgggaatgacattgaactctcaaagtcaagatttcttacacaaatctatcagctggagaaaatgaaggcagtgtggtatatgtgtgcaaataaggacattatgaagcttaaatatggaatgtctcttggacccccgatgtcatctgtattctctttttcttcttgtactatatcctttgcctgtaaataaaaggtttatttgatta

SEQ ID NO: 915 - DNA, 1754 bp, Homo sapiens
catgcacaggtatgttcattgcagcactactcgcaatagcaaagacttggaaccaaccgaaatgtccatcaatgatagagtggataaagaaaatgtggcacatatacaccatggaatactatgcagtcataaaaaggatgagttcatgtcctttgcagggacatggatgaagctggaaaccatcattctcagcaagctatcacaaactatcgtaggaacagaaaaccaaacaccacatgttctcacttataaatgggagttgaacaagaacacatggacacagggaagggaactcacacacccgggcctgttggggggtgggggcctaaggaagggataacattaggagaaatacctaatgtaggtgacaggttgatgggtgcagcaaacgaccatggcatgtgcatacctatgtaacaaaactgcacgttctgcacatgtaccgcagaacttaaagtataataaataaatatataaatatttataaataaataataaatacataaatatcagaaagtaaaagaggaaaaaactgaaccttgaatttttttcttttagaatatttataatatttaacgtatttgaaggtgaaggccatcctacatggacatctgaagctttagctaagtattatcttttctgtaatgtgactattggtttgcagttcggttcttcttttcgaatagtatgagattaattttctcagtacttaaatcactcctcagttaagttggatgttcatggaggaacattctttccttcaggttgctgatacatttgctgcactgtaggggagggagtgggtatctgagttagtcagttttaccatttataaaatgtttggtggaggaaattgaaactaattgctaaattgttagtaaccagtgcattaactaggaccctactgagtggactgaaagaatcgaaaatgtttaactggttgagaggcaatgatgttgcaaatggggtattcttcaaagctccttctttttttaaatcttcaaaggcaattattctgaatgtaaactacagaccaaattgcagtcttctgtaagcatttcagagattacctcaaatattttttgattaaaaaactcttccgtggtcttttgtgcttcagaactacccagtacaacagggtcttcagcctgctcaggatctctaaagagagctagcacacagtcagccaactttggctgcttcaactcctaggaacaagaaatgatgctgagataatttgtctggcaggtattatcagcccacaatgactgctgtcatttagcctcaaaatgtttatttttccttttacaatgctgtatttctttagaaccttcctattccgagtgtggaccctaggccagccccatagacttcccctggggacttgtcagaaatgcataattttaggccccaccccagacctgttggaccagaatcttcatttaacaagatgcccagaaaacctgagataatcaaagacccacaactaagtaagacctctcaggatctcaaagccaagtgttttacagagaagagaagatagaaaaggcatattatctaggagtggaaaagaattttatgctgaaaatgttgaagagagaattcaaaatcaaattcaacattccacctaggaggcttccatctctgcttaggagctgagtaatggaggtgattggtgtaagtgttcagtacctatgaagacctaactcttgagggagagactccaatgtaaacttcctactcaatactgcctt

SEQ ID NO: 916 - DNA, 1636 bp, Homo sapiens
ggcccgagctgcacaggccaaggaattccacagagggtgtgacccaaagcccctaacaacagactcgctgggaccccctagacttggcatggaggctgggtgcagacctagaagacagaggtggtgaagcccggccagtgaggacaagagctgcggggaaggacaccgaggtgacttgacggcagcagcaggcctgaaggctctggctgctttggaagatatttcaatgagatgcaaatcgcaatcgactgaccattagtttccactgcagtgtttgcagatggagtcgaatgtaaccccccgggaatggagccgggagggtcagagaacgcggctgcgctctggatctccgaaggggggcgggggcctggaagaggtccgggcccagaatggacctccaggtccctgctgccgcaatctggccctgccctccagcctaccccttactcccagaggaagggacccagggagacccacccagatgccctgaaaggaggtggaggatgggggtggggcaatacgcagagtttgtctggtgaatgcaggaaaggggtgggggctggagaggaaaaggatggagcagccgtcagcttgtcaactccgcatctgctggctgcctcggccgggctccagcctgcgccctcgcccctcggaacagcggtatgtccattctctccgcattcgtctccatcgttcagccaccaccgcaccctttctctattcatttctcctgctcccttgtcctgccccgcccctcgtgcccaggtccatcggtctacacccatgggccgagccctcctcaccagggtcctcctggaaccgctccggccttgggcttgtccgcggctcccacggtccccgcccggcggggcacagagcgggaggggaggggcactagcacaacctaccctgcgctgcgcagctgcaccccttcgcgcatgggcgtggcgtagctcagacccgcccccagcgtttagcgtcttttgtcacccacctagagggtttgatatatcctaagcttttggcccctgggtcctggttccgtgcagcgagtcctcccagcaccccaccctgcacattctggaaagagccagactctggctgggccgagcaagaacagaaccacaagaaggttacacgattatttattgagagcctcctctccccgcccttgcaatctctaggtcactttctccgcttgtagattttgcgcgcaagccccagaaagacggctgggggcaggggtgctgcgtactgttcaatgagagccataatgtggctgtaactgtcttcctcatattgcaagaacactgctggcagatccagctcctcatatagcgccttcacccgggccactttctcagcctccttctgcccgtaattttcctggaagaggttgaaagacaggaaaacgggcttggccttccccagagcctccaggacccctccactcccctcattcacatattccagaacatctccaaagccacccactcctttcctccctccaattttcaagtgtctctacgtagctaaaatcccaagcttcccttccctatcccaaatattgcctcataccaggcatcctctactccagggtttctccaccttggcactattgaaatttgggaccaga

SEQ ID NO: 917 - DNA, 750 bp, Homo sapiens
agactcgagcaattttctcacttcagcctcctgagttgctgggaccacaggtgcacgcaccaccccctggcttttatttttttattttttttattttttggcagagacagtgtcgccttatgttgcccaggctgaacacctgtgtctcttaacctaagagctgtctccagcacaggatgcaagacagccccaaaaaagtgttagggacttaaagccaccagaagcttttcttaaccaatggaatacaggagtcaatgggaacatcctgtccagaggaaaggatatttaaggagaaaggaagcagcacaagttcgactcagccaagaaacagaggaaggacatcccaagcacgaagtggggcaccagtctgtgttccagcgagagataaaagggagagacacaactggctccagcccttttcctgcctcttcctgctttgaatactcacatgatacctggagctgcagcagccatcttgtttaccaagaagaaaagccaagatgatcacagaatagccagcactggtattgttccgccagcgacagcagatacttacctccagatttttggggaaaaaaaatgagctggagtgactctcttggtccctaaggtggaagccatgtgttgaggacactgagcaacaagataggaggagcctggggcccagccagagaacaggaagccacccaaatagctctcaaccccttatagatggactactaaatgggaaataaagtagactgttctctc

SEQ ID NO: 918 - DNA, 791 bp, Homo sapiens
ggcacacagctagactacatttcccaggacctcatatggtgccaccaagacagagctgactgtatcacccaatgccaagccctcagcgtcactgtcaagtcacattggttacctgagccaataatctcatggaactcaatttctgagagctgaagatggaaatgtgaaggcaatccagctcttaggaggagaatatctgccttctctgcaaagagaaattgtcattttattttttaagggtgattttgtcactgggaatggctgcccacccagtgacattttcctatgtaccttgcatccaactgtggccttgcgacatattttcatgaagggaatatgagcaaaagtgaagtaacttccaggtctgtgccttaagaaacagttccctggtctggatacctatctgtagactcctccaatcaacacatcatatgagactctgacttcagagctgatgacgtaaaatgcagggcctaatctatcttggcaatgtggcagtggtggcagtagctccatccaatttcccatggtagcaattccagccacagattcaatgccctgcattgttggcatcagaagcacaacagtttatgtgtgcctagcaagggtggcagtgcatcttcacaggaccacatttgggcatgattctggatgttgttcctcactgtgagaatttcaaacatggctttctactctgttctgaggaagaagattctgtgtgctacataatatcctttaatctactccttttatgcctaaattagcaagagttagtttctaatacttgaaag

SEQ ID NO: 919 - DNA, 650 bp, Homo sapiens
caatctctatctgtgaacctgtagtcaattcagagttccccagactggcgttctgttacagagggagtttagattcaacttcagatgagaaaaatgaggatctgacatgaaaagtgacttgcagtaggtgcaaactagtgtccagggctctggcctccacctctggtcaactttcaccaccccatgttatgctaacccctggcattctgtttgtgcacaaccaagtctttaatttgtcctagtagtcatatttttttcctcttcttcttaaattgatgtcttcacttgctgtttccttgggtgttgaaacccaagtcccatcccctgaggaaccaacaacattgaatacgaatatggccatgaactgattggccaaatctactctgacctgtgctcccaaggtgaatgaccttgttggggttgactaagtcttttccagggaggtcaacatcacctcagctatttcaaaacagagctaaagttccagtccagggaatggctgattcttcaggtgtgtttctgtgtgcacaacttgttctttcaacaacctccccatgagtttctggaatgtgaagactacttttgtctgaagaaaccactggcctacatatttttgttatacacacatgaaaaaattgttacaagaggta

SEQ ID NO: 920 - DNA, 2292 bp, Homo sapiens
tttcacaatttacaaacagctggaatggtttggcgttttcaaaagcatataggcaaagggagttctcaagagagaccgatcagaaaggatttcttaactggcactgctggcagagacggagaccgcggctggggcaagtggtgggggacggcactgaacttccctaaggaccccaagggttcagccgagggatcggcacccactccgctcacagagggctccctccctacagtagggaacgcacccgaaactcagccgacaaggcgcaggggagcagggcaaagacattgcaaccagaagcccaaggccggccgacactttcagaccctggggcagcccctggtaggcaccccgccgagcccgcaggatgcggctccaaggcagggttcgcccgggccggggccagcgcggaccacagctgtatggcgcccggcgccctccggagctgcagcggagcacggccagaagccgcagaccccgagcgcctctctgcagccgccgttcccgcccccgcccccaccaggggacccgacacctccgtctccactccccccagcccacgttcccccaactcttctcaccctgcaggagccggtgaccggcgaaggtacttctttccgcgtggagggactgtgcgcgtcccgcctggctgtgggtaggggtctgggagctctggccgctaacacttctgctccagccgctgggagtcctctggctgccgctgccgccgccgccgccgccgtctccagcagcaagtttccataaaagtcctggtgtgcagcctgttcccgcattccaggcgggcccagcgccggctgcagctgttccaaaacacaaggccagttcccccaaccccccacctccgccgttatcacccggagtgggggtggagagttgaggagaaaagcaggggagggggaccgtggctgccaactttccgccagaatttgtctgtctcccggccctaggtgcgcgagctgaccccctaactttgggcctgcctccacctccagccaggcctggggaaggaaggctgcctccgccatgggaaaggaatgaggctgaaatgggcttcattaccgggctgaagctggctccccctacccgcaaccagtttgctctggggcccacttctctcagctactctacccgtcctagtttccagtcaagaagccaagccactacatatcttctactaccctaagcattgacctttggccaagttttcctttattacaaagagcgtggggcagcaatccgggaacacttcatctgtctattgctcccctgttcttagctccagtctttaactctaaaaggagagttaaaaaagaagaagaagaagaagaagaagaagaagaagaagaagaagaagaagaagaagaagaagaagaagaagaagaagaagaagaagaagaagaagaagaaagttgaaggcagaggaggaggaggagaagaaaagaaggaatatatttatataagtacaaatatctttatattccacctttttcttaattgaaggcaaaccatatctggtctttctaaagcttcataaaggcatctttgactattagacacccacagacctttttcaacttggaccgccagcctgtcaaacccatcagacaataccatattaaaacccgaaatgcacactcggagtatttttggtggacgagatctttaattcttcactgcacttgaaaaaaaaatcgaaatgacatccagataaagaataaagatggattctcgctctgttgcccaggctggagtgcaatggcgtgatctcagctcactgcaacctctgcctcccaggttcaagcaattctcctgcctcagcctcccgagtagctgggactacaggcacgcaatgccacgcccggctcattttttgtattttagtggaggtggggtttcactgtgttgcccaggctggtcgcgaacttctgagctcaggcaatccacccgcctcagcctcccaaagtgctgggattacacgccgtgagccaccgcacctggcccctgggaccattctcacacagagttattattaaataagaattagcaaagttcagaaagtcatatatttcaagtgctttctaattcaaagtgcttctctatattcaagtactatggtatcatttcaaacatagcaaattataaaagttctgtaatttcctaaatataaatgtactttgtgaaaggcttctgtgacacacataaaagacatatttgatgtaccagttgctttgctgtggcttttaagtaaagaataaaaagtgtcatagaagg

SEQ ID NO: 921 - DNA, 315 bp, Homo sapiens
actggcgtcagcaggaaagatcagctctgccatttgaaacacccaactgctaccttctctcagaaatcaaaagatggagtctcgctctgtcacccagactggagtgcagtggcgtgatctcagctcactgcaacctctgcctcatgggttcaagcgattctcgtgcctcagcctccccagtaccctggaagtgctcagtacatcatatgagccagagtgctggccaggaatgagaccacgctttgcctgttggtcaccgcatctccagggaactcagaggcatctccaggaaacacctgaatatgtgagctggtt

SEQ ID NO: 922 - DNA, 3921 bp, Homo sapiens
aaatatttgcatacagacatttgaggctgctctgtatattacaggcaagaactggaaactgttcggctgcagggtgacagctaactagattgtggtttattaggggaatgagcctttctttgtgtatgacaactatgaaaactattgagaagaaatagttacgtgatacagtcataatcctcaaaaacggagaatcaggaattatgatcaaatagtgatagtaacaaggaaaacatctgtctaaataattactgagtagaaataggttcggaatttgtaaatagtcattaatttgggagattggggttttttttgttttgttttttgtttgtttttcattattttgtgctattattcatacgtgtacatttctacttcagtttttattatccattacataacatacatgcttgattatttgcttcaaggaaatacacctttataagtaatactcaataactactgggtttgagaatgaaggtgtcagaacgaatgagattgtcctatgaaagaagaggcaggagccagggaggaggatcccacccggccggggctcagccaggaggcagggccattggggcagggtggcagtccaaggaaccgctctgggaaggtttgcaaaggtcggggtcccccctgccaggtgatcgaattatcgtggagtgtctggaaggcgggggaagttttgttgagttcaccaaataactcagaccaactggaaaccaagtggagtttctacaggaccaactagaatagggatcagctacatgggggcggggggaggggggcagggaacggtgtctgtcttcattgcagctctgtctgcagagccagcactgtgatacctcatagtaggtgctcagtgaatgtctgtgaagtgaattactatctagacaaggatgagactggtatgactctccaaagctttcccacctccaaaacctcggcttgtggggaatctccagtagggggcactgtggacacggttcgcatctgcctcccaaggctgggctccgcgtcaaaaaaaaaaaaaaaaaatgagactgagccaggtgcagtggtcactcctgttatctcagcactttgcgtggccaaggcgggaggatgtcttgaggccaggagttcaagactaggctgggcaacatagcaagaccccatctctacaaaaaaatttttaaattagccagaggtggtggcatgcacccgtagtcccagctgctcgggaggctgaggcagaagattgctcgagcccaggagttcaaggctgcagtgagctctgattgtgccactgcactccagcctgagtgacagagcaaaacctggtttcctaagggggggataaaagagggagagatgagatcggggtgtcccgcttctgtgcatgtggagggggtaactgggaaccgtgtactgtaggggatcgcacaccttggggtggaaacagcagctctccggagttgcatgggagccatgggcagtggtcctggctggtgaaatgattctagccacgtggcccacccagggggcaaaacaatagaaaccttcagaaatgaaacgtcacctggctgcaagaagatagtcccacaggcgccctagagatggggatgccaagtggcttctcgggaagctgtaagaatccacagggcattgtaagatggagggaaatattaagttttcttcgtaaagaggtgaggggggcgagagcagcaaaggacactggaaaatgagaagcatggatgggaagtgttgcattgagcataatttggaggtaaaatctccaacaccgtaactgagtggcctggggacctgatagaaagccctgctcaggactaaggcagagttcccagttatatcgcagatacaaagagaccaggaacacgcttgtaatcacagcacttagggaggctgaggcgggtggatgacctgaggtcaggagttcgagaccagcctagccaacatggtgaaacccccatctctactaaaaatacaaaaattagccaggcgtggtggcacatgcctgtaatcccagctactcaggaggctgaggtgggagaatcgcttgagcccgggaggcaggggttgcagcgagctgagatcgtaccactgcactccagcctgggcaacagagtgagaccctgtctcaaaaagaaaaaaaaaaaagagagaaatcaggaacatcatgaaagatacagcaaaatgttttaccccagcccactgcaccacacctgggattgtgacaattaacttgataaattgttccttttcctgttcggaactgactaggttgtgcgtggatggaccagtgaaaagaaaatcctgtttgggtagggaagagggaagtagaaaacctctttcgtattcttggtgtcaagaaatgggaagagaatgagggagcagagacctgggttgagtgttggctctgcactaaacagctgtgtgatcttggtctagtgccttaacctctctgagcctcagtttgtacatcagtaacattgggataatgacatccacatgcccacttcacagagctgctgtgaggactggatgagaaatgtagagaagtatttcggacaccataaagctcaaatacaaggtgttggttaggaaaagtttcaactgacttgtacccacctgatacccctccatcagcataagcgtgtatgaggatgttaggtacatgtgttgtgagtgaaagctctggaacacccgagtagagctttctgcaaatcagcttctccttcagaggagaccattttgttttgctttccagcagttacttgaagaagccttatctgaagtcacaacagtgacttcaggaatagaagggaccaatggccagcttgctgaaatgtaatgccattcttaaaagccagctaagaatcagaccgtattagttaaggacccataagagtagacatttagaaaaagtgaaaaatggcaagagtggcccaatcttttgagagtttagagaaaatatcatttggaaagggagtagctctccttctattttagccttattattacggtatctataaagcaatgccatattctaaatctgcagaaataaaattctaaggggcgaaagtccaaggcagaagtcaaaagttttgcaaggaaaccgatgaggttgctgacctgagctgggcagggttgaacaggcgagtgccaagatcaaggtctctgattgtctctccttgaaaggtaagcagagaactagggctatcccataaattaagtgggagattggaaaggggtgcggacttctgtattggggagaaggtcttggatgaactggggcagagaactgccagagagagtacctaggaatacgttgttagcaggagaaagaccaagttcagatgcagacttgggaaagtaggtaacttgaccaaaggtagcaaaattagactacccaactggattgtgaatgcagtttatgaaatggatcaggacaggagcaaaaatagattttctagaaactgcagactcctgtgattggagcagtatacaaagtacagcaacatcagactagatctcacctgaggtgctgggtgagaaatcttagggaccagatggaagagggcctgtgtataaagacattaggaaggaggtttgggagggcagcctgacttgtctccagagaaagttagaactggttgacttagcaaccaagggacactgggtcaaagacgaggaatcaggacgtcggtgcctagtgactgagcgccagcccagcccatttctctacattgccatgggctaaacccagtgtgctgtaaactcttcagttcctttggttatggattttgtatcttttctgtgtttcttaataaagttcttttgaaaaatgggaacctttctcagatgggaattttgtatctttcctctgtttcttaataaagttcttttgaaaaattggaa

SEQ ID NO: 923 - DNA, 2626 bp, Homo sapiens
agctgatcggagcctggagccggtgtgtgctgggtgccgagaagagacagcgccgccggccgtggggagcggacgcagtgatttgctccccctcgtgcagcaacccccacacccagcaccaggagcctgttcctctcacgccctcacctggctgagccgcagtagttcttcagtggcaagctttatgtcctgacccagctaaagctgccagttgaagaactgttgccctctgcccctggcttcgaggaggaggaggagctgctttccccatcatctggaaggtgacagaaatgggctgggaaggtccgaacagcagggtggatgatacgttttgggcaagttggagagcctttgcccagattggcccagcaaggagcggttttagattagagacactggctggattgaggagtagaaggctcaaacaacccaaggttagttggtctttgtgtgacagtgggaagaagtggagagaacactctgtctccccgacttccttcttgaccctccttccgtatctttcattcttccccactggcctttccagatgaggtccaaaagtaagctcactcttcagggaaaagtgatactaaacccaggcgtgaggagtcatccttctgctcttacttttccctgcatttccttaggctggcccagactctagattcctgggcacttacctgtatctgagacccttagacctcctgtctcagtttctccacctgtgagatgggcagtcacacagatgagtgtgcatgagggaatcagaagcccatctgggttgactcagaacccgggctctccccctgctgtgggtggaaacaaaacaccttttcacagaagctgttgtccctcccccatccctgataccatcacccagaagctgggtggggaatgggaagctggaggagggggttagagttagaccaatgcgaggagctagtaagagctcgcctctccgtgacttccccccatgcaagggtggcccaaggcttcccctgatatccaaagcaggacagcagccccttggtgggattctaactgctgctactctgtttctttcctcactttgctttccaaggtggtatgtgatccccagctcaggcctgtgcagacaggaaattctcccctgcagcaagtaggggaggtgggttgtgggatgtgacctccttccagatatcaggcagtgagtgtaaacctgccacctccagccctgatccattctcacctagcggctacaggaagctgtgtctgttcgatttggtgggaggagatgtgcagggagctgtatcttgtcctccgcttgtgaaaaactcaaggatgtggagaagagtagaccgtggaaccctgctcttctgcagccaagctgaggggcaggatgcgtgtgggacagtggtagagaagcaggggatagactcataggctgcaacaaaggtgactctgtccctggacactgcctccgtactttctccttgcttcactggccacagcatctccctccagccctcgctatgtgcctctgccatcttcacccatcatggagcagaggtgaggagaggcagcctgggaatatggagaccagtgaaggaccaggcctggagagcacagggtcctacctgggcatccagcagaggagcccctaaaggccaggagcaccccaagaggagggagggcagccagcctccattgacggcgagcctccagccctctcctactttgatcaccatttctctccaggctttctgcctccgagatgtggcaccatagtgcggtgccctgtggcttcaccgccctacttccacctccgcccagcctgtaatgtttatataagcagcctcaaggaccaagaaccatctgcgaaaggacacacacaggaaattcataaaagaaatctgaatggataaaaccatgaaaaaaagtatgcttcattagtaattaaagaaaggcaaatagagctggaagcatttttcccttagcaaaccataacagaaaaaaataagacccaatattggcaaagagactactgaaaaaacattcccatacattgcgtgtgggagtatacatcggtgcaggcttcctggatgacagttgggtgatatgtgtcatgtggcctaaaagcctccatgtcatttgacctacgaattctatctttgggaatttatcctaagaaaatacttaaggatttagttagtgataagatgttcatcccagcattgcaatggagaaaaatgggaagcaatggtttggttgggaatttattccttttctgctgtaacgaaagtttgcaataggggattgcttaagtaaattattgtatctccatccagatggtggagtaccgcgcagacattaaaagtcatgtaaaagaacatctgactgaaagaaaaatgctccttgaatattaaaaggttgtaaaaatagtgcatgttatgtgatttcaattttgttttttaaaatatgggtgtatgcttgtatacgtagagcagataaaaaagacggaaggcatactaaaaaatgttgagtggttatctttgtatggtggaacaaagtcactgtaattttcatctttggtttttctgtaatttccaaattttccacattttgtatttcatataatataatttaa

SEQ ID NO: 924 - DNA, 567 bp, Homo sapiens
tttgaaatttctgccagttgggtggtgtctgcggctgctgctgggaaaatggggagtagaggcttgcaggtagatcagctggaatacatggcacaggtgacactggaatccctgacctgctaatgaatgaaaacagggcctgatgtccactgagttgagcaacagggcctttgttactgcaaggacgttgtccccacctccggctgtgttaggatcacagaacacctgtcaccagggaacagagctttttcgcaggtccctgatgtttgtagctgtgtgaccttagtcaacacgctcagcctctctgaaatgcaacatctgggggaaaaaatgaaagaaaaatgaagcaaaaagaagaagaagaagaaggaggaggaggaagaggagaaagcaaagtgatgaggtggagaatggacactctctctcccttctggccacaactcaattcccccaggctgtctaagtgcatcctacttctcctttgtcacattcatcagtcatcacgtcacactcattgtgaagtattctcattatcattgcgtcttgcatgccagtagactgaaagct

SEQ ID NO: 925 - DNA, 15145 bp, Homo sapiens
gccgccgcggagccggcgtccgcagcggctgcgcatctcgggcctgcagcggggcgcttggcgggcgggggccgggggagagcctgtttgcgcagtacccccggagggcggaaggccgccgagagaaacagcaagtgacagagcagaggaacggctggcccagccaatcctggagctgctgttgcagcacttgttccccaaacaagtgctcctacattctgatgactcagtgtatcgggagccgggagatggagctctcagcagagtggccaggatgttctgtcaacatgaaagctacaaaaacagctcggggctctgagctgatccttagcctggggtcattttcagggagggctggacagagaaggcggccaccgcccgggcatcaggatgggagcgacaccagaggactcaggagagtgcagcttgctctgtgagtgggtgacaacctcttggcgactcaggctcagctgaggatggtgccagtgtgccggagacagccgtcatactgccggatagagtggctcacttgcatgtatttggaacaaaaaaaggagatgcctggcagccccgctctctgcagtgctgttgagccaccaatttttgtggttttgtgaccacaagtgctgactgatgcgacatgaccccagtcttgtcagtgaatcatcaccaggctgcttactggaaactggatgcagcaaggaaataggatttaaccgctctctgcctcccaggtaagtccagtgtgggctgctccctccagccttcccccatcctccttccttcccacgaacaccattttccttattccgccggggaatcctcagacgtctccattcagaatctcccaaacgattgttctcttttttgcattcttctccttctggcttttctgtgtggggttagtaaccagcacagggttgggggcagaatgggcagctgaagtggtcgggctgtgcggacgtgtgggagatagctgggtagtgttgctgggtgtggcagttggcagagcatttgggcctcccacagtaatagaaactctctttggctccagcatccagcaggaggttctgggtttaacccctcggtaatcctgggagccttcctggtgcctggggattctctcccctgtgtagtctcagtggatggcctgtcttaactctagatacattttgccttgagggggcttagtctaggttggtggtctggagtttggactgggctgagcagtgagctttgggactctccctaattttggggtttctttgaatgagccactttcttcctctaggccttcattacctttgccttaaaaaacaaaatccctggtccagtaagccattgcaaagcatctctaggaagttgacaaagaaatgcttttcttctgcctcacttgctgccgatcacagtaatagcaatggtgattaaaaatgaaaaatgatgacggcctgcagaatcagggaggtcagtggcatcattgatacaattcacaaagcagactctcggtgcccacacatcactaggaagtctctctcctatcgagtagatgactacagcattcttggccagtaaagccagttggaattagccaacagcagattggtctgggctctaaagataaaaggaattatgttgggtaattttcggaggtacctatgggatcctacctctggccacacagtggtcgcctctctctgctcatatgtttcggtgggggtggggggttcctcttccccatgctgctcccgttgctatccagggaagattggccaattctgcttcctgttatttcttcttctcctctgtccatttgaggtgagtctctaggttggctgtgaacagcctgaggaacccagggctgtttggaagaatctgatgtctcttccttcaaggaccctgacaggtctcagccctccagcagtactgcagtgagggatggcagggggtgttggagtggagagatatcgacttgggtgcagctggggagactaaaaggagtgagccaagtccctcaagaagtgttggctagagtctggccagccctggctgtagggctggagccagacgtagctgctggctgtgcttgggagtctcagccctcatatgtgcagtgtgtccctgggcatggctcttcgtgatccccactcccacgaatagccctgtccttggttagattgggaaaaccagggtgggaagtaaaggggaggttggttttgctcgtggtcatgcagttatctctctggcctctgatgtttccagaattgggattggtgcttccctgctgattttcctatttttgtccctcatctggttcttttcctccttgctcaccagcctgggttctacacacatgacatggggcattgtgtgttcccaatgaggatagcagaacagttggtatctcctgagagaggggccagcatatctggcacttttttcttgacctttgaatttctgaggtctgggagtcaggaggcagcatggggcctctccatccgggatccagcagaggttaacagagttggtggctctggagctgaggtggtgtggcttggctgggagttgtgggggagaggccctgccaggggccctgattggtcagtaccttctctattccattgaatcctggtccggtcagctctgtgaattgtttaatgcatatcttggctctgtcccctggctcgagtgtccctaaggctgcagccacagctttagagaggatctgtaccttgtgctggtcactttttttgggcgtgttacctccctctgagatatgtaagagataccaccctttcccaccagccggctgtctgtgggaggccctcattttgctttgcttttctgagacttggagtgactgtgaggaaagcatggactgagtttgctttcttgctggttccttccacaagagctgctcatgggctgataaagccagagaacacctccagggccccatggcctgtgcggagcctggtaccatagtgtcaagcctacagggatggactggggacatgggggcagatagagccacgtggggaggtggtatgtgtggttagatcacaggagcaagtccaggagggtgtgggaggacaagtccagtgctcagccagggctgcctgtcatggcccaggatggatgtgtgcatctcctgtgaaggatttgcgtctgagtgcctggtactgaaggtaggatggtgccccgatcagggtctataatgaggcatgaaggtatgagatgggcatcagagttgttggtccaagggaaactgacctttttaaagggctctcctctccttatctgatttcatcctcagaacaaccatatgacatagggatcacttcccttttatagttaaagaaacagattaagtgacttaacccaaggttatgcatttggtaagtgaggttgttgagatttaaatgcatgcacttcttattccaaagcctctacgttatctttactcttttgggctgaagtcagacatttttgtgaactaagattctcagaggactgatgtgaaccagagtgaaaaggcagacacccgaaggaactttccagtcactggggacggttgtgccgcattcctttagggggaggcagggcagacccaaatgccctttggtagccatggacaggcagagctgagtaaggccagtacatggcgtctgctgctgtgtacggagcctctgctatgtgccagggactgtgccaggcgctagagatacagaacttgacaaagccaactttccactttcatggggcatacattctagtgtggagagacaccgctaataatgatttttaaaaagaatttaaaaatgtacagggtagacatatatggagattgtgtggggatgaaaagggggaccccccacacacataaggaggagaattcagatgatggtcagagggttctagagacttaggacctcagccatctgaagccacatcaattgagctttccttcagggagttaggactgacacaaactaaccccctcttttttcctaataacttgggaaatccatccaaggtccccatggcttacaggaacttgtcgtgagtcagggatcaaggtggagtagatgtcaagcctttggtctccggcagactggttctctcctgtctgccatggttgctgttggccttctgcctcacaccctcccaggcaccagctgacttctttcctcagcctggtcactgtgccccacacttgtccatgcagcacagggaaacgtgcaggttaggtctttgccgagccattggtcaaatgttcctgcaggaggctggttctgaactcagcctgtcctgccagaacgagccgttcccagagctaatcgtctcacgatagggaagggatgggcaccaggcatagagaagtgacctgtgccagatgcttggttgagctgtgtcttgagaggcggaggcaggttggtggtgctggggacagggcaggcatgtgtcatgtgttcagcgcatgtagctccagggctcgggacttgtttacttggtggaagaggcagcggacctgcggagtcaggccatgtgattgttggctctttggctgatcatggacagctgacccgccggactgcacacactgccatctgctgccaggggtctgaagttgcacagggatgaggtagtgtagttgggggtgctcagggaggaggagggtcaggaaagtggggtttgtgttgctctgtgttgagtcagccgaccctgattctggtcctagctcttgttggtaaaaactcactcactttcctcctttcagctccagtttcattatctatgaaatgaggggatggaaccagaatctctttggaggttccagctgtatcctggggcctccctgaatgttcatggagatgttccttagccagtaattcaagatgaggaaaactaggcccaggtttccacaagagaaggggagggatcttgatgacctgtctcagagcggctgaagtggtactgttggaattagggtgggtgggtgggaggaggtagtttttaaagacctcccagaagtggaagcagagggctggaggtttcgtgaaggtgttgatgaggatccaccgggtggtaggggacatggctacgcgcttcccccgggaggcttgttggagatgggtttatgtgggagctgctgggggtgcctgctgtcctgcaaggggctgacccaagggaccctgctctaggaaagatgctccgtcctgtctggccctaaaccctggagagagaatgcagctgtggtttgagggagggtctgtgccccttgctgtcaggaagttttcctttatatttagccttctcttttcatgtattttttgaggccctcgactaaaaaattaaatttaattttaaaaaataacaatgaaaaaaataaaaaataaacaaaaatatctcagagccactggttccattttggctttttagtcttgagtcactcttaaaaagatagcaaaataaaacacatgcaggaaagccgaaggtcccaggcccagccagatgggggctaggagtggctgggactctggcctagcttctccatggcagcgttagtcccagacgtacaccacttctgcaaggctgtgtgggtaggagcccctggggctgagggggcacattgtgcaatctgctaagcagaatgtagagttttaaaatagctacctttctccaagacactatctgcttgccgctttgtgggatgtttacctgggattaataatagctgagtgccaccccactgccagtatggaatagcaaacagcgatctgggctaggactcaggcaggagaggaatggagtaataaccatcgtatcagctcacatagttcttttcatacttgctggctcatttggtcctcacacaaccctgagagggtaggtggtcttatccttgtcgttggtaaaactgaacctgagagtcaatcctgccaagatctgactgcttgtagccgcttctcgtgggtctcccatctaggtcctctgacttcagctgttatttctctgggttctgactagtggggcagggacaggagtaggggagtggagtctttggcagtttccttaatttctgaaggccttagagggcctagagatgccttttctatgtgttgaatgggaaacggaacctcagcatgtccaggttctccaactctctgattcttcagacttcttggagctcttgtgagaactggcttgcactttttggctgggaagccagccactcaccatgtgttcttggagaggtttcctgtatttggaagcttctggaatatgtgatgcatcaaaccactgtgacacatctgtatggcacctcatgcctatgcacacaggcatgcttctgctgagtgcagctcacttagagatgaggcccagtgtagggtttttgaaatttttccaacacatttgtaagagatgccctgagccttgcccagcatgcatgttgtgtgtatgctacctgtttgctggctaatgtacagcgcctgctggaagccttggctaatgtacaatgtaaagtaagggactagaaacactggctttagttctgagtgtctgcttcatgattgacttgaaaaagtagggcttacccacagagagaaaggtgggtaagagaactcgtgggtgtcagttttccttaaaggcagagcataatcccccactctttataagggctggtaaggcagagtattggacagcaggacttcttggccagttagccctcttgagtgacctttgtttaaatagacccagaacttgtatgaaggaggaaataatggtttatctttatttacagcggatttagccatgatggtttaggctttttctgggggtattcctttaggacagttgaggttggacaggggcagcatgcatatgtgtctctaaatgtctgtcctttggtatttcctgaatgcatccttggctcatactgaaaccctgtgatggggaatccacagcggaattgttttagtggataaagccttctgtagcttcatgtgtgaagatttgtcatgttggatccagttcattctgtccacttgaaggatggaaaagagagtgggcagaacttgcagcaaggagagtgatttgggctagacttctgggagaactgtgcatcacctctgctgagggttcctgaggaaagatgaagcctctttatttgaggtaggagactcggtgtcctccacaggatcctcccagtcccaagtctgtggcactttgagacagtccctggaacagcatgaggtttgggtgccaggatctagagcaggcatttctctccatctttcccatctgtcttcaagacaggcccaagctggatgcaattgaggggatgcatgggcagggtacaccaatgtggtcatcgaatctggaactttgaccttgtttccctttgcagagagaacttctggcactgatcttataggaactggtgttatttgcatataaaaaaagagaaaggcatgttgtccctcatcttttccaggaaagagtgctgagctgctctaatcctatggtggggagggaggagggccgtgtagaggacgcaaggccagacatggtttgctgggaagaaggtaggaggtgggagaggaacatcccagggcaggcccacaactctgggagccacagacattgcctgctatactaaaggcaaagggatgtgttcaaataggcctactatttagcggtaacccacagtctgaaataaatcagttaatggctaaatgagagttgtattaaatatggaaaatcatattttttgtgtgtcatcaccacctacagatttagcatcaacaggcctgaaaggctgaggatgctgaaatgggccctgtccgtaagatcatgcttattttataatgactttttgtctcttttcattactatttcccactcttattccttaggtctacgtgaatatttatttatgcagttgtgttatttccttggggtacagttcttccagtgtcattggcatcaatgaatatgtgactttgatttcaagtgtaaacaaaccactggttcacggcagggacaagccatctctgagacaagggctccagcagctgcctacagatgcccttcccccaatagccctggactgtttcggccagacgcctgagacgagagtcaagggtgttcttgcagggacctgcccaacgctatgtcatgtgtcctgcctggagggtggtgctcacacatgcatcttccagccttattagctggtactgcttttcagcttgacccgaggagtggtattggaagtttgagaccgtacatcccttgctaggtgagaagggggtcagagaggtcaggcacagacagagaagggaacgcaggctcctggccactagcctctctcaagacaggtgaactttgtgttaagcgaactcatttaatattttgggcctaatagaagttatttgtattttctctcctctcttttccctcctctctctcactcaccctccccccactccccagcctccaaagaatttaatctgctggacaacaaacaatactgttataaaactttgaaaacaagagggcgcggcctccctgacaaggagaagggcatgttgggtaacggcctgagggagcgtgccaggcctgagatggagccgggcgagagcccagttggctgggtacctgggcgcctgcccctgcatagcccactagccgcgccatccccaggccagaggggaaggaaccaaaacaaaatggggggcagagaaacgcttgaaaagggaagttgcacatgttcccctctctctgatctgatgggaatgcactagactgtgaaacttcctcctccacctcttctcccgagtccctccctccctcttaccctccttcctcctctctcctccctcctttctcctccttcctcctcctgctactcactgttcttgagtctggcagacagaggtcctgatagcagaatgaggctggaatagcaccataggtgcagctaccagctgggccagccaaagaggaaggagagaaagtgggcttgcagttggctttggattcaaatctaccctctgtctggcccagcctccctccattctattagggaagtggaactacatcacgccacagggtgtgcccagtccatgtgtgtggaccaggtgtgtgcccaggtactggggagaactgccactcagagattagttcaggaagcaccctgggcttcctggtgccccccttgggctgtgctctgctctggggagagtgtttgacttgttgaaatgctctctcctttgagatgctgtgctctccctccagggaggagcagaggctgtgctgcaagaggctggggcatgtctctggaggagctcttgggaacaggaacgtgcttctcccagcgagagcagccatgccgtcttgtgagtgtggtgcctggtaggatactgcatctgttagttacttcccagtggctgaaggaagtggtcaccagctctgcctgggggaggtgggggagctgggctttggggcgtctccctccctacctccagagttaggtttcacctgagactgtggtttcacttttgactccatcttcactgagtcaagcagatgatttaggaatgaccagggagcagcattggtggtttgcctttggatctgcattggtttggacccatgaactctgtggtgggcattgtgtttgtgtaatagaccattggtatgctcatttttcctcttgcagaaagcactagctttcttgaaagcagttcagggacatgcccatccttctgtgccagagctgagcccttctactgggggaacatggagacacgcgagctccagtcttcattccactcctcctccttccctttgccctccactgtctcctgctgtccccccagctcatcccaggggcagggtaaccttggtgcatcctcccatccagccagcagtcccgacccagggcccccgtgcctggactgagtctggggtttatgtcagtagtgttaagggagggatggaaaactgaacttttaggagtgcagctgcctaggaacatagacctccatacctctgacgcaggggaaaccagaaaaaccgatgctgggtccacgtaggcttggaaggctgttactttttgccttcttacctgaataggaatttgaggggcactgtgggtttggaggatgtgattcccacactggggctcagggcctgggaaatgcagtggtccctgggttctgagtcctcctttgaaggccaccctgccagaaaggaagagcctgatggaggtttctggggactttgggccagccggtaactccatgctccctctgctccacccttggcccctcatgtgtataccattccttttatcacccttccctctgattcacagcccccaccctgacagctaaagacagaatgcccaggctgctgcctagaatgacaggaagctggactgccctttcagtttatacatgcaatggcctgggactgtctcttgagggcaagacattccccttttacaaaagagccttccccaggcccctctctcaccaagatgagctcttccttgctgccaggagccctgaaatcagcattcccagaggaaagaagatggccatctgggcttggcttccggctccccccatctggctggaacacacatcagtcacgtaagtagctgtgactcagcacccagcactgccttggcagaaccttcccacgttctggatttgcacacactgtggtagcgcagcacaagcaagcagggttaggtaactggggaccagtgtctgtttgttcagtgggtttgcctatggatttcagaaagaaggattccctcaccttcccattttcctcccatgttattttttaggtaccatgctaggctttaaagacaaagcatcatttatagaatgaagtagaagctgtctttgcagtctccaaactatttttaaccaacagcctatagatggtatttaaccctcaggtgtgtttggcctgcacgggtttttgtttttgtttgagacagggtttcactctgtagcccaggctggagtgcagtggcacgatatcagcttgctgcaacctctgcctcccgggctcgagcagttctcatgcctcagcctcctgagtagctgggactacaggtgccaccacacctggctagggttattttaatgtatctgattttgcatgcatttagacaaaatatggcctctccagttcactgtatttctgctgcatgctgttgctgcttctctgtctcaggtttcctgcccaagccctccgagcatttgaatgtgctgtgagcagcctacctcagcctcctctctttacacatgaagacactgaggcccattcagggcaagtggcaggtccctgttctcagagttggggccaagcaggtattaaaaccattgtgttctgattcactgtgtgcccaagcagattaatgccctggtgtgaggtcgagaagcctccaggtagaatgtggggacagaagtggaccaggctagagtatagctcccacacctttcccatgcgtggcagcactcgtaagactgacatgcccacccttctggatgggtggttttcctccccagacagccctgccaaccctttcaccttcagccagtttgtttggagtcattaggctgaggtgggtaaaacccatcaccctccttggatggcagagctctcagcaggctgggattttcatgggctgccttcttacaggtctaggtggccttcaggcatggtgccagggaaagcaagccccttccagcccttaccaaactaactggctgcttcctagtagggaacagccaccagcttgtttcagcgaagagtcattgctcagctgattctgagaggagaaaactggttctgttgggagggctgagacctgaaggaccccttttatccagtggaattggaaaggcaaaggatttcaatactaacatgatttttttctccacttcttttagagtgtttaattaaagtgatgcattgttaatggcttcttatctcttcttccagagagtaaagagttaaattttagaatccaggagtggggacccagactgtggcttctgttaactccctcagtggcagtggcgtcctgctatgcacagcccctctgctgtactccgaatggtcccttacgggtagcaggagagacattaaataatcacactgatgaccaagtgagataagtggtttttgaaggaaagaacttgaggctggcgaggaccacttaaccttctagcaagggctggactcagggaggctttcctgagctgcggggaggatgacaggttccctggagtggtggtgggtgggggcggggctgaggggtggtagccaagggagggtgaaggagagtattccagaagagacaacagcttaggcaggcaggacctcgccatggaggaaggtgctttctgatcactgcgggacacctgtgtgatagctcatagggagggggtactggtaactaaaagttgataaggaagagtggctaaaatgaaaagcagaaaagtgagaatctcatcaaatcccctcatttgacaggatttggactcccagtagtaactgtccttaaacactcactcctgaccttacaaccctggctgttacctggttaacaagccccaggtgttggctacaggtgtcatcactgagagcccttgtgtgcagatctgccccagctctcccacctgtgactgaggctagcaagtcccccgtgggctgtagagcctagcgctggtgtcagaatcgcttgttgcaggttcatcttcagtgtctttcccacagccacatgctggggaaagacggcaaaggcgctagaggagcaggagaacaaagcaagctgccccagaccacccggctttcgcagaacccagatgatgctcctgtctccccctaagtataacgtgttatgtagtcagtatgatcccattcagtgcagaagtatcgcctaggaatttcctgccccacccaccctgttttgttcttaatgaagttcaagaacaaaatgagatgatagtcaagttatggagcaggctgcagtggatacaagggcagaaacacagtctttggagttagacctgggatctgcattgattggttgtgtgactgcagacaagttatttagcctcattaaggatgaatttcttcgcaaaaattggaataatacctgccccatacgactgttgtgagaattaaacaccgcaacttttgatgttcaaattctatttcttctccttctagcaacacatactgttagtgccaggaaccataaaaattataaggctgtatctagaggcctgaaaggaagctaaaatatacagtgtctactctgtctcttttctcttggttatggtatcagaggaaatacacatattttcttagcttcaaaccaccaaaaaagatgatgcagtaaggagatgggaaatctaatttggaatacagtgtgcaaatcttattttcaagcagactttgaaaataaaactcaattcttacgttagaggattatctgcttaatacaattatagggtaccagtttttgaagtcacatcggggttaaataagattgcaggttcatggggtcatatttgaatgttctgatacttacatatggggtgggaaggaggaatgcatgcttttctcaagttaagacacataaaagagttgtcctggcccaggtgagactcgcctttgtgtagcagctggagcttcattccacaggcagatagggtgcttgtgtcctgatgaagtaagagaatatatctggaaacactttgtgtactgtgaaatactatacaaatgcagggcagtacaaatgtaaatattaatgtattttagtaataattttagcttttatttcatcatatataataatttgtagtgactggtgtgaagttaaatagaattaacctagaattaatgagttttgtattgctctcatctatttgaagcatcagctgtgcctttcatgttgccttgtgcagccctgtgtaacctcctctgtgcctttcccatggagcactgtgtcatatcacaagtagaactacaagaagatatttctcctcagggcagaggctgggtcttccgattgaatctcccttctttcttcattgagatcctcttcttctggaagctggtttcacatggtggcttagatttttccatctttgtatctagcaccatttgaaatcagtgttttaggagtaagaattgcagcacagccaagggtggactgcagaggaactgctgctcatggaactggctcctctcctcttgccacttgagtctgttcgagaagtccagggaagaacttgaagagcaaaatacactcttgagtttgttgggttttgggagaggtgacagtagagaagggggttgtgtttaaaataaacacagtggcttgagcaggggcagaggttgtgatgctatttctgttgactcctagcagccatcaccagcatgaatgtgttcgtagggcctttgagtgtggcgattgtcatattctgttggataacaatgtattgggtgtcgattgtcatggggcaggggagagggcagtacacctggaggaccattttgtccacatcgacaccatcagtctgctcttagaggatgccctggagtattcggcgttgattgcggggcacccgaaatcagacttgccacctggactgtcgaggtgcagaccctgggagcaccactggcccatctcttacacaggctgaccgatttctcctggtgttcagagtctgtttttgtctagcaccatttgaaatcggttatgatgtagggggaaaagcagcagcctcgaagcctcatgccaactctgggcagcagcagcctgtggtttcctggaagatggatgggcagagaatagggaaggaagatcatgcttttccctactaacttctgtaactgcatgtatgatacattattgcagaggtaagagatagtttaatggatttttaaaaacaaattactataatttatctgatgttctctagttgcattttgctgaaatgtagtgctgttctaaattctgtaaattgattgctgttgaattatctttctgttgagaagagtctattcatgcatcctgaccttaataaatactatgttcagtttatca

SEQ ID NO: 926 - DNA, 561 bp, Homo sapiens
agacatgggaccatcatctggattcctagacgtgcaactgcaagcttagaagaaataaaggaaatatcccaggagcaaaaacaaaacacacacatgctcctctcaagagtcactggcatcccagctgaaaagtcagctctacacctatgggacctatgggcctgtttctgagctctgttttgtctctttggtctgagtgtctatctgaggccaataccacagtaccaaatgcgattgctttagaggaagtcttgaaatcagatgagggagcataactttcgcatctcagtccttctccatttcctgaggcttcttcaggctctggtgtgtggtccaccctggagaatgtctcgctctcctctcgagaggaacgtggctgcggctctgcgtggaccgtttggcagaggctcatatgctggatccactggttggttcacggggttcattcctgtctgttgatcttctacctagtggctccatcactcattcaagccacccgatgtcccttttgattattgtttacacggttcgtctttttccacctttccccgttggactctg

SEQ ID NO: 927 - DNA, 6300 bp, Homo sapiens
gacacaactccacatgactcagaagcccttcttaaaataagaccagaccacattcatggaggctgagtcacctctaaccttccaaacttgtgtcttaccaagaatgaaaggcaacctatgtaaaaactatgggctttctagtataaataaaaactactcatctccagaaaataaacaatgactgctaagatgattgaaaaaagaaaggagaagaaagtagcttgtaaaagcgtgtgaaatgcattcacgttggaatctcctacaggcacttcagaagacgaagtgctcctgatggctgctttcaatcactggaagaaccatgaaagtgcgagagattcctcccggtgaatgaagccagctcaccaccgtcaagggcaagggatcagcgtgtgttcacatggaggcctctcaccgagggaacccaagggggacagcacaggaattgcagagccagcacccatggaatgggcagggatttgggtttcatccaaccagccagttgatcaataatcactgaatgtctgtcacccattgcatcctctcctgagtagtgaggctaggccagtgccagtcacctggaaatccttactgttctgcagttgacattttgagaggcaagtcaaacaatatatataaacaactagaatgtctagtgtgtttcaggaggtaaatgccgtgccgggatgagcagaaggaggatggagccgttgctgggcagatagactgattttagataaagccgtctgggtgcaggaaagaagaccttaaagagggaatgacatttgagcaaagtcttcaacaaactgaacccaggaagaaaacattccgaaagtcagagaaaagaggaagtacgaagggccagagccagggaggacattggcggagatgcagccgcagaagcgtcaggggccctgcagccgcgatgcaaacagagaagtgggcgcatggagcatacggggcagagaaccagcaccatctgaatacactgcttaggctgttggggccatggcttctctcgataccaaataggaggctgtggacatcatcttggcaggaaacgacagtggctaggaccacagtagtcaccgtagagatggagagaagtggccagatcatagatacattttgaagattaagcggacagaatttgctatggattagatgtgggtgaaacagagagagagagagaggatagctccaacatgtgctgtctgagcagctaaaggggtggagcaggatgaataaagtaaagaaaagattgaaatggagacgaagggccactgtaagtgagacatccagacgcagcccaatactcccaggggagcttgcttacggcagattccagtcacaagaagcaccaaaaatgtctcctctttcatttatacatgacgcaaaatcaagaggataagctgctccaatttgaaagccacacgttcctttaagggcagggctgggcgaatgggttcaaccctgactgctctccaccgtccatgcaggaccacagcctagggtgaagggggcccttctctgggtgttgctgggagggagaaatattcctgagatgagcttaagacacagcacttctcccctgtggtgtgagagccactgtgcctacaaggacactcacagaagctgtcatttgggattcgctgccaagagcagagcacggctgttgatgcgtcgaaactgaaaagccttcttcagctgggtgggcaagacggctgtctatggagaccctcctgagtacagatgcacctgcttttagcctcacatagacgggggctctttaggactgtgggctgaccctgagaagaagccccatggaagcctgcttatctccaaatcccccgtcctttctcctgaaagacagtctcagtgagtgaagttctagcattatagatttgttcctttgtaagtctgacaggatttatggtttgcaaacattttttatgagaatgaaaattactttgggaaaagtcattcatttaccacccttactagtccttccataggaactgatttcctatacgagcttgagacatatttggaattgggcaaattcctgcagagggtaagaggaccaggaacaatgaaaaagtgtggctgtccatgcaggtaaaagggccccacaggctcatgtgaattactttatttaacagcatcctctgctgttgctgaggagagaggagtggccctggcttctcagtcatattttccagccctgacttgtttacctgtctccaagaattgacccaaagtaacacctttaaaatggaatttattctctcctctattttaaataacacctggatgaatgagagtctttacaacagatacgactagaaggagagacgctaggaaacacagagggaaacatgggtcatttgcatctgcagctgtgtgtgtggcagctcaacactggaagctaagttttcctattcaggaagatgaagctctcggtgtctgtgccccatcccatgcccctggctacctattcacatccggggccaattagtgctgttgaatttattccaaaatcctcaggcaaaatagaactctttttgattaccttggagttgacttctccctagttcctctccacaatgatttcttgcttttcaccgaaactctttgagaagttctatttttttgtcattggtcagagcagcattttattttgcatttcaattcaatttttagtgatggattttggatttttatgttcacctgccaactactttaacccagaaaatagcagcattgagcagttcctgacgtagcggaggtctaccagttgtcatacagtatcagctgccattaccccttctgttgtgtggtcctgagactggtgtgcaccttcacagctcaagggtcagtggttgctgcaggcaattctgctgttggataaatgcttagccctttgagctttacatatttttaacagaagatcaaagaagctgaaagagtgatggaaattaaactggtcttatctatctatattttaatgactgacttggcatcctagtgtggtagcaagaactttggactgaaaaaaatatcacttcacagctgttcggctgtgtgacctgaagcttttttttttttttttgagacggagttttgctgttattgcccgggctggagtgcaatggcacaatcttgactcgccacaaactccacttcccgggtttaagcacttctgcctcagcctcccgagcagctgtgattacaggtgtgcaccaccatgcccagctaattttgtatttttaacagagtcagggtttctccatgttggtgaggctggtctcgaactcctgacctcaggcgatccacccacctcggcctcccaaagtgctgggattacaggcgtgagccaccgtgcctgaccaacctgaagcaatttaagtggactttcaaattttcaattttcccattgggaaagtgtaagttttgggaaaagtcagtagtttttacattcttttgttctgatgacgcttttttgtaaaatccacatgtggaagccattagatcattttgtggggcacagtttgaagaccacaggacttcatgatttctgagatctacccattcttccaatcccagcttccagcatcctctgggtacatcagaacctcccagtaaaaggatggtgttggcagctgtcctggaaatgctcagcctcgctgggaatgggtcccctcttacttgctgggtgaccgtgagcatgttgatcccacctcagagcccccgcttcctcctcctctataaataggaccatggatagtagcttggagaattcaataaaatatagtgtgctgaacactcagcacgtgcactaggaagaaccaaaaatgagcagaaccctcactgatatttaatgtcccctaatttgtcaagggacattatattgcataagatttgctttaaagaaagtaaattcctttcaggcaagttgtttgagtcaccaataggtttaaatcaaaggaagtttttgtcctcacgattttgcattttttagtgcctttccacaacaaatgtataaaaggagcattatttttaagtgtaactattttggaaacttcttacttaaaagcaattttctactacaagtcaaaggattaaagcaaaaaaaaaaggtgaatctgcagcagcatatattgtatatgttttctagaaatacttttttaaagaaggcagagaaccctaagctaaaagcagaatttaaatttctagcattcattcagcagctgtctctataaggagacagggttgaattgtgtccaagtcaagcatcagatttccagggaaagcagaggagaaattagaaagtgtgcaggaagcagcagaaatggctgttaaaaggtgatagccttctaaaattgacaagacttcttgggtcagataacagatccaagggctagaggtctgaattcaggcatggtcgggggaggaggagggggaagtgtacagaaaaagtgggtcagtgccaagggcatctcagcctgtttggaggaattcaaaatcatttaggtaaagggttagaggtcagaaaaaatgatcagcacagcagtgaggggtcattgggacgtccttggatggaagtccttcaacccagcagtgttgcaaggcctcaggttcccggtacctgtcagtttttgcagctcgaggaggacagcctgggatctcaagcttatgtttcataaagttgccatcctaagctttggcatgacaaagtctctctccttgacaacgttccttagggccttctcagcccttttctcaatgaggattccacgttggctcccatcctcgctgggcctgcatacctccttttcagcaagaatcctgctgaggcagtttcacaagaacttcccacccttaatgcctgatcatcacaggcatcctatcaaatttcatacccctttctttgatgccttatcaccttggcctgccttcagcaaggatttgttgttattttggttgtcatttgtttgtttgtttgttttattgaaacaaggcagattctaggctttatgattaaactctaaactaatccacaggctgagggccagatattctctcaccacaaagcatgagcacatataagttcagtcccatgccacaaacatctgtggccctttcaagccagatgtgaaatcacatcctgaccaaaaatacaatttttttaatgtgacgttttcgagtgcttttaagattttatctgtacctaccatgacattcatcatttaatcagtctcactctgccaactcaaggcgactgtatatcatgctttttaaaaccatcgaacatgctacaatgcccaaaacacatccagattgttattgcattgggtcattgcataatctttctggcttcgcgccgctgcctcctaaacttccccagccaccagcacaatctctccaggagcactatactgtccctgaaagctcctcaccccatccctggagggcagttcctgctccccaaatagctcgagcctccttgcttgtcccctttaatcccccagtgcttggggtacccatatattgacaacgggtgttaagaaacaatgtcatctaaaaccccttccagatgcaattacattttaactcaatgggaaatggcttgtcatacacttcacgaggaatatgaatgttggcattttaggaaactgcagccagtgaatatgaaagagatgctgcccaaagggctggtcatccagggtgccacctgccaaccttgtggtacgagtgtcctgggctggaggaaacctgcctctccagggacatgggaaaagaactcatcatgggaaaaagaaccatcttctgcctcaaagacagcatggttatgtaggaagattgagaagagtaaatagctccaaaagaaaaaacaaagtaaaacagaacaccaagtaggagaatatcaactgtaagtatacgccaaagtgaattaaaatccaccatggagaagaacacgcatgctgagaggggctctctccttggctctgccgtcctgaaggcagtgtggggagagaaggagctggcttttgatagcaatacggacactctgggagctgtgctgaatgtttcatactttccttaatgtaatttccacagcatcaccacaatcattactgtctctgctgtacatggggaaaagcttgagttaacagaagttaaacaattcaccagtgatcacacttacatgaaaaagccaggtattctatctgtctgataacttgagcctggccattacattcagttctgctgtctttaaaataaaaaccctggattaagtca

SEQ ID NO: 928 - DNA, 419 bp, Homo sapiens
caatatgccccatttcgctaacctccactgagccccaagctctgaagatcaaagtcaaagcacgaaatgaacgtgagagagctggaaagctaactacaaagcctctaaaagttacgtaacatgaagaaacacactcgattctgcctctcccattgaatagagcaataaaacatggacacaacacacaaagcagctatttgaggactctgagaaggaaatggcagcacacagattgggggagaagaccagaatttgaaatgctgctgaaccacagtagagtgatacaagatgtgaccgttgaagaatgctggatgaaaggcgactgccttcatggaacccgtatggactccgtgtatattttttgggtaatttcctatgactcagtaattatttcaaaataaaaatgtttaaaaagtgaa

SEQ ID NO: 929 - DNA, 592 bp, Homo sapiens
gctgctgggataccggaggactcgggtcccggctcgactcagtcctccagccgcccggggaatacctctagttcttcccggccgccgccgccgccgccgccccgccgcttcctcctccgcctgccggcctccttcgccccgtcccgtccgcgcagcgcgtccggcccgcccgcaggccagcttctctcgggagcccccacccaggcgcatggctccatgaagcaagaggaggaggcagagcgcgagaggtcccgtccgccccagccgcgtctgggccaggataaaagcaaaaccatattcctgctgctgtcagttatgatgcactgagaaaacttcagagacctaaactttttccagagaagagaagctttactggtgttccagccctaagaaacctttgttcaagaaaacggcagatgctctgttgaatccactggagattgttctgatactaaggacaagtatcaaccatctttcctgtgaaaaattccctctcgtactttagttctgtggatccaaaatttatagcattcttctaccaccacaggggctcatatgacattaacagacaagacacttttcagaaagacag

SEQ ID NO: 930 - DNA, 448 bp, Homo sapiens
gtaatatgaaaaagttatttaaatttcatttcacgttgtccttttgaatcctcgcattaataaaatcgttttcagtggaaatatcagcagcaagaaatagaaaatactaacagcaagattttttaatgcccataagaagcagcttggaaattgacactcggttgccaggcacgttttacagctttgctctttaccatggaccagagataattttccttatggagaatttacaagtttccagatgcattatgctgaagatagccaggatccagtacaaggttggtatcccactacaaagcaagggcctgccacaaccagatgcatgtttcaacgacatcgaaagactcaccttggactcatcgctgacttgtcaaccagaactccaatatctgagtttgtcaagatctcaaaggacgtggagtgcatttgtattatcatataaagcacg

SEQ ID NO: 931 - DNA, 756 bp, Homo sapiens
gctgccttgcacttagggaaggttcacatgcctcaaggatctctctctctcagatttcttgactttccctcagtcttcagtatagtcctcctctgtgcctggtgaagacctgtggtaaagtgctggcagagaggaagctaaatcacgtaaaaattaagaaacagctcagcgtttcacagctaagctgccggcttccccttgaaggaataggagtagacctgctgaactatcacatgagagaagaggcccaaaagcttgcacactacagtcaagctggcccttaaagagatggacctagaagatgctgagccagatgtactcaattacttctccaaaattcatcaattagaactgcttcttgctgccgccatatgaagaaggacgtgttcgcttccccttcctccatgattgtaagtttcctgagacctcgccagccatgctgaactgaatacaacatgtttaagaccacagaacatctgcataggctgtaaatttcgttgaatgatggatgcaaagatggaagacagatggatagaggaaaagacagaatcagatactggatgagttagtactgctgcctgtgcttcagagctgtcttattaccacaaggccggcaagcatcaatgtccccacatccccctctgcctccccctgaaatgtaccgatttatatgaaaattaagattacaaattaaagcctggctatcctggagttttccagttcatcagccatccaataaaaatgatgtcaagcctg

SEQ ID NO: 932 - DNA, 806 bp, Homo sapiens
aaataaaaggatttgactttgggctgacaatttagcatttaaccactgtctccgcaccagttccacaagagcagggatttagattaattggaaaaacctcattggtttctgatggagggggcattcatagaaacaacctactgacaactaaggagctactgcgatgggatgggcagcctgcagcttcactcggtgggcagcctccacaggtatcgtatctgatttcagatacatatgatggtctcaagtgtgttttttaccaccaccactttgtaggcctgttgatgccactgctgttgaagtctatgtgaatggtgccccctggtggaaggaaaaagagaatgggacgccaggaatgtcagatgcttttcagcctctcccctgctctcacgcctagaaacaagagctccacaaaggtctctcattcctcaaggctgatgaaaagcccagcagctaaatggccagaagcctgtctttgtgagaaagcaagaagtctctcggtttgaactcttcggtctagagacagattcttctaccagtggtgtaaaaccctaaagaggctctgcataagacctaccactgctctgtgtctcatgacaccctgcccccaccactggaaggccacacttattctttgtgttcatgcttctctatgatctgcaagtttcccaagaacacctggattcgaagctcaagtccaccgctaaatagctatgtgacctaatgtgtcagatggttataaggattacagagaaagaggtatagatagagctggtagcagtgacagacacatctttacatcatat

SEQ ID NO: 933 - DNA, 589 bp, Homo sapiens
gctttctgactccactcttcctactctggcttgctaatcaactttacctggtttgaaatgcccacccttatatacaggcaattatgtggattagaaattaaggatgaaacatcttcccaaaaggtcactgttaagatttacccatcatcttggtgctcctagctctctacgaccaacacagagtggctgacacttcaaccaggcagcttggattgcaatgaggacaatgcaatgcatttgggctggaaacactgcacagaatttaactgtatgaatgcactctagttcatctatgcggtggttaagagcgtaggctctgaagactgctagggttcaaatcccaggtctttcaacatcaactggctgtgaaacatgggcaagtgagtaaacgtttctgtgctttggtttcctcaccggtaaaatgtggataaaagcaattccttcacagggttgtttggaggagcaaatgactttatgtatgtgaggcacttagaataatctctcagtgttattatttaaccaacatttttgttgaatatttagttcatttccaggttttcactcttacaaatatactgtaattaacaaa

SEQ ID NO: 934 - DNA, 356 bp, Homo sapiens
gggaggaaatgaatgctaagagagtgaggtgattcatacagctgtgaaactgcaggttcctgaggacaggagccgcatctttttcatcttttcattccttatggcaccaagtgcctaataaacaacaataaaaaaatgaagagacaagaagtcaagagacttgcccaaagagacccagctaatgcagatggcagaggcaggattcaagaacagatcttttcattctaagtccaggacactctccagtcaccacaggctactgcctgtgtgttgattttattttgtgagtgggttgcattcattttcaagggtgtgtaggaatttagaaagcagaataaaccaaagagagcaagcca

SEQ ID NO: 935 - DNA, 1045 bp, Homo sapiens
ctcggggagtggtggtctccctttcctggagtcatttgtgggagttagggtcttatcctgatctttcctcgtcccccgctcccccgtcctccgaggtggcagctgcgtagaagtctggaacgttttttcttagagttccagaattgagactgaagtgtacccagagacacaaagaaatacagaagtccagaatgatcaaatgagatcactacccaatgaaatgatgggccgaggagccagaagttgtcctactacctgctttccaggtccagattccacgagagccttctgggctcccaccagagaccctcagtgaagactctgttgaagactttaagaccatgctagaaagcctcccggcagaggttcaggaagttctgctatgaggatgcagctggccccagggatgtcctcaggcatctctaggaccttgctggacggtggtggctgagacctgatatccacacaaaggagcagactgtggaaatgctggtgcaggagcaattccaggctgtcctgcccgaggctcagagctcaagcacagagatgtcagcctggaatcagaatcactggctaagtcttgctgcttgcttcttgctcagcctgcatatgagaagtcaaccaagcattctcttggatgcaagatccaactgcacccatgggaaatctgaacttccactttctttgagcttgtctttggttgtaataagaatccatcaaaacccatgtctggatctctctttggctgaggcagctttatttcctacagaatttctctgtcctcttgttaggacaatcagcctgctgctttgggcttttccaagagcctatttttcatctgctggatgcctctttttttttttttttttttttttgcactgtgtgacatgctttaatatatatattttttatgtatccaaagaggtaatcaactttaactttcagaattcatgaatcttggtttggtggcatgaatgaaaggttatgtaaccccaccagtaactcatttggggtgcccttgaaatattaaagtttggtcctcaat

SEQ ID NO: 936 - DNA, 622 bp, Homo sapiens
cgcggagcggctgggaaggaggggctgggaatcttggagccccttggcccgcggggaaagcgggtgacccgccctgcaagtgggatgcccccttcggccttctggagcgcagagcaatgcactctgaagccggagggtagaaagtgctggaatgcgcgcccgggcccaggctgtcgcgagccttcagcaagccagtgcacacagagagggctgcccagagatcccggtcagcgctcgcagttcgaggtggaacatggaggctgtctccccggcaagggtgcccactgcaagcacaggcgtgagaaatggcccagaaaagagtggtcagggcaatgtgttcttggcacgcccagcaagacctgccagagggacctacagacgagtgtctcccagctatcttaccagcggggaccttgaggtccaagtatccagtccggttagaaatggccgcggatccaacaggtgctggtgagtgggagaatacccctgagggaggaagaacagaggccgggagggagctgagtggatgtagatgagaaatacctggacagctgcaagctgtagtcagtgatgggcaactggaaccagagattccagagagagggagggagaaagagggagg

SEQ ID NO: 937 - DNA, 910 bp, Homo sapiens
ccgagcaccgtggagcaccggctgccagctgagaccccagaggggtaactaacggcctgaggaaggcatttcttcggggaacatggcgtgcccgtcgtggctacgttctgccaagccctgtgacgttggaggggagccgcctgcatcccccgctcagccagtgtttctagactccgagacatctggaactcggaagtgaggccagggctccaggaagactccctgatgacgcactggcccgcagcccaggctcagcttgggagctattggaaaacaggcatctggaaccacagtctgcagacccctgtgtgtactcactgtcagtgcggtgggaacaaaaaggcagcaacggctgggtcagcccaggaaagaagacatttcccagtggagagaatgtctgagtggatattgaactttccaggccacaaagaggaacaagagcattcaacactgaggagcctgcctctgcaaaggcaggacccacatgctggatgtggagctggatggttccacgtggcaaggtttgggaggcttctgagaacctggcctaatgattcctgtttcctcccttttcagtcatcatccgtttgcagcctctctttggtagcccatgcccctggagggtccttgttttcaggcaagaagatatctcagctcatcatgtacatttctgccccagccctagaatcagacatttctccaaggagtcctggttcctttcagtgggaaatgttcttagagacattataatctggacactaacgatgtctgtggaatttttacaagatcgccttggcttctctgtgcatgatgaactggagggacaagaccaggccagagagacaggtcaagagactttcgcagtggcccaagtgagatataacagtggcttgaacttgatcttaggtaa

SEQ ID NO: 938 - DNA, 1384 bp, Homo sapiens
tttagaaggcagctatgatcaccactctatcaccaatgtcactaaaatcagtattcttgattgcctgctggaaataaaaatgtaattgctaaaatactcagtataagttaagtgatacgttacaagtaaagatctctcatgtgttaagtttcaagtttcacttaatgttcttaataaaataatggtaatttgaattctctacaaatacgttcagcctgtagtattctaatttacagatgcttgagaacacctaatatttttgattaacttaatgtcaaactattatcctaccttgtaaatagcatagaaattttaactatagtctttaaaaaatcaaatttcattggtagggaagtgtaaatgtatggtttttttaaaacacaacattaaaaggttgaggttataactttcataaagatgaaatcactatttaaaagctgcacatagactgattattattgtttgtttgtcttagaagatgtatctttaaattgctggaagacatcatgaatattttcattgctaattattggtaaagtctttagtatatgtcagttctgtttgtgtgggtatggttgctgtagtgcggcttaaaaaaaaacagtgcttcatatcagtgaaagctcttctttggtttaatctgggttgtggttatattgttttttcatatcgtgtgagctgattgcaaggggttaacccaaaatgagccacttcacttaaaattattctatatgttagtttgtgaattctgttgttggtatttaaacgtacatcatagtttaatcatatcacataaagttgtgatttcaggaatactttatatttcttttgctgtttttgcttgtgacaattgactggtccaccacatagaatttcttagtctttctaacactaggtgaacatttgaactgaccagatgattttatggaaacagcatgagacagtggaagtcaaatctctattctgtaccttgctttgcccctttctggctacaggagcctcagaagtcattcagagatgcagcaaagtgcaggggatcaaaccattgatcgctgaatttgagtcttacttttgtcatttattattagctgtgtgacagctagtaaattaacttaatctctctgtctctgtgttttcatttgtaaatggtattaatattagtgcctctcccccagcgttcttaagaagattaaagcggttgatatttgtaaagtacttagaatattgcctgtacagctaattatttaataacattttaatgtgatgtgacctcattagatctgatgtctacaaacagtactttgagtttgagaattgttatcattttaagtgtttcttgcctttgttttcaatacatcttgaaattattaaacttaaactggtg

SEQ ID NO: 939 - DNA, 610 bp, Homo sapiens
ctccgcctcccgggttcacgccattctcccgcctcagcctccctcagcgtccggagtagctaggactacaggcgcccgctaccacgcccggctaatttttttgtagttttagtagagacggggtttcaccgtgttagccaggatggtctccatctcctgacctcgtgatccgcccgcctcggcctcccaaagcgttgggattacaggagtgagccaccgcgcccggccgattcttgaagaaactgctctcataagctaaggttccttatgattctgcaaggaagagaagactaaagcaaatcactgtctgaaaacataacagctggctaaagctggagtgcagtggcatgatctcggctcactgcaacctccgcctcccgggttcaagtgattctcctgcctcagcctcccaaatagctgtgattacaggtcacagtgtccatgtaactaactcctggttaagaggatatggatagaaggcacatgttcaacttctggcttctgtccttgaaaagtgtgatgattccatcctttgctgtcttccttcccgctgactggaatgtggacttggtagtgagctaccttggactatgtggatgaagacaaagat

SEQ ID NO: 940 - DNA, 912 bp, Homo sapiens
tgctggatgctgagaggaacgcatcagtggaagaaaacaagcggctggacgtggagaggacgtcaagggagcatgccggcggaagagcacaccacagacgccggcaggccaccgagcggcaggaccaggcggagtttggccggggcagtcggaggagagctaggccactaagcagctcaactccaggagataaaccatctcccttgtggctcctccgtcggctgagagctgcttccactcaataacactttgcactcgttctccaagcccccgtgtgatccgattcttctggtacacccaggcaagaacccaggatacagaaaggcctcggtcctttccacaagtacctctacttgaggtactcattgacctggttaacacaagctgcctacagacgccaaaactaagggcaccctggaacacaggcttcagctgtaaacattcacccctgggcactgccgtggggtgggagcctgcctgagtgtatgctcccctagaggtttgagctgcggggcactgaagaagtgagccacactcccatcgcacactgcgagggggacaaaggaacttttcctcttttaactggggcctcatctggaatctcggaaggtgaatgtctgccttcgaaaaccctaccacctgtctttcttgtggaaccatcaaactccaagtggacaggcaactggagcctcagataatgactcccctttgctaggaacccttagacagacctctgggaggaatttgactgccgttttctcaaaaacaacgccccctgtcagcgggaagcagctaagacaggtcatcgtccatattctaatagcagttagatgtacgttttcagagaggggaaatgatacaggagtgcggggaagggaagagtgtcatctctttaaatgatacagaagggag

SEQ ID NO: 941 - DNA, 2308 bp, Homo sapiens
gggaagaggaaggaggccgcggcttcgcgtcccgcctctcgcctggctggccgtggggggcctggacgcagtggcctcccgaatctcccaggaccctaatatcgcccgaggatgctgggaggaacgctgagccgacctctccgttaggctgaagattgcacaaaccatgctaatggccagcatggatggagggagcgtgtgagatgtgtggggcagcgtgctgcatctcagccaactccaggagccagttgatgtgatggactaccttaattgatttttgaatgttgagccagccttatgcatgtgggataaacccctgttgatcatggctggctggagtgcagtggtgcaatcatggctcactgcaacctcaaattcctgggctcaagggatcctcctgcctcagcctcccaagtagctaggactacagttcctgctggaatcttgctgttgcccattcaagtctggtggttcctgtgtgttggggtggccttgcttctcctgctcttagctctggaggagccctcggctggtgctgcagtgaatctgtcagagtcgtcctaaccagagtgcccccatcctgaatagaggctggataaagccaaacctgctgggttatagtcccaggggattgggcagtcctggtcacaagatatttaaggttgagggaataagttaatgatgctaagtaaataaagaccctgaattctttcccgtgagagattcaagaactcactcttggcatctgggataagaccctttttccggtaacaaacccctgccctggccctttcttccttctggaaaacttaaaaaaaaaataggcctcaaaaagactgcattaatctgagaaactgctgaatatggctactaagagaagctgggattttctgatttttaatgtcggtttcaaagagagcaggtatactttgcaggagggaaccatgctagctgcagaatcatggacgagctggaccacaagtttttacacagtgtgcatgcttttgttctcctgtcaacttctgttgttttcctgtcaacttctgttgttttcatcaaaagccatcaacccgcctcagccagggcatcataatgtacatgcaacagagtgttccaagaaactttcagctgagaccctaagaccctggacatgcaatgccagagtgaagtgtgaggaccacagctgtgcaggacatgcagaaaggaggggcagagagccaatgagatgatgtcccacgactcacctgtgtcagtggagaccgaaggagacttggagggtgcttttggagagaactgctgatgttttgtgagcctcactctctctgtgtgtggaaatgctggaggatgaaaccgtctaaactctcctgaagtcccgggaatggagttttaatggtaatgtgtgatgggatgtgtgttctcttatggtatgggagacacagaggactcacagaggactggcctctgcctcttgaccagggatcaggagagatgggaactgagctggtcagctgctcttcagagctggtcgaggagagatttctgctgtgctgggagggcctaaaaacatgcatggatggagcccaaggaccaggtgcagatcttatgcaagaatgaaccagggggtgacttaggtccaccaaaagactgcccagagggacaaaaggctatcagtgaaaagaatccacagatgaactgccagttcctcagggctgaggcaagatcttaattttgagtaggagcagagtgtattacctacaacaaggataccacagatgagaaaaccctagttttaaacctgctacatccaaagagagcaatgcaactctggcagtagcaaaaatgttgtgcctctcctttcctcactcctaatttcccatcccagagaagggtcagaaaccatcttctgcaagatgggaggaagggtagcagccagactgcaaaaagggagaagaaaccagctacctcttgctgttctcagtggcagactccccacctgcaacaggtcaggtctgttactggagagaaaagacaggacatttttaaattctaggtatagagcaataaaagaagaattcaagcaaagggatcaggaagaggattgctactaagaggcagagaaaccaatgaagccttttgccatctcacactggaaagacaaaaagtcatagaggcttgatttttataaggaaagagaagtgagaaactgacctcgatactttgttggacttgcctaaagacatttgctgaattctcgggctgtgctgggatggagattagaggccaaataaaaacctctggtaagtagtgc

SEQ ID NO: 942 - DNA, 785 bp, Homo sapiens
atcagtcggacacgattggcagggagagcacgtgtttttttatgagaattatgccgagataggtaacagatgaggaagaaatttgggcttgattgaagtaatgggggctgtctgtgaagctttgcggcagtacagcctagaaattaccttacttaatgtattctccagattatccagagttctccaaagaaacagatccggtcggtgactaaacaagtactcgctgctatattatccaggccatttgcttgatcatttcctctggttaaaagcaagtatttgttctttcaagtatttgttttgttcgggctccaaaagttaaagaggaaactatcaccccctaagaggaagccaatatcatttgtcacaagtttaaagatggacaaaagcctggatgacagcacatctgttgaaagcatggtttactgaatattttaagcccattgctgagatctaatgcttggaaaaaaataattcctttcagaatattgctgctcattgacaatacacttggttgcccaagagttctgatagacatatacaaagaaattgatcttgttttcatgcctgctaacacaagatctgtctgcagtccatggatcaagcataatttcaacttcaagccttattatttaagaaatacattttgtaagaccatagctgacatagattgtaattcttctggtggatctgggaaaagtcagttaaaatcttctgaaaaggattcacaattctagatgccaaagggaacatttatgattcacaggaagaggtcaaaatataaa

SEQ ID NO: 943 - DNA, 2456 bp, Homo sapiens
gactcttaattccttctggaatactgagagtgccgggaaatgacagcttaatgttcagggtacgtcttagtttgtcttggatcttgtgacagggacagctgcattagtcttggagtgaaagtgtatctgagtatgttgggccacatttgcagtagtttgttctgaactccagagctattgaccaagcccgtcctgccttctgaggtatggaagacactgaggcctcctgacccacggcacagcattctctgcttccagcgcgtctgccttgggccatcaccccagagagtttgatcaaggtctgtcttaccacaccccctcccaaattcttgcagctcccaaagctgctggaggcagcacctgagcctgtctctccgctgagcttcttcaccccaaggactgcctgctggctgcccacttctcatcaggcaaggccacagtgccatctgctggctattgggagccatgctggtcaggttgggagggcacaggagcatgctaggctgacaaggagcactgagctctccccacctcagctcaggaataacagaagtggcctttcccttaagcccccactgaccagagcccctcattcaggcttcagtcaccagagccccctgctcaagtcctttagttaccatggcctctaggtcagtctcctcaggaatcagggccccttgtgcagcccccagtcccaccccccactgaccagagcctcagtgaccagggcccctaggtcatgcatccaatgaccagggcctctttctaaggctctctactgaccagaacccctcattctagctccatggtggtgagggcacctcatttaggcttggcttcacaatcaggtcattcaatgaccaggacctatagctcttgacccccaaagaccagggcctttctcagacccccacgaccaggtcctttcagtgacctatagtcctctcttttaggaccctctgtgcctaggttactaaagaccattactcagaggacataaggagtggtgtttgtgggggctctttgatccccaagagctggacaggtcccatctgtttcctctgtttatcgtccccttcccactggtctccagagaggcctctggccactggggctttccattttgttttgcctgtgctcccgggtccctcttcagacatggccacagctgtgcccaggtctcataacaaaggtggtctctgttgagttaactaatcccatcccgggaactgtggcccaagaagactagattctatagcatggcagcccacctgggcctcgcatctgctggccctctaacaccagaccacacacccctgtgccatctcaccacctcccataggcaggcctcccatcacatctatctcaggccgtattacccaaaggccaaatgcttccagtcccagcatcccaccagtccctggcacctgtcctagataccaagtgtgacttttcccattttccttttcttccagacccaagcctaatccaggtcctacccttctcagcccccatcccacttgggtttatttacttattcaaacaaacatcaaatgagcatctacatattaggattctagataggggtgtggggtcagtgtgcagggacggcagcatagaagagggactttggttgagacttgaaggatgaataggagtttgccaaagggtcaaaggataggaagctatttgaggaagaagaaactgcatatactacacaaatatacagaggaccctggtcagccatgtggttggagcacaaagtgaaaagtgaggagagagggagaagagagacttgaacagggaagcagagaacaacagatggaagatcttgtagctgagctaaggagtatgaatttttttcccctaggatggaaaaacacagaagttttttcaaatttccaagtaggaagttatgattccaaaaaaaagaaaaagaaaaagaaaagaaggctttttctaattagaaaggtcaggttagtggcattgtggaagacggattggacaggggcaaaagtagacccagggagactagtcagtctagccagtcagccaacaagtgttttgtaagttctgtagtaggttaaatagttgcttcccccactccaaaagttatgcccatgtcccagaacccgtgaatgtgaccttatttggaaaacagaactttaaagatgtaatcaagttaaggatctcaggatccttgattatctgatgggccttaaatccaatggcaaatgtccttaaaagaaacaaatgcaagagaaggccactgaagacagaggcagagattgcagtgatgcagccataagccaaggaatgcccggaaatgtcagaagcagaaagagcagattctcccttcaagccttcagagggagtgtggccctgctgacatcttgacatcaaacctctagcctccagaacaatgagaataaatttatgttgccttatgccaccaa

SEQ ID NO: 944 - DNA, 1643 bp, Homo sapiens
actgagtgggaatgattagaataaaattgaggactctagcagcggacttagaatggtatcagcgggttctcatcctacaacctgactttggaagttggagataaggggtgtctaggggttgggtcagactccagttttggagtctgactcacagttgggcggagccaaggccccctgaggctgagccagaacctctgagagtgaacctggagactcagagggcagctggcagggctcacagtgtggggtcccaccctgcagaggctgggtcaggccctcaagggctgggttgctggcttcaagaggctgggccaggatgtcaaggggcggagttccgggttccacagctgggacagtgttgcccagagctgattcctgggacttgcagaaacgtgcgaagctgctcctgccgcacgtccaccaggtacctgcagatgggaagcgccctgtcagggacccagattttgatccccagccaggatgttccccaccctccaccccactgactcaccgggctaattccacaatcaagttccctccgggtgccacacaggccccaagctcagggatgagaagatggaccatactgcagagaggacggaggacaggctgagattcagctccaaatccggagggaggatggggctctgggatcccagacaatgagggaggaggggtggcaaaactggagtctgggtcctggggaaagaagggagcaggaggtctggactcctgggtctgagggaggaggggctgggggcctggacccctgggtctaagcaaggaggggctgggggcctggactcctgggtctgagggaggaggggctgggggcctgatcctgggtctttgtgagcacagctgcctccccgcttacccacaggccacatagaggagctggaatcggccgttgtagcagctcttgtggtggagagtctgagcagaatcgagcggcaggaagtggacgtcccagcctcgccgcgcaccttgactggctggccgttgctcgtccgcaggaggctctcgtcgtccgcttcgatgccgaaggccacgaagggccccgtggcgatgtccccccagtacccgcgcgctgccacgcgctccccacgctggaaaaggagggagagaggaggcaggtaatctagagatgatttgcggtgtatgggaccatgtgtacaggctatttgctgctgctgcactggcctcgtccctggatccctcgccgcagatctgtcctacacagggttccagaggagtcatcctaacaccatctgaccctgtccctctcatgctcaaaacatatttgtagccttcatcaccttcatgacatggatactgctgagttctccagacacttcactccagagtgcagctattgtgagaaatgactctttgttccccaaataagcctcagaatctggatatggggcctgaatctggatatggggcctcaacacatgctccaacttggactagaatgtccttctctctggtctcagttaactctgtccctcaggtctcagtgcagaagtcacctccaccacgaagcctcctctgtctgaccctctgttttaaactttttcctactgtaaatatgtcccattttctgaaaaaaatcagcatattttaaagtattctggcac

SEQ ID NO: 945 - DNA, 747 bp, Homo sapiens
agatcctaggaaaggaaactgggagcccgggagaactaaaattcccaattaaaagtgaatttaaatctgagctgttcttagacccagaatttcttgcctgaaggaggaatcaggtccccacaaggaaagaccctgcaactgtataaaaaaagaatctaaaaagatcatgactccttcagtcctttcccaaagagacctatggaaatttcctcaggaagagggaccaagcaaaaccccagaagagttgatctcaaagcttattttatgaagaaaattgacctgagtgacacaaagggttggactgtagtagatgtcacgttttgctgcctagatctccatccagggatgaactcttatttcctcagcttctttgtctcctcagcttctgggagggttggcagctgatattctcacctgagtccctttctaggacttgcccttgcctgaagagagctgtgctgcccaacatgatgcctcctccaaggtacaatccacacccagtgactaataaacaggggttacaaaggcatgcctgcttgccccagtttgggacaactttaccaggccaacccagcctcaaggctctccacaggaacagggaccctgaaagctgtgtctatgaagttattacaagatattggctactgtggtgcatggagcttctaggccagggtgattctcacacctgcctgatgtggatcttgttgcttcacacctgaaacatcatttgagaagcccgggaagtgg

SEQ ID NO: 946 - DNA, 431 bp, Homo sapiens
agattctcctgtttgaggaacgttgctggctagtgacatggaggagcactcaccaagagagaaggggttgattttatcactgaaagcccagctctgtggtacattctagaagctctcaacatctaatctgatggtgcgcaccagaagcttctccgtcctattgaatctaatgagaacatcacgtgggcaagcgttcagttaacacccaaaaagagctgcagccacagactggcactgcatcaggaaaggcagacgggaacacattctagtgaaatgcaggaagttagagacacgaggcaaaaaagatgttaaagagttttgtgtcagagatagcagaaactccttaattactttttggagtttggatttctaaatcacagctttctggaaaattcagattcttatcagtaaaagatcctgctttaggttat

SEQ ID NO: 947 - DNA, 1580 bp, Homo sapiens
gtagagcccgggaccgccgggccaccaccggccgcctcagccatggacgcgtccctggagaagatagcagaccccacgttagctgaaatgggaaaaaacttgaaggaggcagtgaagatgctggaggacagtcagagaagaacagaagaggaaaatggaaagaagctcatatccagagatattccaggcccactccagggcagtggacaagatatggtgagcatcctccagttagttcagaatctgatgcatggagatgaagatgaggagccccagagccccagaatccaaaatattggagaacaaggtcatgtggctgtgttgggacatagtctgggagcttatattttgactctggacgaagagaagctgagaaaacttacaactaggatactttcagataccaccttatggctatgcagaattttcagatatgaaaatgggtgtgcttatttccacgaagaggaaagagaaggacttgcaaagatatgtaggcttgccattcattctcaatatgaagacttcgtagtggatggcttcagtgggttatataacaagaagcctgtcatatatcttagtgctgctgctagacctggcctgggccaatacctttgtaatcagctcggcttgcccttcccctgcttgtgccgtgtaccctgtaacactatgtttggatcccagcatcagatggatgttgccttcctggagaaactgattaaagatgatatagagcgaggaagactgcccctgttgcttgtcgcaaatgcaggaacggcagcagtaggacacacagacaagattgggagattgaaagaactctgtgagcagtatggcatatggcttcatgtggagggtgtgaatctggcaacattggctctgggttatgtctcctcatcagtgctggctgcagccaaatgtgatagcatgacgatgactcctggcccgtggctgggtttgccagctgttcctgcggtgacactgtataaacacgaccctgccttgactttagttgctggtcttatatcaaataagcccacagacaaactccgtgccctgcctctgtggttatctttacaatacttgggacttgatgggtttgtggagaggatcaagcatgcctgtcaactgagtcaatggttgcaggaaagtttgaagaaagtgaattacatcaaaatcttggtggaagatgagctcagctccccagtggtggtgttcagatttttccaagaattaccaggctcagatccagtgtttaaagccgtcccagtgcccaacatgacaccttcagcagtcggccgggagaggcactcgtgtgatgcgctgaatctctggctgggagaacagctgaagcagctggtgcctgcgagcggcctcacagtcatggatctggaagctgagggcacgtgtttgcggttcagccctttgatgaccgcagcaggtatgatctcgtgaaaccttgagagaaactgaatgaggaatgaaactattgttcctgtttcacacagaagaaaactgaggttggcactcatgatgagcccctgttctcattctgcaaatggtgaagctctctatcgtcctga

SEQ ID NO: 948 - DNA, 578 bp, Homo sapiens
ccgccatggtgttccagggaaaccagcttccgagctgtacttcagagccctctgcaaacagtgctacctagacaaggtggggtcagaggctctcagataagcagaacttgcagggcttgtgacaggtatataacctagtccttaagccctgtgggattttacagcgctctgacggagtaactcgatggctaaacacggggagtaaagacagaaccatcccagcactcagggctccaccctccgagtaagcgagcttcccactccacatccttagcaacgctggcttcatcttccagaacggggcatgagaaaaccgacagaccagaattcttcacaaaagctgccttcacacagccaagagcataattccattaatatgccattttatagcccctcagtcatttcagatacaaactcagttactttcacatctattttaaacccacaaacaattcctcattggggatgaaatataaacaacaacaaaacccgctccagttatttagaaaatcagacactctattcttggcaaaggagatctacttaaaatacataaataaataaacatctaaaaataa

SEQ ID NO: 949 - DNA, 2770 bp, Homo sapiens
agggtgcgtcaccggagcagatgcccggggcggttggaggctcccgggctcccgctgactcatcagaaaggcctgccgcgcggcccggggggcgggggaacgtgggggaccgcggggagctgccgggcaggcggcagccgaggtcgtttgaggcgcgcagagccggaaaaccccacggagacggctgggcgggggcggggcgatcggcactgaccaggtcacctgcagcgcgggctgacggcgggcgactgaaggagggagcaagtctcccacccccagcagccggcggccgcttccgaagtctgcccccttccactgcggagcggcgccccgcgggcccccagccagcgcgcccgaggcgcccccgccccgtgtcgctcgcgctgcgttattgggagaaggcggttcctgagcaccagcacgggcctcggtgacaccggaggtcgctggggtcttccccttccccttaagactctgggtctgtctgtgggaagagctttcattccccaccccactctatgccgaccctctccgggggaggctccactggcactgtagacaccacgtgctgggtaaaaaggcctggtcccagcgcttccctgtcactgactgctaaccacaaggcgccgtggcactcaggaaatgcggcaggggggctggagaactatcaggaaggggtgtgggcagagaagaggcttccaccctgtcttggaacacggacacagtccatggcattcaaaagaggtgggaggctcctctgtgcacgtgccttccgcccccgggacaggtggaggaggggatttgactggtcctcaccctctgcatttatagtctgggcacaccttgggcagtgccgcaggagggcgctgtggagtacaggcacatgcagaaggtgtggcgagggcttcctggtggagctggcagtagggcagggaccttgaaaaggaatgatttgaacagatcggaaaagacattccagacagaaacaaatgcctgaaacccaaaccgagaagcaggaaagagcagactgcgttctcggaatggcagggagtccagtttgactggaagacctgaggctcagaggcgcatcacggcccagatgcagaccacagaggcaggcacagtggcccaggaggaccgaggacctggagtcacggggttccgcccgctgcccctggggaaccgagtcatgccagttcccagacagatgaattccttccaagaattccacagtcctgctcaatcctagccgccaagcctcctggccttggatggctgctgtctaatgcagatcctctttcatccagatttcaaatatttttcctattctgtcctttgatcactaacgtttatgtttatctacatcagcatccctcaatcctgacggcactctgaaattatctaggggtgctttaaaaaagaaaaatgttgatgcatggccctcctccaggaaatctgattttattggtctggggtggggcccaggcatcagcagacttttaatgagcagttagagaggagaaccactgatggagatggtcaccagggagtgtccaggtcagaccgccacagaagagtgcagcctcctggccttcagacccaactgggacaaaccctgagaacagccttggcagacctccaggggcagctggactccctgaggctggatgttgcagcctctcccaggcatccactctgcagctgaggccaaagtttccaacgggaagggagggagagtctccgagtctgggccttgccactcctcactcagcatctgaccatccccacctcctggatctacagggttcatagaggaggacccagaagagggaaagtcaggctgaggaacttggcctccctgctgcaagggaaatgacatcggttaccaaggaggtgaccagctatccttttccaagactgaaaagcagaaatacggccctgaggctagagggtctaagagaacaataggaagaatttcctgacaaaggacaatgttgcctaaaggactcaggaagctctgtgaaaacaggagactcccgagcagagcaccagacccttctccaccaggcagtgtttttcccatatgacaggtgagaaaactgaggctgagagacatgtaataacttgctgaagcagcaaccagcacaccatatagctgaaatctgtagatcagcagttaaaagtggtagggcaagtcctctctgactttcagcgctaagagcctaggattctgtgtttttctgcttaagcctgggaatcagagtcctacaaaagccgcgcctaatcctgggggtgtgggctttaaacccagagagaaagcatgttattggaatactcctgcacttttctccctttgaatcccaccacggaaagaaaattctgtgacgtgtacccagtatttattggagggtatttcctagcaagaaaatgagggcgattgaccaggcacggtggctcacgcctgtaatcccagcactttgggaggtcaaggtgagtggatcacatgaggtcaggagttcgagaccagcctgaccaacatggagaaaccccgtctctactaaaaatacaaaattagccgggcgtggggtggcgcatgcctgtaattccagctactcctgaggctgtggcagcagaatcgcttgaacccgggagacagaggttgcagtgagttgagatcaagccatcgcactccagcctgggcaacagagtgagactctgtcaaaaaagaaagtgtggtacatctatactaatggagtactatttagccgtc

SEQ ID NO: 950 - DNA, 431 bp, Homo sapiens
ggtggcctagctgtccgtactccccaaacgcaaccttccagtcccaaacccaggcgttctaagcgctcaggacgacgatttgcgctcacgccaggaccctagtcttcattggacccttcctcattctgtcctcattgaggccatctgagaataggggctatctgagaatgcaggggagtggacatcgtgtgcagacagggagtctgattgtgagtgccacggggctgaggcctgcgccgacctggtctgctggtgctaccaggcttgaacagtcttcaaatccactgctattaggcaaattacctggctcccgctgaactccagcacctagaactatgtcacactcgtagtaggccgctgcattggttgaacaaatgattttgaaagaatgaatgtcttcctctgtgcctgcatttcctcagaaggctgta

SEQ ID NO: 951 - DNA, 6341 bp, Homo sapiens
agacgcggagccatggccgaggtgttgcggacgctggccggaaaaccaaaatgccacgcacttcgacctatgatccttttcctaataatgcttgtcttggtcttgtttggttacgggttcctaagccccagaagtctaatgccaggaagcctggaacgggggttctgcatggctgttagggaacctgaccatctgcagcatgtctcgttgccaaggatggtctacccccagtcaaaggtgctgacaccgtgtaggaaggatgtcctcgtggtaccccttggctggctcccattgtctgggagggcacattcaacatcgacatcctcaacgagcagttcaggctccagaacaccaccattgggttaactgtgtttgccatcaagaaatacgtggctttcctgaagctgttcctggagacggcggagaagcacttcatggtgggccaccgtgtccactactatgtcttcaccgaccagccggccgcggtgccccgcgtgacgctggggaccggtcggcagctgtcagtgctggaggtgcgcgcctacaagcgctggcaggacgtgtccatgcgccgcatggagatgatcagtgacttctgcgagcggcgcttcctcagcgaggtggattacctggtgtgcgtggacgtggacatggagttccgcgaccacgtgggcgtggagatcctgactccgctgttcggcaccctgcaccccggcttctacggaagcagccgggaggccttcacctacgagcgccggccccagtcccaggcctacatccccaaggacgagggcgatttctactacctgggggggttcttcggggggtcggtgcaagaggtgcagcggctcaccagggcctgccaccaggccatgatggtcgaccaggccaacggcatcgaggccgtgtggcacgacgagagccacctgaacaagtacctgctgcgccacaaacccaccaaggtgctctcccccgagtacttgtgggaccagcagctgctgggctggcccgccgtcctgaggaagctgaggttcactgcggtgcccaagaaccaccaggcggtccggaacccgtgagcggctgccaggggctctgggagggctgccggcagccccgtccccctcccgcccttggttttagcagaacgggtaaactctgtttcctttgtccgtcctgttgtgagtaactgaagcctaggccccgtccccacctcaaatcacacacaccccctccccaccacagagacaccattacatacacagacacacacagaaagacacacacagacacaaaatcacacacacaccctccccgccacagagacaccattacatacacagacacacacagaaagacacagacacaaaatcacacacacaccctccccgccacagagacacaccattacatacacagacacgcaatcgcagatacgcccttccggccacagaaacacaccattacacacacatacacagaaagacacacacagacacacaatcacacgcagcccctccccgccacagagacacaccattacatacacagacacacacagaaagacacacacagacacaaaatcacacacacaccctccccgccacagagacacaccattacatacacagacacacacagacacacaatcacacacagcccctccccgccacagagacacaccattacatacacagacacacacagacacacaatcacagataccccctcccggccatagagacacaccgttacacacacatacacagaaagacacacacagcccctccccgccacagagacacaccattacatacacagacacacacacacacacaatcacacacacaccccccgccacagagacacaccgttacatacacagacatacacacacacacagacatacaccagacacgcaaagacacacagacacagatacacagatacaaagacacagacatatagacacacagacatgcacagagacacatggagacacatgcaaaaatgcacagagaaagacatacagaagtgtacacacagacacatagaccacacagacacacagacatgcatgcaaacacacagacatgcagacatgcacacaaacacagactcacgcacacagacttaggcagcccaaattcagcgcctggggcataagttcctggaggggtggccaccttcagcccccacggtaaggtcctgaggaaccttccccttagacaagggatcatggaggaggtctcttccggagcctggagggaggcctcaagtggtccttccacctcggcatcccaaagtgctaggattataagcatgagccactgcacctggccccaacatcatttattgaacagactgtcgtttccacattgtgtttcttggcatttctgtcaaaaatcagttgaccgtaaatgcatggattcacttccgggctctctattctgtttcattggtctgtttgtttttatgccaataccatgatgttttgattattatagctttatagtatatcttgaagttaggtagtgtattgtctccagctttgttctttttgcttaagattgctttggctatttaggggtctttgtggccattactgacagttaaaatggccctggctcatgtctcctgggcctctacagtactttaggtggggaagtactgtggcccacatgtcccaacaggctgtgtgtggcacctgacagtgctttgtgccactgtggagcaggtgttactccctcatacgaattttaggattattttatttatttcagtgaaaaatgtcaatgaaattttgatagggattgcattgaatctgtagattgtttggggttgtatggacattttaacaatattaattcttccaattcatgaacatgggatgtcttttttttggcacctgatctcagatatgggacagctttctaattatttgtatcttcaatttctttcacaaatgttttatagttttcagcatacagatctttcacttccttggttggatttatttgcaagtattttttgtagctattgtaaatgacattgttttcttgatttctttgttagggtatagaaatgctacagattgttgtatgttaattttatatcctgcaactttactgatttcatttattctaacatcttattggtggaatctttagggttttctataagatcatgtcatctgtaaacagggacaatttaagttcttcctttccaatttggataccttttatttcttcctcttgcctaattattttggctgagggccaacttgttgggtttgttgttgttggtttttgtctgtgtcttttggtgtttcgtgttgctggcttttccagcacacagtcacagatatatgaggcagaaagaaaacccagggaactcctgtcatgtcattcctcaggtcccaaggtccctacatggtctgccttcttctctccaccttttagtgtttgatatacatacgtttatgtatgtagttatatatgtatgtgtaatacccagggaaatatacagagattttaactgtccttagtgtagggcgtggggacaggtgcatctattctaccttgcttggaagtggaaaaatcttcaagaaatcaatttatcaccaactggcatgacagaactcctggtttagtgtctagctgtctccactaaaatcaatcaccatgccatcaggcactctcttccctctggtgtgtactggtacctgaaacagcgtccagcaccctgagagcacagaacgcagcttcttatgtgccccacccaataatcccaaatcgagcacagacctgggagctgaagagacaagctggaggtcaggcagttctattacttaagcctggttcttcctgactccaaaagccaggcgccaccccatgctccttcccagcagaagctggttttcaccgggtcaggaggacaggatggctattcctgaccgttgtacagcagtgccacatctcctagtttccagaacatttaatgtgttgctgtggaggcctggcagctctgaagtagccccttgcgcccaggacaaaccgggcctggaggggtggggtggggtaagctgaagcttccagtatcccacgtgggcattctgttgctgagggcaaccgcccctccctgcaagggaggggaaggagcaggcaggcacacccttcctccctccacatttcactggagttgacctgtgtcctactgtggttgcacctggaccagcccagagggactggagtgactcttcccgcaggtagggcacagccagcctgggcacagggcctcactgcaatccctgcgccccgcctccctgggggatttccaggggttgtcctgctgcttggtgagctgggggtgtgggggaccacagatgaggcaggcgcctaaattgcttgggcggagtccggctgctctctccctccaggccctttcctgtgtcctcgggcccctcgggtccctgcaccaggccagcagcaatcgggtgtcagaggttcaagtccaggctgactcctgggacgcaccgactttgcccaggagggctggggagagggcagccccaaagtgtcatctttgattattctttgtccccaaagccagccttgggcatgtgcccagcacagggagagctgctgcctctgtgggcttgagtcatttttgcttccttgcccctctctgctctgtttggtttaaaaaacaaaaaccaacacccatgggtgaggcgaggcgaggcgaggcttgccttgatccacccgcttcctcccctgcagcctcgggccccatcctcccgcgtggccgcactaggggtgctgggggcggagtggggaccagacctgagtgggttctgggttcagcttcgcagcaggagcagctggggcatcatcagttgggcaggtgacccaggatctgagcaggaatcttccaggtggaggtggggccgcccctctgcttgccacagctgccttctgctctgggggcagcactggctgagaatccagtgaagtaaggcctttgaaatggttttgattgtaaaagtaatgtttatgtttagccattcctttttttattttttattttttgagacgggtctccctctgtcacccaggctggagtgcagtcgtgaaatgtgggctcactgcaacctccacctcccaggttcaagtgattctcctgcctcagcctcctgagtagttgggattacaagtgcctgccaccacacctgactaagttttgtattttttagtagagatggagtttcaccatgttggccaggctggtctcaaactcatatcctcaagtgatccaccctcctcgtcctcccaaagtgctgggattttgccatgagccaccacgctcagccatgtttagccatttttaaaaggtgtgaacagataattaagtctattagcaacattagaaaatttaagttaaaatttaaatgactctagcaagaattagcctttaggtgccctgggtccccctcctcaccgccccccaccccgccgccttctgagaagcgttttgtaatttttcttatttataaaatgggtttgattcaaaactgacttttcctcttcacagtctcacaggtccttccccaggtccaagaggctcttctgtgtcctgatgacaagtagctgcctagccgtggtggcacctcctatcacatgttaagggacccctccccagggccacacctggcagaaggtggcttatgatgttcgcagcttgaaagtagtgtaaaccaaagataaaattctaagcccactcccccagccatcggaatggacccctcctcttggccagggcactccaaagttaacctgaaaaaccggttcaggctgtgaagagaaggtggagtggacatgcctcatttatgtcctcctcccttttggaattcagcaaagctgaccagcatgaacattaacacagaccttaagtctgattagtggcatttacaatctatactctctgaagcgtgctacctggagtcttcctttgcatgataaaactttggtctccacaaccccttatcataacctagacactcctttctagtgataataactctttcaaccaattgccaataaaaaaattttgaatctacctataacctggaacctccccgctccaccttcgagttgtcctacctttctggacagaagcaatgtggatcttgcatgtatttgattgatgtctcatgtctccctaaaatgtatacaattaggctgtgcccagatcaccctgggcacatgttctcaggccctcctgaggtctctgtctcgggccattggtcactcagattcggctcagaataaatctcttcaaatatt

SEQ ID NO: 952 - DNA, 642 bp, Homo sapiens
attacaactagttaccattctctgtatttaacccagcgaactacatatcggaaactaaaatttattggagagattctcagaaccatactagaaacattaccgaggtctcatctagttttctctactgccttccaaggtttctactgtacaatttctcattgaaaactgcctcagcattttttaagaagacatcacttcccccttggggaagaaagaactcaatgacttgaagaaactgatgcttcaggtaccttgaaaaattcagctggttttgatgagaaacagtcaatggggctgttaggggtcctggcggatgcttaggcagtggctgtcctggattccagggaatgccccaaacccagtgatgcaggacccaggactccatctgctcattcttcataaggttggctcacaggtcatctgctgagaaggtcatcttctccgtcttcactgggctcactgaatgaggacattccaagatcccagctcatctcatttgagctttccttttcctaatcccatgcatctgtgtttgagaaaatcttcccaagtgatagatcttctattttccgatttcttccatgttgtattactttttttattaataataataaatacacatatttttggtgtgtacatgca

SEQ ID NO: 953 - DNA, 674 bp, Homo sapiens
aacagcagcagcgcgagcagcggggcggtggggcgcgggcccctgggcccggaccagggagcaggcagccgttgccggcggggctgcatggacgcaggaaagttggctcggcacccgacagacacgggctcggagcgggcagtgccggcgctcgcggaaataaggccgtggtgggcccctcccctccgcccccagggcgaagataattgtgaaacacctgtgccaggccctgggggaatgagggtgaacaatcttaaacatctctgccttcctggagcacaccttctaggttgcacagtggctcagagagtagacttggagccaggctgcccggttttatagccctgcttgacctgtgtgatccgagaataatcttgtttaatctccacaagtttgaggactaaactgggtgccacagagaattaagtaactggtcgaggttgtatcagtaagaagggagcacggaacagattcaagctcaggctggagtgcaatggtgtgatctcacctcactgtaatctccattcccccgggttcaaaagattttcctgcctctacttgccaagaagctgggattccaggcatgcaccacgatgcctagctaatttttgtacttttagtagaaatgggttcttgccatgttgaccaggctggtcttgaactcctgacctcca

SEQ ID NO: 954 - DNA, 2233 bp, Homo sapiens
gttttttaattctaaattttgatctagggagccctcagacataaggagaaaccaatatgttgaatgatggggtattacatacagaaggaccaagaccttattttctcctacttaagatggaatcttgttaagatgaaaggacagctttttaaaaggagaaggtcataagacagtttgaggaaggcattggaagaggaagaggggcaatgtctcctttgttttattgttggtatataaacttaaaatctcagttctttttatggcacttgtggagccacttcctctcctcaccaaaaaatgcccagtaccctgaatccgatcaaattactctcctaaagtataaggcttagtttctgtgtgctgcttcgcgagacagttcccacaaatcgagagtgttaatcagacttttgtgttttcttttttggattgctgttgtttgttttcatttatcatttgtctttgcctaagccaggctcatcaagaattaacagccatcaggctgccgatgtgctgacagcagacccacttagagtcctgtgtttgtaattccatgcatttgttattttacctgttttgtccctgccccttctagtcctgtgcctcctgattgctgagtgttcacctggaccttctgactaccttccctgtgctattccatcagcctacagacctggtacctggatttttgcccgagatgattcctaccaccttactactgacgaagacacccattccagtggaccactgtgacccaggaggcattcagccatcatgatgtggcctttacctccactcctgtcttgttctacccagattcagcacagccctttatagtgaagtcagagtcctcaagccaaatagctaaagctgttttatcacaacaaaggcctagtttgttccatgagtgtgcatttcatttcttcagttaaagccttcagagacacacaataaatttggaccaggggattttttagttattaatgctctctgaagaaaggcaacatctttttgagagcagcattggaccacaccccacaatctcaaatgattgaaattcatgaacatctaggatcccgtgaaggtcactggaccctgttttttctacttcaaatcctgtagtagcctactgaatgagaaaacatattctgacccattgggatcaaatcaaaggcacagtgaactcctcatagcatcttctttggaattactcaggaaccagaactttttacacaaatgtaagaaattctaccaaggagtccccttacctaacagcatctcacaaggctgcaccagattccagaaaaggcttctcttgatacatcaaggtagaacctctatgcattttgtgaccgacttattcttagatcattggttttccaaaggctttgtggccatgaagccctttgagtgaaaactgtgcagaagcccagagtaaaagtgaagctgctctggatgaagtagtgaagcaagagtaggggcctgaatcctgctacaactatcttcctttaccaccgtggtgacacctaaggggacttccttacaacaccttgaactcttccgaacacagtttgaaaaccactgccccagacagcaatatgtttgacctgaatggcattccaatcttttctgtacctccactcagcacagttcatgttcagtagatgctgaacattcttagaaatactgtgtgtgaacttagaaaagtgcaagaagacaggcatgtctttgaccccaggaatgatcatttgctgaagatggtgtcaagtgaacctagattaacagccctccactccagatggatatccagtgattcctagaatgggatatagccagagaacaattctatgcaccctacactgacagactcccttaagcaacaccagatgctctactggtacttgaagtacatgactttgaagtcttgaccctccatgaatacctgaattatcagcaagcgggttttgaagctggtgcctcattgaggccatattagagcaacttgtacatttgacctcttgttatcagccatggtactctacttcgtgtgcaagagataactatgaaagccaaattcaaatactggcaacatttcctaaaggggctcaatatctatcattcgtcttcttttccaaactacacatcactgtatgactcaaccagtagcagttatattgccccttggtttttattcagtttaactactgtttccaagataaatgagctaataagcttt

SEQ ID NO: 955 - DNA, 622 bp, Homo sapiens
ccagggctaaacttagagggaagctgtcatcaccctagggcctgaggaggaaggggagaaaatactgtttggggggcctggtgggagctgtagctgggaggaggaccatgagggagaaaccatagtcatggaaggatgttgtcactgccaggaccaagacaccaagactgtgtgctaggcactgagttagagttgaagaccctcaagaattccactgacaactgaatcatcaaagggaaccgagccctgcccaaggacatacagttgttttcctcttccttgtcctttggagaagcacagctgaagcttcctgcccacaccccagcccctcctccttgagcatgaatgtgcagaccacccaccgccccatgcttgtatctacaacagctatgaggaagaacatacagattaatcaccctgctgcgggatgccagctacccagtggctctggcagccccagtcaatggatcctgcagtgtagccttcatcagtagagctgccactgccagcacccaaaaggtagcactaatatgcatgtgtgacctgaaaattacaatgtaaatggtggggcaacacatgtataggaaggtaaattttaattaaaagtctgttctccaactca

SEQ ID NO: 956 - DNA, 740 bp, Homo sapiens
acgtggagagaacaggaacacatgttttctgtactacatggctaatgcaggatacagggctgcagttgttgggtgaagctttgcccgaaagttgagaaatgggtgcagcgcaaggatgcagaacaggagtcgcagaccaaagcagagatccaggatatgaagcaagagttatccgcggtcaatatgatggacaagtttgccagatctgccaggctggaaagaaagatcaacaagatgatgaataagctcaaaactcatgtgaaagtacagacagctcaatcaggaatgctaaaatgggttataagtgttgctttctacaaattgccaggtaccgtgatcaggctataaggcagtcttgtggggttatccattacttgacagggtctcgctctgttgcccaggctggagtgcagtgggccatctaggctcactgtagcctctgccacccgggttcaagtgaccttcccacttcagcctcacaagtagctggcactaaaagtgcttgccaccatacccggataattttcatattttttgtaaagacagggtctcaccatgttgcccagactggtcgcgttttcttcctctgtttaaaatggcatttgttggacaagcatttgtatagtactatgtacttacttgaagctgttaatttttcattacaatgttttgtaaatttcttcatgaggccataatgcattgttttgtgctcaaattttgcattgtatttaaagcattca

SEQ ID NO: 957 - DNA, 3647 bp, Homo sapiens
gcagagcggaggagcagcagctgccaccggccggaagcctgctggctcggccgagaacaatggccgcctgtcactgtggacagctgtctcccaggctaaggcaaggctgcgctcccagggaatgcgggcagggagccagggcggagggcagaggacgagagcgaggaggagagcgcgggcacccactgatgctggcggcctcgggtattcgctttctctctcttctcccaccttgttccttttccccggatgcacgcatgcactagtaatgccgaatttagaacaacagggaaaggaaaggaaatggcaaaggaagggaaaggaaatggccgacaggaaatggcaaggaagggaaaatccactgcaactctgctgcctgctggcctgtccagggacaactattcagctgggtgggacgttgctacccccttgtggcacccctgctgcagcctgcgattcttacgccctgtatttctggtctaacatcaaccaacactttggcgaaatataataaaatgaaattactaggagaatgaaagaaagtcacatgaaataaaagccctgctttttaatgattatatcctctgtgaaatggatctgcagccctctccatttctgggttcccctggccacaccatgcttatggctgtcccaggagcaggctgacagacaagcttccaccagcatctaaccatggggctcatggacaccgtagagcgtctccacccaacagaatcctgacttgggggcagctgaggcagggggcccgagcgttgaggggaccacgctgctgccccgagacctgctggcatgccacctggccaaccctgacttcgcctgcccgggcgcatgttaactgagttacaacactgagggcacttgaacctggctgcatgaccagagatcgatcacctgtgagatcctctgtgaaacgggataagcatctttaatttcctgggctgttctggaacttcagtcagacaggacacaggagggtgtctgcaccacccacccctgcctcgtgggctgactgggaactatatgacctgtggagggctgtgaccgccaccctccacctcactggggccgcaagccttctctgctccttgattctgctgccgttgtgagcgagggccccagcacccttagggaccccaatcaatgggcttcccacaatgtcgtcaccctttgttgcctgctaagcagccctggggccacctcagaagaaacagaactcacaggtcacaggggccttttcctcctcgtcatcgtcctcctcctcttcttcttcctccctgggcaacttcctgaattcggaaaggtggggttttgctatgttgtccaggctggtcttgaactcctgccctcaagtgatcctcccatctcagcctcccaaagccctgggataatggcgtgagccgccacacctggccgcctttggtctgtttgaagagggacatggcatgatcagatggggcttttaggcctctctgaccctggtgtggagggtgggctggcaagaaggggacgactgtctaaaggagagagtctaagacctgggctgggcagggccatggtgacaaacaggagcagacagagtcgggcagtataaatggaggggcagggacagtgttgaagtttctattctgagcaactagaaggctcgtggtacagttaattaccctgatggggatggaagagtcaggcaggggatgggcaatgggctctgtttccacagcgacttgtgttccacggaggtcaagaggcctgagggcctgcaagaacatggtctgggcaggagatggagctgcggaatgaatgaggatagggggctgagtcccacagggccagagcatggctagcaaagtggggatgactccaggagtggccttctgggtgccacgaaggaaatgttttaagaagtgagattgggtcactgctttcaatgtcatagaacagagctgagcagttgaggaggcgtagtgggtagaaagggaggtcgcagcaggctgaaagcaaaccgacaggagggttagcgtcttttagcaggtaggcagggcagaagagagccacggggcagatcagggaaagaaacactgaagccatctgtggctgagaaggagggcagtggggaggagtgtctaaaattctgagccatccctggcttttctgggcagaaggggtcgctccctcagtggccctatggcctctaacatgcattttgacccctggaatctgccttctcacccagtgggggccctggaagctggacaacacacattcacccctgtgtgcctgtccctgagagtgggggtcaggggagcatgcctggggtggcgaggtgattctgcactgggccgacactcccggctttaactggaaggcgaggaccttccaacagcacaggctgacaggtcttgttccatgggggctgggcacccaaggtatctactgatggtctgaggaatctaccgggatggattcctgatttttttttttttttttctgagacggagtttcgctctagttgcccaggctggagtgcaatggcgtgatctcagctcaccacaacctccacctctcgggttcaagtgattctcctgcctcagcctcctgagtagctgggattacaggcatgagccaccatgctcagcagattcgtgatttttaaaatgaaagggtgactcatgggagaagcctctggaactgcctttgaaaaacaaccagccaagacatgagaaattagttcctctgccatttgggggtttcctgccaactgctgggttttccttttgcacagcagggaggaaggacgcctgtttcccttggtcccggtgaggccaggcctcagcttcctgcccacccgccactgctgctggggcagggaggcagtttccggctgtggggacccagacaatgcctggccaagggccaccatcgtcctcttcctggacacagctcccgcctcatcccagggtctggcctgggacacgccctagaggccctcagccctgagtcactgcaccatgcagatccaccctgattctggtccctgcagagcaggctcctacacaaggcaagaagatgctccagggacaagccaaggtgtatgcaaggcccaggtgcctgagaaacacgtctcaccgaccttggggcaggggctgttacaagaggcttatagtctagtggcagagacaaaaaccacactcaaatcattagtgtacggtatgcactgctcagggactcaaatatgtgacaggaggctccaaacaagagcggagacaaggcgtaaatagccccctgtggactggatgttctgactcctggatggcctccagaaggatgccttttacggtctgtgaaagagctcagggaccaagatgctcaaagcccttcatgcccaagagcccctcctcaggctgggacacgggaagcagagctcggaggtggaactcgtgactgtgtatgggcacatgtgagtgcgtgtgtgtggacagccaggcttagtgtagacaacgtgtgaggctcagaccccaagtgctgactacacctatgcacatccacacctgcgtgtgaaagaagatgctagaaaagaacaaaaataacttaaaaaataaatccaataagatggctggaacatataacaa

SEQ ID NO: 958 - DNA, 1991 bp, Homo sapiens
accgttgctcagagtccaggccggttaggaccagagcctaccccgggtggcatggtgatgatccagattcaggagacatgtctgagaaaggatcgttcagactttttgacctattttacatgaggaataaaggatagagaatcttcttcccttctggtctgactaggaaagccagagggagatggtgaaggagacacagagagagtaaaagaacagaccatgcccagcctctccactgcaggagcttggaatcaggactgtgagcttcatggagacaagaaactgtgctttttttctccttcctgtgaatgaatcccattgcagctttgattgtggttgaatcacctatggaagccatgcatcttcagcatgtagcacataatggacactcagcaaatgacaactgaatgagcaaactaattactctgaccttgagcagtgacttgtgtgacctctggcaattggttcaccatctgaatccctcagctagatacctccctctaatgctgctcctccatcgacaggcattcctcagcggtcagttgtttcccagccagagcccgcactggcactgatgtctgctattatcactggagaggccccgggacttcacttgatgctatcccactgggatgactgagaagaagtaggagaaaatcaagcaaaagcgtgggctcgtctaagtgtttcctcatctgtttcttggtatcttccttgcttccctgcttctcccagccccagacttccttgtcttctctcttccatccagaaagacacacatgccccttctaagtatcactttagggctgaagtccaaagtcttctcttagctgaaattcactgtgcacttgccacttggcagagactgcaaacagctcagtgcgtgttttcatagtcagcattaaaataataattgccacaacactattaaagttttcctcattgttgtaactgttggcaaaggcaaatgtctggggagattgactccctggaaagcttcattatgctgcgagaatatttttgataaaatttcagcagttcctgactgtcaacttcactatgtggttttttttaaagttgtcccccacccctctctaacaggtcctccaattcacaaaaacattcaggtcagttgttgagtaactgaatctttccaagtaattaacaggtagaattaccaggtagcaggcagtgtttgcttgtaatccgtcaatagtagttgcagtggggctaattgtcatcttgagtggccctgcaaccacatctaattaaaagtgtcaacagagagttatttctgtcttttgttcccactgctaggttgtacgtgtttacttcagaaatccaggctcaaagtaagacagatatttggaacatgtgaatatacaggaaaaacattccccagcaactcaaagtacgtaaaagcatttaggcctcattcctctgtccacctgacttttttggtttgtattagtttatatattcaaggcagatatacagtatctgataaatgcaagagggacatgatgccttttcctaagcagcaaagttatactttgccaacttgactgggagctgggctgaagggacaaaggcaggagtcttttaagactcactaacacttacctagtaatggcagtggctgccactacagctaggtttcttgcctttgattcatattctttctttctttctttctttctttctttctttctttctttctttctttctttctttctttctttctttcatgcttcactgaactgttttccagttcaaggtaggtagatctgccaaaactaaaaagcctagattgcatatagaacatgcctggatttacagagcaaggatgcaggaacatatttttccatcagcagagtctgggtcttggctaacttaaagttttgtgactgttcttgggatcagccctgggtgaagcctctgtgaggtccagctgactacttcattctcataaatactttctttgaaatctc

SEQ ID NO: 959 - DNA, 413 bp, Homo sapiens
cgcgcacgcctgaccggagcaccccgcttcacgggggcgttctgcgcgtccttcctccccggctgcctagatcacacggccccgtttcattcatttttactgaataacggtcgttggacaatttagagaagcagcagaaaccacgagaaaaacagtggagtcaaacggcggtaaggaccgacaaggctggcggggacattgagcaaacggcggcttctgagttggcacctgtccttcaccacgttgtgtgggaagtgtggggagtcgggattcccactcctccccagccttccggaaaaatgctcggaaatttccttccacattgacacctgattacagtctaaatagtaaccttattctgattgttaatgtaaccctctcgtaatctctacaaaaatactttagtttttcta

SEQ ID NO: 960 - DNA, 493 bp, Homo sapiens
tgagcaagtgcatgtgtgggaaccctcctgcctgctgggcgctcagctaggagtcccagaataccagacaccattatattcaaataccacaaaagatgtgagaattcaaactgagccatagctccatctcctggaagtgtatatcagcagcaacaagagtaaagacccagaggcatgagaaacacttcctcactgaagcactcacgttccgactgtgtgcaaaagaccttttgtgtctcactcactgagggagattgttcttcactcaatcaatgagaagaacagacgtcttagaaaaccttcagtacctgggggaaatgaatgagctcaaacacaagggaaagtcagcccgtgttcaagataagcccatctcaggaaggcaggcaccatgctcctgagactactttacccccagataagaaagcccttattgataagccaaaatcacagattattttattaagctcatattttaaaagaatgcaaagcttcc

SEQ ID NO: 961 - DNA, 685 bp, Homo sapiens
aggaccaggtgccacctcctctgggaagctttccctgcccgtccacagggtatgcctccttgttcctctcctgccatcggtttacgtgcctgtctccatcaacagaccaggagctcctgaggacagggactgagtctgcctgattcatctctgcattcctagcacttaccttggtgcttagtgaaagctcgaacctgcctgggttcccaccttgtctctgctacccccagctctgtgaactcagagtcatttttctctccccgagtggcaccgggctcagcagacactctggccatgaaggcatcttctgactcaagcaggctggagtgcaatggcgtgatctcggctcactgcaacctctgcctcccaggttcaagcaattctcctgcctcagcctcccgagtagctgggattataggcatgcaccaccacgcccagagccaactactaagcctgtagcagcctcccaaactgcccagtcttgttcagatgcacctccagaaacacaggggtccaaaatgccccttcccagacaccctgaggagtagaacagtgccagcaggctccagggatgagggactagctaccacattccctttcccaagcctcagtttccccacctgtaagatgagggatatgggctctgactttctgagtttggaaaataaagtgctccccaaactgg

SEQ ID NO: 962 - DNA, 2607 bp, Homo sapiens
tctactagagtcatagatgacaagtcccagtccttaacttggtaggatgaatacagatcacagcataggaagactggggtaccctcaggccaagggcgagcacggatcactgagttggggatggccatcaggagcaaagggccattgccgcccttgaccaaagaagcactgtggcatttggtaggcattgaatccatcccagccagccagctgcaacggagcaggaacctcatgtcggggacgattatacttggaatcaagagtagagaaatcaatatccttatcctccaaaagaggaaatttggtcttttgaatcacaagggacatgcttctctcttcttctacaacatgaggcacagtattgtcaaaagcaatgaaccgtttgttgacaagggtctctagcccctgtaattcctgccgcccttttccaaggtagacaaatctgggtacaaatactgtttcaaacataaagaagaagctaggaaggaagggtttagggacttcttgtatttcatctgcattttttaggatacgcaggtgaaccagctgagctggagggagcagctttaagcaagatactatgtagatacgctggttgaaagtcaacaacaggtcacttcgattactggcaaagcagagtggtccaaaatgcagggctgagtcgaactcggttacaagtctaccgtggaagtcccagatccggactgagccatcaatgccacctgtgacaaaaagtttcaggggaaggcagacatcaaatgaagtgatgtcacactcatgcaggcattttgtctctctccacacaaagctctgttttgattctgaagatgtcagaaagccttcatagtgccagagacaccagcagtagctttcagtgatggcacccacagaacctggcaagagtatcacacgttttagggggcagccacagaggattttgctgacaggctgaaggactaccttgttcacctgaagcacggcctctgtcaagtgtatgatgttatccgtgccataggaacagagcaaggcgtttccctgagggccttccagggtagacaatgccaatactgccccagagtgaacagtcttctctattcgggcacaactatagtgggaaagggttctcacaatgccactctcatgcccacagaacatcaatcctcctaggcctttttgcagatgggacctcccataggccaagcatcttactgtatccttacggtctgctgaagtgcacacaagatacttggctgtacaaggagagcgtgttgcatcaaacaccagcacctctgaactgcctattgccacaaagagttcctctctctctgagtcataggcccaagccaaagccttatccataacaagtagaggccaagtgataaccaggagatcccctgttactggagacaagaagcgcaataaaccatcctcagtggcacatagaatccgagtccagttatggccgcagcagacccgctgcacttgctggggagcagaaccacagacattgaagaggctataaaagtagggcaggtgatgcaatgaaaaactgtaggtggtctggcagaaaaaagtggtattatcaataaactgcagtctctgaagatcctcgtcaatattcagctgccgcagcaagttcccataagtgagattccattccctcactatgccttcactgcctgctgttagtaaggtgtggatctctggccggctatggatacatatcactgatgaggaatgggcttgaaagctgtggaggaagttaccttggtctaaaccccaagcgtggatctctccagccctgtttccagcatagaaattgccctgagagacacaagtaaaggagcaagtgatggaagagccactggcgacaggagtgaacttcacttcttccagctggccctgaccccggtgaatgaagaccctcactgtatcctcacacagagccaacagggatccctgggggccattcagggaaaatccctgtacaagctcatgatcagccataggtactatttgagccatctcgatgcccatgccatttggtaagataaaccaggtaaccacagcccccagggtaccagagagcagcaactcagcttctggatcatagaagaggcagctggtggagaaatgacagggcactgtacccagaaatctgaacgttcgacggtgatctccaaaaagcctcaggcgcatgtcaccacagtaagcaattaacatgtggtaggaacctgtgtggaccattgcttgaatgggcggccactgatccatcatgcgaagcctcatcttctctaccattcctttcatttctgtaccctttttttgtatccaaagtactgcctagaagaggatgagagatgaaagcctgactgtggaggtggatcattttccaaagtgtggggtagggaaggctgaatattcagatccctgttccctctggtgtgactaaggaaagactagacagcttgactttaggaatctcctagtacagcagctcccacttacccatggtttccctttctgtggtttcaactacctgtgtggtcaactgcagtccaaaaatatcaaaagaaaaattccagaaataaacaattcataagtttt

SEQ ID NO: 963 - DNA, 560 bp, Homo sapiens
gaattacacttgacagaggcagaggaaaatgcctgcagtctgcagcataggaggaaaaaaagcgtttcttgtcttctattgtgcagtgcccatgaagtatagcatcaagaaactaatgcaaaactgcagagatctttccgtgagataattgaatataaaatcatgattgctttttacaaatttggattcatcccaaatccattgttcttcaaaggcaggaaaagtgatcagagaaaaggtggacggtaacaacacttcaccttgagctgttagaataccagcatttagcataactgatatttgttgcaattaagccatgctacgttgagtgcaaatgggcaactacaatgaggaccactggacttctgaagttcaagttctattctgtctgaagacaatttccctgccagaggtcaaactttagcacacacatgccaacacagaagtcatagtcctgcattatacagttaagctaatgatctcgagaggatatcgtcctggataagggtggagcctacgcccaaaaacaagattacctgaaagagaaaagaaagggggaa

SEQ ID NO: 964 - DNA, 578 bp, Homo sapiens
attagctcaagtggtagagcgcttgcttagcatgcaagaggtagtgggatcgatgcccacattctccaagctttattatttagacatcgtgtctccaaacactcaggtctccaaacccaagttagtgtctgagaacaggatgctgctttggttcaagacgtaggagcagcaataatagagggctggtgatggctccctcttggcattcagtatagtgtagatctaccatgtaattaattctctgtttctttgaggagctgtgaaaccaagggacatatacaactgctcttttctccctgtttctacctgcagctttgtcctaaatgtgagacaattatgaaaagtgcagggcagagccacttgggtaaatacagccccggctttctgctcaggggacagagtttgaggcactgcagaggaaccagccaaagtatgagacccatatgttgagagtgacagtgtaaagttcaaaaaaatcaaaatgtttaaagatttatcatgggtcttgatgacatgatggaatctctctactctctggactgattatgtgtggtaataaatttactttttaaaagcca

SEQ ID NO: 965 - DNA, 447 bp, Homo sapiens
tctccgcgcgcttctttatcgcgtctcgctccatcagggaagcgactgcagaaccaagcaaaggcggtcatccgaggggccggcgaggccaggaacgcgtcgccgcgtgtccgtgaccagggcaccgcgccacggatgccagatcccaggctggagagagcgggttgccccagatccgcgggcagaggcgcagagccgaagcccggaggagaggagtttgagagccgccatcttcgggcggtgaggcaggaggaggatctcccgccaagcttgttgcttttccaagttagtgcctggcgtgtgtgtgggctgcataggggcacccctcgaggcccccttctcttctcccgcctggactgcgttcacgtttctaacatttctcagccccttctccccacatctggccttggcttacatagagtaagtttgctgtgagcacttgcctcg

SEQ ID NO: 966 - DNA, 1785 bp, Homo sapiens
ctcctttcctagtgtccccatctttgctgccttctgtgagtttgatcatgtggactccatggaggttggccactgctgggcaatgcagccaaacaaagtgagcaaaagtaggctggagggctccgtgggtgactggggctaggctgcctctggtgccccaagaaccctgaagccaccttgcagctcttctgaaatgggttgggggatccagctatctgtaattgtgaagtgaagaggatgtgactgccaggtaatgctaaccccgaatccttggtgcctgtgttatgcaccatatgctgaatttcggttccagctgtgtgctagagatggagtttcgccatgttgtccaggctggtctgggactcctgggctcaagcagtcctcccacctaagcctcccaaagtgttggaattacaggcgtgagccaccgcgcccagcctgctgagacttttgaatgtgttctgtttccactacacaattgagaacactgaagtaccagtgacttccagggtggggaagaaatccagaggctgctcctgaaaggggtcacccttgagtgtgagtctgttccaagtaaatcaagtgagctggaagatcggtgagcttggatttattttgtatctttttttttttctttttaaaggggagctgtagaattaagggttgaggtttttcttattctctttagaggttttttggctacctaatacatcagctgaactaatctgcagaaaataaatttatctttaaagtagagctatttagatgcctgagtaacaaactctatctcaatagaagctattggcaaaatgaagctcacctcttaggctgacagcactgtggaaatgatgctcaaagtttcaggggtgaaaccagattggcttctggccaagggtaccttactaatgggcgtatttgcatttggggaggaaaagacctgtgacaacacagccacgtggttgttcctcataacccacagttgggtttcatctggactccctccccacccctaacgtctgccgatgtatctgtgtctaaagccatagtttactcttttttatcctcatccttcaaccagccctacatcttacgtgcctgctgtccagacttctcttaaatctatctgttcctttccaccccaactatcaactcaactgaatagccactaaatgaggcactgtgctaagctctgaattgcaaagatcattagggcatttggtcttattacttcagtcctgggttatgcacctgtgctaggaggtgcagctgattttcctgattatgcttccagacgtgccactccttctcatacacacaactcttgctcagacactgtcctgtacttcctgtaaggtacagtcaaaacctgcgtttttcagaggcctctgcagcctgcacccattgtgattgtgcagtcttagctccttttggccttgtggaaggagagtggattctagaaagatccctgcccagccacttcctgcccactgtgaccttgagcaaaatctctggctccaagtgttgcatgggtggtggtgaaggggtagcaaggaaacttgagtgggtttgtcagaactaggagcagtaagaaaacttgaaagagcctcctgtcttaagaaggcacttgactgcctctgatcaattcagggaggcttcaacagctcttaagaggattaggccaaaggacttcagtgaaacttttgtgcttttgttccctagagtggaaacccttgacacgtgttacacacaaacaacacttggggtggaacaagaggtttacaatga

SEQ ID NO: 967 - DNA, 1388 bp, Homo sapiens
gacaaggaaactaggagtaggagaagctacacattttgcccaaagcctcccattatataagcttcagagtcagaattggaacccaggcctgttggcccaaatcccacgttccttcgactgtactgcactgaggctaggggcgggcacttctctagcctcttcctctttctttctggagggaatgcggtagggagctgtagatcagctaatctcatccctttggggttctggtgagtataagctccagggagtttgggagggcttggcagtagtggattcctcttcccacacccaccctgcctcctgggaaaccggagctcagcccctaggacctggggtgtcacattcttccccatgctcctccttaggaaccttatccagctttcatcctcagaccctagtgtcccaccctaggctctgtctgccctggtgccctgtgctcccctgccctttccactctgattcagagtgactcagagtactggtctgggagtccaatagatgattctaatccgtgctctaccacttagctggctaagagatcttagctcctaaatatgttggtgttctcacctataaaatgggtataaatgcacctgcctcataaaggagcttattaaattacgtaacaaatgcaaaacatttagcagagttcctggctcctaatgggttcttagtagatggcagctcttgcggtgaggattactgcctagcctactttgttgttgttgttgattttgagacagagtctcgctgttgtcgcccaggctgggttgcaatggtgtgatctcacctcactgcaacctccacctcccaggttcaagcgattctcctgcctcagcctctcaagtagctgggattacaggtgcccccccaaccccacacctggctaatttttgtatttttggaagaggtgggatttcactctgttggccaggctggtctcaaactcctaacctcaggtgatccagcctcctcagcctcccaaagtgctaagattacaggcatgagccacagcgcccggccagcctactttggtcttttcttggactgaccccaaatttaggacatctcccttctttaactcttcctttcccatgatttgttcctaaagatggtggtttaaggccgccttcttcaggaagccctcctgggattaacccagcccatttttcccatctctcatccttcccccttacttactatcttttcatttccttttagcacatgattgttgagccagatatattcacaaataacaataataaaggcagatggtgatacagaagaatgtgagcacagaggaaggagcaaagaaatcggcaatcaaggaaggctttggagaggagatagcatttggtctagtcttagatgataagtaagctctt

SEQ ID NO: 968 - DNA, 3170 bp, Homo sapiens
aatgtgtagtcttctctctctcaccccctttcacccttccccccaagtcaccagagtccattgtattagtcttattttcatcaccgtgggcgtaccctgtgggatgatgttaaacgtactctagactctgttggctatttctctagagttagacctctggagacttctcagatagctcatgggtctctggccttgccctgaaattactgggttctcagggagatgctggagatggcggaggctcctcactctttgggtcctcctgtggctcattttgattgagttcctcattcagctggtcgcagtggccggatagtgtggcctgctcccttcctcaggttttcttgaggcagtggtcttttttgtagaggctttttttttttttttttttccctggaactcccttggaggtctcccttccctttcaaggttgtcttgggaaccttgatagtgcttctggacctaggttgagacagggcctttctcttcattacttcttgggtattggtgggtgggtggttgacagctaggctggaggctcatggtttcctggttattttcaccagcatctctcaacagtctcagctcgctcattcttaagatgtcagcttaaatgttatctcttcagaggcccccatgttctctcttgcaatggcctgttctattccattaggggactttgccatatatggcatatttgtgtaaaagttccatgagagcagaggttttgtttcctttatccctccatacacagcaactggaacaatacaatgcatagagtaaacatgcaacagataacctgaaggaatgctgtttcatgccttcattccttcctatacattattgctcccctaatgttctctgtgtttggactgccataacctcatctaccttttctccttactaccttctcattcttcaaaattcagctcatccccaaattcctctgagaagtccttcaggttgttcctctccatctaatctgaataagatgtcctttcttggagctctaatagcgtttagactagacactggtcctcagagtgaggtttctgcatggacagcatcaccgtcatctgggaattcattagaaatgcaaattatgaggccctaccctagacctcctgaaacagaaactctgggagtggggccaacaacctgcgttttaacaagccctgcaggtgactgtgacgaacacaaagtttgaggaccactagaatatagtcactgtagaatatatctccaggatctgacacaacgcctagagcaggattattgtgaagatcgacctgaaatctatcttcctgtagcctcatcaatcctggttgagaatatgaaaaactagttgagttgcatctctgttaggcagctttacaacatttgaggatagcgattatctctacttctccacctctcatccctagctcctctggtttaatgtcttttttttcttatgtgctataactttgaatcccttcactttcttccttggacttacctggacaattccaacttacttcatatccatcttaagtgtatattcaaaatatccttttagcttttaacctacaattctgaaaggtggaactatacatgtctgtaatcaccccagcaagacagagttcacaatgaacatagttagaattccatttgtacagttggaggtgttcctaggtgggcggattgcttgaggtcaggagttcaagaccagtctggccaacatgacgaaaccccgtctctactaaaaatacaaaattcagccaggtatggtggcatacgcctgtaatcctagctacttgggaggctgaggcatgagaatcaattgaacccggtagaggcggaggttgcagtgagccgagatcgcgccactgcactccagcctaggtgacagagggagactctgcctcaaaaacaaaccatccctgtcgctcccatcctagaccaatctaattgcaagtatctcacagggagcccaagtatcaatgtttttttgaacagctttatggaggtataatctatataccataaaatccacttattttaatatatgattttagtaaatttaaagacttgtgcagcccttaccacatcatacaaaccagaatgtttccatcacccaaaaagaaacttcatgtctatttagtcactccctgtttctactcccagctctaggtggccattaatctgagtatctctagatttgtcttttctagacctaaacatcaggtttttgtttttctgcagccagagttgagaaccataattctaaatgcattatgagaaataatggtttttaaagattatatataatattttacgtattttcatatttatgactcccatccttacagtgaatgcgtctatcaccagtaagacaaagatcattaatttgataatggaacttaacagaccattctttccttttatacattttagtatcatattcaaaatggcctcccattctgtccccaagttattttaaaacatctccagtcttgcttttttcccctttagctcataaatgaatagtgctggaagatatctcaggagcattctccctgagatgatgtcttcagtaatgatcgcacgtattggtgttgattccatccttgaagttactttcctttatctttcacagtggtgtttcttcactagaggttttgctgtctgattaacttctctgccaaataaatggacttttgcttcataggtacacaaacatttctaaaactttttttggaaaatatatttctttcttaaaaaaacaaatagtgcatgcacatttttaaaaaaataaataaaaaataatctaccccaaaatgaccagttaagatttactttcagacaactctgtgcatatttacatatgcttatatacaactatgtacacctttgcatagatgagatcacactctatgtactgctttgtaacttgcttctttcacttaatcctgagaacatttgtacatgaccatagatatagatttgtattgtttttaatggctgtatagttttgcattatactgaatcttgatgtttaagagctatgtatattgaggacattatttctttgtcttgtgttgcaaattttttaccatgttattattagtcttttaaccttatttatagtttttttgttataaaagttaagttttatgatgtaaacttaa

SEQ ID NO: 969 - DNA, 470 bp, Homo sapiens
ttgaaagggacgggcatttagtaatgagatatgcacagcagcatagtcagctgtgtggtgcattctcagctgtgcctcagcagccctgatgcagacatccagaaggagcacagccactttatccagagcaatcagccatgactgcctttgcactgtccatgctctcagcccaccacctcctccccctgccattgcagtggctaacactggagacgaagaccaagacaccaccgcctttctccagtaccactcaaatcagcacaggcaaggacaaaggcctcaatccacaactgctgaagatggaccctggccacatgggatggtcagacacgcctgcccagctatctgcaggcgaagaggctcagaagaggtttaggggcctgaaggacatcttgcttccatgtccatatgagcaggctatttctgctccatgagtcaattttgccatataaaatacttaatttcagcca

SEQ ID NO: 970 - DNA, 553 bp, Homo sapiens
aacaaaaaagctaaggataaggaagcgggatgtccctcctccaagtcttgctgaggctggaatgcagtggtgtgataatggctcactacagcctcaacctcctggactcaagtgatcctcccacctcagcctcctgtgcagctgggaccacaggcatacaccaccatgcccagctaatttagagccactctcctgatgctcattagcaagccagcctctggcccctcctaggcttggtgatatcacccctcacctgtcgcagctcctgcctctctcttcccaaaaacctctgcagctttcacttccccagcatgatcttagtttaggctttcacaaaagactggaagagcagtggcctggaagcaacatctgaaatatcaacttttttgtgaccagagacaccaagggggattggcaagaggaaaagatggagtcggaggctccaggctcagtccttggagctcttctctctgtatcctctttctaggtgaaattcacccatatgttgatgacattcaaatttacgtctccaacctggatctctcttttaaac

SEQ ID NO: 971 - DNA, 2002 bp, Homo sapiens
tggcttgaattaagatgacaaaggtagagatggggagaggtggatgaacttgagagctatttcaaggataaaatctaaacgcataccctggagttcagggacgtggattaggacaccctactggatcccatggagaaggatgattcaagggatatctccctgggggggtgtggttcttgtttgtggacccactggtttatttaccagaacatggctcttctatgctatcgtttttgcatcttgggtcaaaagacaacaaggttgctgaccaggtggcctctggtctggcatcctctggccaggcgggtcctgctgcacttgactgagaaagctggccgctcggactactgctacatttggttgaaatttctttttctttgtaacctagtaatgcaatatacctggaggtccatttatattattaagcttttaatacatttcataagtaatatcctacttactgaaaacatttactgtttaggattttcattagatcacttggataaatgcagaattcccttaaagttgacaacaatgaggaaacttacaaaacaagtgatttgtcaaaagctgaaatctgaaaaattatgttagttttggaggtctaggtaattaatacggtttggaaatagaggatcttagtgggttataagcacagtatatattcatgaatcgggctttctgggaagatgtgccacacactcaacagacctgatttcctttcttcctgcgactgcatttcccagcctcccctgcagctaggtaagatcatgtaatggaattctggccaatggaatatgagtggagttaatgtgggtaacctccatgatgggcaaagaaacacctcccaggaaaaagtcttgatttttcctcatgtctgctgactacatatcgactcttgaatagacttgagtatctgctgttgaaggatgcagaggctctgtcagcctgggcccctgagtgacttcatggagtataccatctctccaactggattttatctttcagtggttcagtttttctccactgtttccaccaaaataccatcaacagtaaggaagaacaatgtggaccaccagaaggctggagtgttttctgaagctgctcctgcttggactttggttggaagtcgtgattgtctgagggttcatgctggcgctcccccagtgaacctagctcacctaccctctgctctggctctagtctctcttcccttcttctaagggaggctactgctgtgctcagtgcggagctgggttcaaggagagctggggctctgaaggagtcgtggggagaaggctgacatgagtcctgagtgagtggacctgctctctctggccctgaaggggtcaagaggcaactgggtgtgtgggctgagtctttcctggccctgaagctggaagtagaggctttgtgcaggatcctcagcaggggactaaaagcctgtgctttcataacccgagccacactggcaagtgcgctgcctcctcccacctttgagacagttgccttcaggagcacatctaccagaagccaacaaagaaaagcaacagcctcttggaggggcctttctccagggagagaagggtgaggcagcacaggcagagctggtgtaggagacacaagacagtatgaatttcaaaatcagagcattgaaggagattcaaatatggcacaaaaagagtttctggagctaaaaatcataatttcctaactaaataccattcagtagattaactgaaaaagtggaagatcaccgtgaagatatggtcagctctcctggagggtcaaagggcagacagaccccttgatgaaaagggtggtatagagcaaatgtagaaagagatgggaagcaagtagaaatgggtaaggaacatgggatggatcctaaaaccttgacttgtgaatagagaaaccttgacttgcagaaagaggaaaaaatagaaccaacggaggagaggtgaccatgatactaacaataaaagaaaacttccctgaactg

SEQ ID NO: 972 - DNA, 132 bp, Homo sapiens
cagcatgtttccaagggctgtggctggtcatagccatgggatctccaactgcatgcaagagcaacctggaaagactttgacagcgcaggtcagtacaatacctgcaagctgccactcagctttcctataatg

SEQ ID NO: 973 - DNA, 173 bp, Homo sapiens
gattggaggcctttgtttgccgctcaactccaggaaaccacccgcgctcggcggccgccagcagtcctggaaggtgggaatgatctggagaccaggagtaagaagacctgagtttagatccccagcctggattcagttctgagtgcctcagttttcccttccacaaaatgagg

SEQ ID NO: 974 - DNA, 549 bp, Homo sapiens
tactttctcggagtctctttccagcctcccgactccagccacttggctggagaggcagcagggccgtcgccttggaaacgagtacacttccgacgtgctgaggtcatttcccgttcctcacggcccacgctacttccggtttcctttccctcagctattccatggcttttcgtgtggacaaatcgggaggtggtgtaaactggtttttggtgaaattcggctcggcctcatgcgaacctatctaggtccgtctctggagtggcctgtcatcgatcgcgccctccatcgctgagcgacacaagtggaaccccccaggactgcattctgcgaaactaccctgcttttcccccagttttggtctgtgaacacatttgggaaattcttctgatcctaccgctactctcttgagatgaagaaacagctcagatttgaccaagatcacacaagtaggagttgaggaattggaacccactatgactgactccaaattaatatagtgtttatagccacttacataataatggtaaaggttttatttttttcactata

SEQ ID NO: 975 - DNA, 498 bp, Homo sapiens
atgacagaaacttcatctgcattggcttcggcaaagcagaaatttattagcttacaaggccccatcttgtccatgcacctgtctgcttccttggcttcagagcattgcctccaagtcctctacagcacaactttcccttcagcatccaaccttatgatgtactgggatattgtgttgcccctctcccctctctacctgtgctgggctttaaggctgacacacctataaaccccaggagtggagggaagggagagtggattgtcattgagacatatgttctgcttacgtggagagtaacttgagcaacgttacccacctctatgtggaaacacaggtttatttagtatgttgaaattccagacataactatctgttcagtagcagtggttcctataagacaacaacttcactgttcattttgtgctagtagaatggaacttcacggaccttggagaagcatactccaaacactacaaatgatggttatactttggagag

SEQ ID NO: 976 - DNA, 307 bp, Homo sapiens
acagaatggcctggcacggtgaccacggagtgccctggcaccggtgcccgcggctgtgacggaaaaagggtgggaagaacagggaagaggaagcagaaacaggttatctgttcactctgatggtagagaagaccttaaatgacctgatggagctgaaaaccatggcgagaacttcctgccttcgatttctcacaagctcgggcataccacgaggcttggagactcaaaacctgaagagcctgcaatcagatttctcccttactattcctgctcattgtcttctgtggactaatactgaacatgaaac

SEQ ID NO: 977 - DNA, 673 bp, Homo sapiens
atccatgaagtcatgcttcacttatgcatcattcagaaaacacttcttggatactcactactcatgaatatgcatgcatatgacttgcagtcaaagccatgagttctcaatagcaaaactgttccagatatactcagagagttaaaatgtttaaaaaacttttttttaaagaaaattttccttttatttttgttgttttgttttgtttttttttagaagcaagatctcactatgttgcccaggctagagtgcactggccattcacaggcacgattatcactcacacactatggtcctgagatcctgggctgaagtgatcctcctgcctcagcttctcgagtagctgggactagaggcatgtgccactgcacctggcttagagtataaatttttgtgtcacacaagatatgaagaacatgcacaggcactggacccatctgtgggttcatctttctgtgggacccactaagggacccatctttctgtgaaaaagtcacaagtgaagtcctggccaggaattcaagaccaggctgggcatcatagtgagacctcatctctacaattttttttttaaaggaattggcttctagtcaatgctttgtcaaataccagtcttgggacattagatgaagctccttcatctaatgtttttctaatacataaaacagtaata

SEQ ID NO: 978 - DNA, 2097 bp, Homo sapiens
aaaatgtccctcagccaggtgcttagcccctggtaatctgaagctcaggcccttcctgatgccctggtctcctgcactgagctgtgtgagctcttcagcccaggtgggctccctgacactgatgcgcatagatggtgagcctggaggaagacttgcattgggcccaatggacccaggccagtggccatcagccaggtgcccaccctggtgtgctgaagcgcgggacctacctgttgtcctggtttcctacactgagctgagtgagctcttcaacccaggcggggcaccctggcattcaccagcatagactgtgaaatgggaggaagaattgtgttgggcccaatggccctgggccagtatccgtcagcctggtgtccagcccctggtgtgctgaagctcatgcccttcctggtgccctagtttcctgcactgagcttgtgagctcttttgcccagaagactccctggcattgatcggcatagatggcagcgctggaggaggacttgtactggggccgctggccccacatcagtgtccgtcatcccggcgtccagcccctggtgtgctgaagctcaggcccttccttgtgccctagtctcctgcactgagcttgtgagctcttctgctcaggcgggtcccctggcattgaccagcataggtaagtggatcctgctgggttcatgggccatgagccagaccacatggagtgactgagggtcagccttcaggacaggaagatttcctcggggagccaacctgaatccccaccgtggagggatgtgttagtcctccaggagggtggcttcctagggaatctgaccccaggaggacacctttgctgaagccctgcaggggtgatggtggtccaggctggaaagttttccttcagtctcatgtggggcagctccctgctgacattccgtgcctgcgtctgaccttgaggactgcccgggccacatgagtggggcaacaagggctccagggtgccacggggattatgagtggggctctccatccccggagagaggtgggcaatcaggcccatgtggtcaggcttgtagggttcggtggtggggagagccaaggtttccctgggtccattaccgtcactgtttcacctggatcccatcacatgggtccatggagggagagcatgtgtgaacaggcaccccttgctccctttcccacatgagcccctggttggacatatgtcctcctcctgtccccccagatggtggccctggaggaggacttgtattggggccactggccccacgtcagtgttcgtcagcctggcatccagcccctggtgtgctgaagctcaggcccttcctgttgccctagtctcctgcactgagcttgtgagctcttctgcccaggtggtccccctggtcttgatgggcatagggtgaggccctgtttggacccatcttccagctatctcaccagatggtgagcccagaggaagaccccgtggctctgggccagtgtgcgtcagccaggtccccagcccccagtgtgctgaagctcaggcccttcccaacgccctggtctcctgcactgagtgagctcttccgcccatttgggccctctgacattgaccggcatagatggtgagctcggaggaagacttgcattgggcccaatggagctgggccagtttctgtcagccaggtccccagctcctgatgcactgaagctcaggcccttcctggagccctggtctcctgccctgagctgtgatggtgagcctgaaggaagacttgcatcaggaccaatggaccctggcaagtgtccgtcagccaggtgctcagcccctggtgcactgaagctcaggcccttcctggccccttgatctcctgcactgagctgtgtgagctcttctgccaagggggggcctcctggcattgaccaacatagatggtgagcctggaggaagatttgcattgggcccaatggccctgggccagtgtctgtcagccagtttcccagcccctggtgcactgaagctcaggcctttcctggcatcctggcctcctgcactgagctgtgtgagtgcttctgcccaggcaggccacttggcattgaccggtatag

SEQ ID NO: 979 - DNA, 92 bp, Homo sapiens
ggatcgatgatgacttccatatgtacattccttggaaagctgaacaaaatgagtgaaaactctataccgtcatcctcgtcgaactgaggtcc

SEQ ID NO: 980 - DNA, 2323 bp, Homo sapiens
agaggcgcagcgggagggggtgctctcgggcgagctctccggccgcggcccccgcccctgcgctgtcgggcggggaggtcggaaaccccctggcgagaccacgggcggacgcttcccgaagagctgcctgggctgcagccgcggaagctgcgttctggggagcggggagcgtgctccggcgccttcgggccgctgctggaagccggaaccgagcccgggccgctgcccctcaccggacgccgcgcgccaccggccctccgcggggcaggggctgctgcgagctcgccgggcgccctttagacagtcgtccttgtctactccactaccaaatgttgaagttcttcaagaatcagtcctttggaggcatttaaggaaatctgtttctcttttggatcactagctgcaaattaagctaacagaacaggagctcagctggtcacacacagcaacgaatacagactttataaagttcagaaaagttaccaaacagtggtaaccataacaagtaccaacaatgaactatggggagggaggagaatctgatttccagagttaccacattataatactattcaaaatgtcacatttttagcaaagattacatgacaaggaaaaaccagaaaagtatggcccatacacaggtaaaaaaagaaattaatagaaactacccctgaagaagcacagacttcggatgtacaaaacaaagacttttcatcaactcttttagatatgctagaagagctaaaggaaaccatggacagagaacaaaaaaattaggaaagcaatgtctcatccaatacagaatatcaataaagagattgaaattgtagaaaagaaccaaatagaaattctggagttgaaaagtattataactaaaactgaaaattcactagaggtattcagcagcagactggagaagtcagaagaaagaatcaacaggcttcaagataggtcaattaagattatacagtctgaggagcagaaaggaaaaagaatgaagaaaaatgaacagagcataaaagacctctgggactctatcaagcataccagtatatgcatgaggggagtcccagaaggagaagaaagagagaaagggacataatatttgaagaaataatggtagaaaatgtcccagctttgatgaaatacatgaatctagatattcaagaggctcaaagaaccctaaatagggtaaactcaaaaagacccacaccggaatgcaaaagtgagctgggtgtggtggcacgtgcctgtggtcccagctactcgagaggctaaggcaggaaaatcgcttgaacccaggaggcagagattgcggtgagccgggattgcgccagtgcactccagctgggcgacagagcgagattccatctcgaaaaaaaaaaaaaaaaaaaaaaaaaactattgctgcagtcattcagatggaaatggggaaagaataatattaactgatttcaaaaaggacttgaagatgtgaatcatctattttgctgaagaaatcttaactctttgaaattactttttgttgctgttgtcatactcttaggtgccaaactgcggtaaattttttatcagtgaagtggaagcatgtgttttgttgttttgggaatttttatcaagtatcttcagagaagattatttcctgctttatcttcaaaaactggaaaggaagggtcaaagaaaagacagtagctggccggtcatggtggctcatgcctgtaatcccaacactttgggaggctgaggtgggcagatcacctgaggttgggagttcgaggccagcctgaccaacgtggagaaatgccatctctactaaagatgcaaggattggccgggcgtggtggtgcgtgcctgtgatcccagctgctcaggaggctgaggcaggagaatcgcttggacctgggaggtggaggttgcggtgagctgagatcacgccattgcactccagcctgggcaacaagcgaaactctgtctcaaaaaaaaagaaaagacagtagcttatgttcatgtcaagcacctctcatcacagtctagttccaaggaaaaaattcccagcgttttctacattcggtgctgcgtcatctgaaatcggcacattccatggaggaaggagtcctgctttgttgcatgtatcctagggtttaatgttggtaaatgagtcactctagcatttgtagaaggctccctgagactcctgcagcagtcgaccaagcccaaggacataattgaatctggagagtcctggggccttgttttgaaaaagacttgaaatacacataggaagaaaggcataaaaataaatgttcacttgtctctgctgtga

SEQ ID NO: 981 - DNA, 3566 bp, Homo sapiens
actactttgttgttcttcacaattagttggagctttctttggtcaacagcagatgtgactaagaaaatcacgctgtttcacttagagcagtggtcaccaagtgtggtccttaggccacacaggtcagcatcacctaggaactaggaaatgcaagttcttaagcaatcccacccagacctactgaattggaagtgctgaggatggggtccagcaatctgtggttgaacaagctctgcaggcatccaggagcagagctgtggggcagcagaatctgtgatgacagagaatgatgatgtatttttgccagcagatgcttttgctcctgttttgataccccaatattcggatgcagaaaaggactctgagcattgctgacgggtgtgctctgcacacctatctcttcaggatctgaataatttggtggaaagacaatgccttttctggaaaagggtgtcaggtcagtcatattggaggatgcaaatttccttatgtgatgggagtgagggttggggtagggcacttcacggagcattcagcagtctgcaattaagcatcactccaaggctttctgcataggtgatggctgtttctgcatcatggggcaaaccaggtgctagaacttcaaatgccaattaccaaaggcgcttcctgcggaggaaacctctctacaactcacctgacccagaaggcacacatttttttctgggttaacataaatgctaaaattgaagaaatgaaacattctaaaggcaggatcatgtaggtgagatcctttgcctcctaagcttttgtcctgccagtcttttctgtgccttaccatgatacctgtgctagaagtcttctgggaagctcttgtatagaacctccaactctggcagggttagtcttcagggatgcttcaggcagagaccttctcaatatctatccttgcgtcacatgggcattgagtataagacagctgagttagggtcctgttcagagcctgggatcagggaacccgcatagtctaaggaatacaggagtccctcttcccactgccaaggacaagtttgcaaacctgactagcgaagcccttcttctgattaaggcaacgtggccccctggttatgagtacagatttccaaatccaattagtgtggcttttaatacctgctttgctatccaataggcacaacaatgaaaaagttgcctaacttttctctgccttgaattcctcatccatataacagagatgaaaaaacaaaacaaaacaaaaatttatagattagagttaaatgagaggatttgtgaaacttctgatagacaaagcatactcaaaaaatgggagtttataaaaagaaccatcaactagcaatgcaaccaatttagacaattccctctccgggtgtctcggcgttctgattctaatctctgagagctggctcagaacacaagggtggcccgcttggcctctaaagtttgatgattctcaggtcctgtaaaaggacactgaggaaaccatgaaatgccaggggagggaccaaggcactgtaacagggaaacctgagcccacagcgccatctagcccgcttggcccacgccccgctgtgcctgcaagtgtaacccgcccaagcatcctcctctttttatttttttaaagtataattaccggagcttatgtttcacagttaatgctgtcaagccttttaaactaattggtcttttatagaaaatttaactgaaaattaacacatcttttaataacattgccttaactttaatggctctctgcctttcgtttataattgctctaaaattgtcattttccatgtcatagctgccattttttatatttgctagttttcatggtgtagatttttatttttagtatttttctttcgtgagggatgaaaatgattggatttttttttccctaccccaggcctgcctggcctgatgtgacagcagtggtctgtcctgagtctagcaggacatacctccatgtacccgactgacaccactgctagctcctctgcctcgggacggccatgtgccctctgtctccgtgtgagcagttgaaatggaggctcttgagtggagtgtaagaaatagggttatggagcaataaattgtttatgtaactaaaatcacatggcattaggttagcttggactgatagagaactcaggcctctccataacaccaggttcaagggtttggcccttaatgaaagtacaggaaagacagtaaatcatgtgaacccacattccagacggtcacaccctccagtcttactgatataacttcgtttctggcaaacaggccagctctctgatattaaagatgagaacatggaatcatatcttctgggtaccccaactcatctacccactaagctcccaaatattatctaagatgtgtgttcatgaaagagagaaagagagaggataagtgcacacaaacacataaatatatatacatatatgtacatgcatatataccaaaaaaatctgcttctttgtaattacatgtgatcttaagaaatacgtatctgctctgtgaaagatttttatatgcctttgccattctccaattagcagaaagtcataaggagtaacatcattcccatttaacagtagaaaaaatgtgcaagggctgccggtgagccaggaccagaagctacaagtcctaattcatggcccagtttccctcctccaagtcactgcctttgttctgaaaatatgaatgcactggacatgcaaactcctgccctgggcattgtggtgcagtgggcagagcaaagacacacctgccttaactggctcacattgaaatttctctctagctcctgggggatcctgcgcatgggtctctccataggctggcattcacgcttctcagatgtatcgtacactagcaaaaggggcctctgcttttctctgctctttctcttaacactgttataatatgctttttctttatttttccagattaggtaggccctgcaaacctaaagcttcattaaatcttgttttctaaaaaaaaaacgacaacactcccaacttgtgtgcattggaactcattagctcttgtagtagggttcccctttttctcctcagaaggaggtggctcctcactgctccttcaataacgatggttcagtgtgattggtatctgtttaggaaaggtccaaggctcaaggaaaatggacatcatgtgcacaacctcctaactcagaggacaagcaagtgaccggaaggccaaggatgctgtctgaccacagacattgcaatgcagacacataagattagaagcaaaacgcaggaggctggtaaggccaggacagtgggatgaaccaagcagggaagggacatgaatgaagcaggcctggtgggatacaatagagagtagtgtggactgtggctaaagggagcagctgctcagctcaagccaatagctgctttacgggaatctgggactctgccttctgactctaatttaaagaaggcaggaaccccgattttatataaaatcttattttaaaatattggcaacaaattcaatttaaaaataaaaacttgataaat

SEQ ID NO: 982 - DNA, 2926 bp, Homo sapiens
acacacttgcttgcacgcacacacttgcttgcacgcacacacttgccttcacaacccgctcgcacacacgtgcacgcacacccttgcacacgcacgtgaacacacacttgcacacacatatgcatgtacacagccttgcacacacacacgcatgcacacagacacccacttgcacacacatacacacacacactcttgcacacacacactgccgcacacggtttcccccattctgtctcctgactctgcccctgccagcctggatgggggacacacccttcgcctcctccaagggtcaaaatcctacctggctttcaagggctggttctaagatcctctgctcctccaaggagcctgtccccatcccccaaccctatgtgcacttgtgctttgtacctctccatgtgccatcacagccaacctggctttgtatccctaaccattcatttattcattcactcgttcaacaaatatcagctgagcccctacacggtgtcaggcaccaggccagacgctcatgatgcatggggcagggttaccagggtgcctaccttcctggagccttaagtccagtgggggaggcactacagggaaacctccttgaaaacaagacctcggtggtctggactttggggggtctcttccccgccccaacctttcatggaggctgaaacatgacagatgccaaacagccccagccagagagacgggctggcttcctgctcctctgtctcccagttcttttcccccctgaacaggaaccccaggtggatccgcatccctggacccacaggtgagcgaccccggcggcccacccacacgcacctgagggcagggcgaggcaggccggggctgcagcgctccagccaccaggcgactcagcagcagctggtgcatctgcgcgttctgcagcatcatcagttccagcaggtctaggaagcggggttcagcaagcccacgccgggcctccgagtccccctccccctgacacccctgtcccgggggtgaagaatgggttggcgggttgtgctgcggggactcccagaggatgtgcgaggcagaagagggtgagtggtggtgatggtgggggtggggtggggggacccgggagtctcaccttccttcacgcggcctggctgcgggggcgcaggtgggacggcccacgagaggggctgcaggaaggtgacccagggctgggggtgtgcgcggagtcagccaggtggggtggggggaatggatggggacacgtcgcgagccccaacccccccggccagtggcctccctaaccccgcaggggccaggttctctcctccccgccccgcggcctccctgctccctgccacgcctcttcctctcggtttggggctgtctctcctcgtcccccacccctccaggatctggcccctccagggacagctccccactctgccgtctcccaagctaaggcaggatctgctcccgggctcagccctcaccgtcgggactgcgctctgcggtggggagcgaccccagcttccgcccgccccagaggccatggctggcgccggttgccttggcgacgccgaggacgccaagagagaggggcttcctgccaggaaagagtggtttctggagcagaccaaggaaggaaacaccgcccgaattcacggaagaggctgaggactctggctggaaacacgtggccggcttctcgcctctctccttgcggctatttgccctgtttcctggccaaggtagaaagagaacaagccattttgctcatcatcaacaaaccttgaccaaggaagtgtctgcgtgtgcaatgtgccatctgaaccctggaggcataagcagtatggtcacttgtcccagcattgttgggaagtgaaaatgtatccatggaaagagagcagaaagataagactacgccccggggataatgaaaaagagaggacttgaccgctgagggatggagttccaaggaagtcagtccttgatggggccaagcagcaggggaagacgggcgctatcaggctggggacagagcccaagccaagacccaggtgtatgaatggacaggacctgagatgacccggtgggtcaaactgtctgactgtagaagaggagctgggcagagagcagaggtccagggacaggccaaggtttggaatgccaaggtttggaatttaggcttggccctgtgggtaatggagagctatcagtgggtttcaagcaaaagggagataccaagtgctgtggccagccatgtttcaggaagattgttcttgtccacctttgtttatgtcaaccacatttagaagtaacaaatgtctgatagggggtcaggtgcggtggcttgtgcctatagtgccagctactcaggaggctgaggcaggaggatcgctcaagcccagggattcaaggatgctgtgagctacgatcacgtcactgcactccagcctgggaaacagggtgagacccagtttctaaaacaaacgaacaaacaaatgtctgatggggatgcatcctcccaatagaatactattcaaccatggataatgtgggaatagaatatctctgttgatgtgaaaagttgtccaagacagttgagtcaaaaatatcagtaagcatagtaagatcttatttttgttttaaaaatcatatgcataagtccaggcacggtggctcacgcctgtaatcccagcagtttgggaggccaaggcaggcagatcacttgaggtcaggagttcgggaccagcctggccaacatggtgaaaccctgtctctactaaaaatacaaaaattagccgggagtggtggcgggtgcctgcaatcccagacactcaggaggctgaggcaggagaatcgcttgaacctgggaggtggaggttgcagtgagccgagatcatgccactgcacttcagcctgggcaacagagactccatct

SEQ ID NO: 983 - DNA, 719 bp, Homo sapiens
cacatcctgcatctccctccagcttcagggaggattccaggagtggcgtggggctagagtggcctgagagacttcagggacaagtgcctagcagagttccacatacatgaaataagatgctttgggaaatcattcttctttttgcaacgtcagtgacttgaaccagaaactgatattgactcacttgggctctgactctttccaagttacacatctgggggcctaaggaactgccccatgagttcccggagctgcgatgggcatgggacgggaagctttgtaagcaattaatcacacagttagcctcatctgatcaccactggccacgatcaggccctctgaaagtgcctagttggatgcttgccaatctgctatgccttggaggaaaaaatcatttcaatttaagaaaatagacacagaagcaaaaaaccaaagtgagcctggaaggtttgcctgtctgtgacagtctacagagcagctgtttgtgcctgtcacctgctcaggctctcacggtgactgcatggggagggcagggtgtgtgcattgatacctgccgtgcccagtgtacgccgaggtttgcccatgctgcagctggaaggctgcagaacaaaggttcgttccaacctctacacttgaattgcattctgcgtcatcatcctgccttctagaacaacatccaactccgtgggctgccttttaaaatcttgatggagggggag

SEQ ID NO: 984 - DNA, 630 bp, Homo sapiens
gggggaagaagaaaagaggatgccagtccttgttcctaggccaagacctgagccctgtaatattaatatttggatctaaaatcagccttccaacagcaacatgaagttggcagccttcctcctcctgtgatcctcatcatcttcagcctagaggtacaagagcttcaggctgcaggagaccggcttttgggtgtctgacccttctcaacacagcatcagacagccacctctattgactgaagttgacaatggagaataaaactcattacccctgctgaatccaggggcccctttttacagatgagaaaagttccagaaagacccagagacataatcaggtacctgcgtcgagctctgcacaggtgactgggactgcaaccccggagaccactgtgtcagcaatgggtgtggccatgagtgtgttgcaggatgaagagttatcttaaggatcatctttccctaagatcgtcatcccttcctggagttcctatcttccaagatgtgactgtctggagttccttgactaggaagatggatgaaaacagcaagcctgtggatggagactacaggggatatgggaggcagggaagaggggttgtttcttttaataaatcatcattgttaaaagca

SEQ ID NO: 985 - DNA, 422 bp, Homo sapiens
actgacaaaactaccgaaccatgttcctggttgaggatacctgaaggtcgacatttatctgggatcttttgctgctgctttggtatgacttctatcaagatagctttcgacgagaataactgggagatgaaacaggaagctctatgacacacttgatcgaatatgacagacaccgaaaatcacgactcagccccctccagcacctctacctgttgcccgccgatcacagccggaatgcagctgaaagattccctggggcctggttccaaccgcccactgtggactctgaggcctctgcatttgcgggtggtctgcctgtgatattttggtcatgggctggtctggtcggtttcccatttgtctggccagtctctatgtgtcttaatcccttgtccttcattaaaagcaaaactaaagaaaac

SEQ ID NO: 986 - DNA, 435 bp, Homo sapiens
gtttcatggatgtatcctgtggcttctccatgagataatgaagttcttgaaagtgggagtgtcatttacactcctacctgcagacaggtatactggcacttattacataccaaatcctattccatgagctgtgcatgtagtagcaagcactgatgtaggttctcatgtctccattttagagatgacaagactaaggcacagataagcacctgatacagagtataaagcattggctgaatgcgtgaatcttagttcccgcttttcaccttagcatcctgactaccgatgccctgaacacacatggtgaatttggctgaaatgaagcattctgtgcctgccccacaaaccaccaagggactgtgggtttatttgtctcaagatggtcaacactgctgttttcacattttacttgctgtcaaatataaagagatatca

SEQ ID NO: 987 - DNA, 656 bp, Homo sapiens
aatagaacaagaattgagaggtcattgactgggggagtttcctagacccagagaagggacaatggcacagactgagtcaaattcagttcctaggacttggataaaatttatattgaagccactgctttgaatcagcgagcagtactgatgtcaagtttgcctattaggtagaaattcaagaatgaaatgatgatgacccttttgggaacaactctgtgcatcctttgtatcctgagagcacttatcaaaactaatagatgagtaataaatctttcaaaacaaagaaaaccgatggacaaagtggtgaaaatatagcatttgtctcttattgccaatgcgtggcacataccaactcaattcatatttgcatgaatttatgaaagcaaggatgaaaaaatatgtactaagatataaaattagcaatattatttttaaaaggttgttaaaagtcaaggccttttgggccaggctgttgggctgtttcttaaggatatgatattttatttattttaacatattcagaaacacctagtggtattaaaacctctgagattggcagcatttggccttttagagaatgttgactctactttctttctctagaatttattctatcattttttatgacagtcttaataaagatgattgaaagactc

SEQ ID NO: 988 - DNA, 591 bp, Homo sapiens
ccaggctttggtaacaggatgatgctggcctcataaaatgagttagggaggattccctctttttctactgattggaatagtttcagaaggaatggtaccagttcctccttgtacctctggtagaattcggctgtgaatccatctggtccttgactttttttgattgaaattagttgataacgtcttccaggagacctacggccatcctactgatatgaaccagatcatacctgccctgatgggatgccagagaaagactgctgcaagggatcctctggaaacagaacagagggaagaagataccttccctgaagcccagatgttccagaagcctgcgcctcattcacaaagtcaccccaaaaatgccctagagtttggagttttgaagaagcgggaagaaggcctgagtaagggcctgggaaccaagttagatcctacttcagcatcagcacatgccagcgatggtgcacacaggtggagagcggcctgcccgtcttttccatggtgcccacagacccatttaggatgaaagatcagaaaattctctccatgtcaccgcttctgaaacatgtgaatattaatatttggtgc

SEQ ID NO: 989 - DNA, 686 bp, Homo sapiens
taacaaggacagcctgacttggatcccactatgcaggaaggaaggcgactcttccccgcacctcttgctacgattaggacttgcgacttggtgaaaacaggaatcaaaacttgggcctatttctcctgaggtctgcttgcctagaacaattcgtaacgatgaatcttattaaaaagagaaagtcctccccgactttatctttttccgcccagaatccgataaggaagacttgttctggccccctcagctctctgacctcacctaccagaggagagagtgggatcctctaacactcgagccgtcatcccagcactaggggacagtgaccagtgtggctcccgtggccagaacccttctgaagtttgggttgccctgtggtcttcgccttcaaagcaggccgccacttgaatccttctggaacggacagtgttgctgtaaacgccgcggaatagtatcttctaagtattcgtagcttctttcttgagggatctcgggaacgttccgtgtattaaccactaacgtattccaaagttaacttcgtggtaaagtcgctggggaaaaaaataactgctccagttccacaggtgattgaaacaaaagtgatctgtttcccaaacttccttgatggtaaagaatgacttggggtactaattaaaaataaaaataattgcgtcatttccaaccta

SEQ ID NO: 990 - DNA, 566 bp, Homo sapiens
agtgccacagaactatctgggcctcttcctctacccctccttgtgtgatcgctcctttcaaaagcaacagccaaagcagatgcaagggagatgcattggtgctcataaattcaaggagctgaaatggcaacagctgtggcaatttcaggatttcagcaggtaatcaaatgggtcaaaatcaaagttgatgatcagtcatatgatcttcagcagccctggaagggtgtgagttctcggcatcccatgcaggagctctgaatgtacaagaggtgctgaggagggagcatgcgccgaataccactgccttctttctgtgtccaagcaagttatgactggaatggaaagtatagccacccggggctgtcagtacccctacctactcaattgcagacatgttgatacagaacatgatcatcgaattccagtgaagccacagtgatgggagtccagcaagagtaaaagcaagtagaaggaagaagcccagaaaaaccaaagcgcctaaggcccatgaaagctgtaatgactccttaccatgaagttctctctcctgataccatgtggagaag

SEQ ID NO: 991 - DNA, 2463 bp, Homo sapiens
gaacccctactaactgtgagctcctgaggagtcaggcctgagtctgtgggtcatctagcacatccttaatagaatgattgcctggatgtgaccaccctcacccccaaccctcacacaccctgccagcatgcctcagaccttaccccagctcaagataagtctcagattgcaggatacctgctgcagggaacaaaggtgaatgattgtcttgtgagcctcctgttgactgattctgttttacatggctgcacagagcccttgtggttatttggggttggggtggtggcttctgtattagtcacttctgcatgaaccatttcactcaggatctgaggccacagttcctttcttagtcactgatacatctggcagacttgaaattaatcagacaaacattgttcatagttaacatatccttggaagtttctcagctataaggaagaggtcttggtggctagggaggcctttctctgtatcctgttctatccagtgagagcctagagggtgctgcccagccatattctggctagcctcagcggttctcctgaaaaaaaattggcatctgacaacctggatggtgactataggtagtcaaatccagctggctggtctcctgggggttagcttccatggagctgcaagtcccctgaaatgatactggcagtgttgggacagcgtgtccgaaggcctggttttttcagaactggtctcagcaaaatgtctcgccaacttctacagttcccataagtacatgataactgaaacacttctagagccccccagcaatgggcttgtgcttttagtagaatatgtgcttgcttccatttaggggtaagaaggtgggcccctcaccatatgctgcacagagaagagagacaccatcactcatttattcatttaacaagtgctttccaagccactactaggtgccaagcacttcctaggtcctggggatacagtggagactaagatggagccagttctttctcatagggatctcacagcttagtgagtgagaaagccaaagagtcaaaatacagagagggtctgaggggcccattttgagagccatcatagtggtgaggagtgtgagtgctagagtcaggctgatcaaatcccagcctgccattggctagccttgtgactttgagcaagttatcttacttcgtggaacctcaggtttctcatccataaaatggggaagttggatagggtattatgatgattgaaatgcatttatacatgtaaagcataagtactggctcagggtgagcactcaataaacggcagtttattaggcacttttattaggaagtgatacaccttgagcaaaaccccttagagtataaggcatagcattcttacatatttttaaaatttaaaataaaatttaaaacatcttgccctttataatcagtccgccacaaacaagagatggagaaatcacccttccttgttttgtatctatggggtgcaaacatttaatcctcccaactgtcaaaaaagtgagagtttcacagcctgttttacagcagaggaaactgatattcagagaggttaagtaaatttgcccaatgccacacatctaataaatggctgagctggaatcaaggccagctcttacttggctgcaaaatccatgttttatgcagctcctccactatcttggcctccaaggcagctggctttgaacactacccttgcagcccagtcagccaatcccttgctctcctgaagcttttgctggtgggccagccccacctgctttccttgtgcactctgacttggaccctgaagtgagaagagttggcacaggacatcttacttccctgaaaacagtacctggacttttctgtatcttcacatccattgggcattgggcaaatgggtcatgcagatgaaaaccatccaagataagagacatgggagtgaaattcacacccactctggctttcataccatgggtctgaacattagcccatggtgtttcttggccatactgacctgtgccatttcagctgcattcatctcagttggtgttgtctgctggctgctctttctgatttcccacaggagcagtaagaacctgaggaagagtagggtcagaggagtctgggagaatgaggaaatatgagagccccaggaactgaaaaggcctgtgagagactctgagcttcctgggaacaggcgcagtggctcaagcctgtaatcccatcacttcgggaggccgaggtgggcagatcacgaggtcaggagatcaagaccatcctggctaacacagtgaaaccccatctctactaaaaatacaaaaaaattagccaggcatggtggcgggtgcctgtattcccagctacttgggaggctgaggcaggagaatggcgcgaacccagggggcggagcttgcagtgagctgtaattgtgccactgcactccagcctgggcgacagagcgagactccgtctc

SEQ ID NO: 992 - DNA, 542 bp, Homo sapiens
aatccagcttcttcaggatgatggggaacatgctcctgaaatcgtttgggtaagcaattgctgattttagtcaaattccctcacctcacaaaaaggctggagtgcagtgacgtgaactcggcttactgtaacctctgcccccaccaggttcaagcaattctcgtacctcagcctcccaagtagctgggattacagtgaagtttctgaaaagtaatacagcaggcaaataaaatctgcaggagacagcagaaggaaaagcaattattctgaataatctacacataaaaaatatgattttgtttgatatttaccacccccttcaattttgaggagcgattacttccaaatgaggcatgtatgctgagttgttctttgactcatctataaagcttttagcaaattgagggaatttgaatttctaacatcaaaatgcaatgtacaaaggaggaaaaaatatgactcacccagcccccaaatttcatatttatatctctgattgaatctggttttaaaggcgaaattttaaaggaataaaaggcaaa

SEQ ID NO: 993 - DNA, 583 bp, Homo sapiens
aagactatactttcagggatcatttctatagtgtgttactagagaagtttctctgaacgtgtagagcaccgaaaaccccgaggaagagaggtagcgttttctcctgagcgtgaagccggctttctggcgttgcttggctgcaactgccgtcagccattgatgatcgttcttctctccgtattggggagtgagagggagagaacgcggtctgagtggtttttccttcttgatggctcaatgacagagactagctcgtaaactccgggccgtttccgggctgttcgctcctgcttggcaatgtcgcgagaaaggttttcgcctcctgtttcagcggtgacggcttttgggttttcctcggggtggctttttaattttagtcttggcgcgaggcgggggatgctgtgtggcacctcctattgtctctttttgcgttttctcccattctcgctccctcttttgtcgccgtttcccgcccgccactcccacccccagacggggtctccgggtctcttgttctgtctgccggccccggctggagtgcagtggcgcgatctcggctcctagcaacatctgcctcccgggc

SEQ ID NO: 994 - DNA, 3243 bp, Homo sapiens
aggccagggaaagaagtctggaacaaagggaagacagatgaccatgattgacttcattcttttacctcctgagatggcgatgggatgggggacacacaggaagaagcagggtccatgagcctcagcccttggcttaggaggaggagcagtacatttccacctaccttctctaagacatcttccctttgcttaggcttacctgggggtggaggtacacagggaaggtcaagcaggtgtaccagggcacctcctggggaggggtccagatggggaggatgctggacatccccagaagccccatccaggagatctagcagatccaggagctgtgaggcctggcagaagggacagaaggggcagggctgggtatgaagctcagcccgtcttcctaccccagagtttctagccttctcacctggggctctgtgggcactggggctgcttctgaaagctgggctgcttctttgctttcctttgcttcctcatcagcctgagggccatctcgctccacaagaggcattttttccaggatggcagccctgagaggatggaatgcaagtgtgcctctgtgtggtctctgggcctttcacaagaggcatctaggatgaggactaggaatatggagccctgggcacatggtggctcagaagtacccttctgatttcctaaaatgacatgttgttgctgattttcagatgaacaaggagggttggaagccagcttagcttcaattaacagtgggtgggaagctctcaccgtggatatggaagaacacagggtctcactctgtcgcccaaagctcactgcagccttgacctcccaggctctgatgatcctcctgcctcagcctcctgagtggctgggactacaggcacatgccaacaagcccaggtcctgggatgacccgagcaatcctgtgcctgctactctgctgcccaggacactgagagaaccagtgttctctgggaggaaaccactggtcatggtcttactgctatgccctctctgatccagggatacagcagtgaaaggtcaccccacctgcaggaaggggtcgctgactccagatatgctgtgttctgtggagtatcccattgtcaccagagtccggaggatgtgtaccagctggggtaccacctggagggagggcacaactttgggcattcgttctaatcctctccagctaaagccccattccttccccactgaccctgtcttccaggcccagggcctgccccttcaccagcccacctttcggaagtgcctgagggctgcagggcttcgttcgcagagctccgtgatcagcgtgatggtgcccagcaggatgcctggggtcagcgtcggggaagtgaatggtgggggccaggggcaagagagtctattgcgtgtgtgcctgtgtgtgtgcactacccttctcctgtgagctggggttcccatccgattttcaattcttctgtccatagacctgaagcaaaggatggggggccccacagccttaccatggtgacgctcatgaagcagttgggcacagggtgggaggaagacactggagagttcagggaccttccggatcatgtgcactgcagtcagaatagcctgcagaggtcaggggcctcagacaggggtcagaggagatggacccctgcatctactactatatagcacgcagcaggcagtgtgcaggagcacgtgccaggagtcccgccatctcaccttcttgcgcacgtagggactgggctgcaggagcagtttctccacctctggggccaggtctcggcacatctcagcagagcccatggtgctcaaagtgcacaaggccaggccttgtactggctgaatcccctggctcaggtcactgcagggtttgggaggacggtcagtcaaacctctgagaaaatcagtccttttcaatacccacaacaggcagtcccctgggatttccaaggtccctactctcccatctccctgattccaagtgattgccagaaccctctcacttcttgatgctgttggtaatgagcaggtgggcatcgtgcctctcatccaatagaagcatggcccccaggtagcccaccctcttgtctgtgaatctggaggaggcgatcagtttcaggcactccatctatagtgaagggggcagaccaggaagaggcaggggtgaaaccatagacactcacatccctgttccatcttcctctttaaaaccagattaacctgtggggcatcatatctcatcactctcccttcaacaagaggagaagcttaggaaattcaggcgttagtgggtaggaggaactaggagttgaggaggatgggagcggagaggaggagatgcctgccctaaaggaggctggccagagaatgaagggttcaggccagctgatgaccagtaggggtagcaatggggaaagaggtttgcagtgcaggctgtgaagactctgaaattgtagaatttaaaaaaccagggcataaacaggtgagagagtctgggactctgccccactagccttcatcaagctcaggagggaggtattcctggccagtacctgtccaaagtgggcggggtagcccaacatgtggacgtagagcagtttggccagctgccggtgcctgtgcactgggtccccgtcgcggaaggaggcccggatgtgggcacactccttttggatcacctcccgctcctgggcctgagtcttggccccgcgaatctcttcgatgaggtcctgaagcttcagcgaaggcaccaccatcctgactggcagagtccgggagtggagaaacactctctggtcgggcgtgcctgggctttcggcccaggcccgtcctgtgtcaagaccctaagagcccgggtcccacaggcagcggcagcggcagcgacagcctgcctaccccaggactccagcctcacctggcttctgcctcaactccgctcctctgccccccagcgcttcctggtacggggccgagcaggggttggtgctccgtgcggtccttccctctccccgcctccaccacgggaccccgccctcctgggccgactgcagagccttcctgaatcctctgacctcgggcctcaggctttagcggagagacagcatgataggcctggagttcttcaagaggcctcctcgcacatccttaccacccggagagcctcagtttggatttgaagccatcgcaccccaaaggagatgacaatccccccccttttttgaacttttttattaatatattttttttgtt

SEQ ID NO: 995 - DNA, 1071 bp, Homo sapiens
cagcggccccgcctccagcgcatgccctaccactactacgagcccaaggggccggacgaatgtgtcacctacatccagaatgagcacagtcgcaagggcaaccaccaccgcttcatcaccgagaaaagggtcttctcatcgtgggcccagctgaataaacacacctacgctccggcttcgtgtcctgtgtcacctgggtcgagcacagccttctggtccagcgctgcatgcggcctcaggaccacgtcttccggttgggggctcccagtaaagcgatcctcagcttcttcagcagccagtggccagtgagagcactgacacggctcccgggacctcggcaggatggaagagaagctgaagaaaaccaagatcatctttgtggtgggtgggcctggctcagggaagggcacccagtgtgagaagatcgtgcagaagtatggctacacccacctctccaccggggacctcctgcggtccgaggtcagctcaggctcggccaggggcaagaagctgtcggaaatcatggagaaggggcagctggttccactggagacagtgttggacatgctccgggatgccatggtggccaaagtcaatacttccaaaggcttcctgattgatggctacccgcgggaggtgcagcaaggagaagagtttgagcgacggattggacagcccacactgctgctgtatgtggacgcaggccctgagaccatgacccagcggctcttgaaacgtggagagaccagcgggcgtgtggacgacaatgaggagaccatcaaaaagcggctggagacctattacaaggccacagaacctgtcatcgccttctatgagaaacgtggcattgtgcgcaaggtcaacgctgagggctccgtggacagtgtcttctcccaggtctgcacccacctggacgccctaaagtagcaacgctggagccgcttccccagctcagagccccgccccaccccgtcctgattcgaggtcctcctggcctgagcgcagcgcctccaccctgccctgctgagcacagacggaggaagccgcttatcctgttttcatggacagctg

SEQ ID NO: 996 - DNA, 521 bp, Homo sapiens
gaaataagaatgtggcatatttccaaacagctggagtttggaaaatatttcctgttgatgcactcagtgccaactggacaaaggaattcttgagatagccttcaagtgcttcttaggactgcagtgcctagacaagctgactctgaccagtggtttcaggctcagctatacgtaggcctcagcagcttgtaacagtttccatctccaggccacaccccaggaagaaatggtgaaggcagacagctttgtagatttagaagggtgcttctttcttccctttctattggttttccccagagaagactacgtgtggatatctactataaaacatgtgtgcatggaaaattgtagggccagatgcttctggattaagagaacatgaccagttttatcatgatgaggatatggattttatccacagaacagggagggcaaaagcaagcctgtgggcacagtatgtgatgataagcactttggaaggatttgtgaatgatacaacggagttatacaaatctttggaa

SEQ ID NO: 997 - DNA, 998 bp, Homo sapiens
cttttacgtcggccttcgcgagcgtctgggcgggtggtaggaacaatggcgctgtcttcagtggcacagtggagcagctctgaagatgcaaagatacacgaaaaaacttccagaacatctgggagaatatttaatggaaaatcgcttggttaaaacctgacacttttaacaggtatgtgttgttttagtactttatgattgagcatagcatttaatccacacctagactaaatcaaattttttttgtcagtgaacagcgttctgagtgtggacgagtagccagtgaagataatgaatgtcgaatgtgactgactagcagcttcattttgaagtaggttgtatggcttaaaagttctgtagtatttgtactataatacttgccttttagcattaccttggtttgtagtcagtgtcacagaagtgcagtttaatgtattatgtgtacatatacaaggtctgattggtctaatcaatgatgaaacctatcccgaagctgataacctgaagaaaaataagtacggattcggcttctgagattaagaccagtaattcagaggtggagtaaattttgttgccgtgattttataacagttgtgttataaaatcctgggttttttttttttctgccaacagtgagggtcgctgtctgcccattgatagaggccagattgtcttggaagttccaaagttgcaacgatttctgtaagtggagtttttctgtttgcttagagatcagtgaatattgtgtccttggtcttatctgtgatgatcttatcccgaacctgaacttctgttgaaaaaaaaaaacttttacggatctggcttctgagatggaccgttataaggacaatatttttttttaatacttttaatgcttttacatatgttgtaatgtttgtagtcttgtaagaatctcgtgtttttccttttctagggctagtgccacgaggtttacttgactgttgtgtgaaaagctgataagaaaaccatccagaaaa

SEQ ID NO: 998 - DNA, 1799 bp, Homo sapiens
aattggatatgggtattgtagctgaaacgtcttgcgagctgagtcagggtcggggaagctgtgatggcaatgagaagtcaacacactgaggatggagagaaagaagatgagtctgggagagaaagagaatgattcttctggccgagggaaagcaagaatatctgttcctgcaactgcactgattctagaaacactctctattcgaactctcatgaggtgctgacctgcttggtgaatgctgggatctctggaagagggaggcagacatcacacaccagctggcaagtgggagctggcatgcaacatgccccaataccactcccctcctgccatccctatctcctaatggtgcctccttttggccaaacccacctttggctggagggcaacagagcccattgacgtggtccccttgcatctgctacctggggagaaaagcaggatggacactgaatctagagaaatgaagaaacccatccagaagaatactgcttctttatgtttttgtaggtgtacaaatcaggcctccccatgatattctaaactccttgaggaaagaagtggagtcctgggcttctgatgtagcctccacagtgctcaggggatagcgacactggcaccctatagatatttaattacatgtggactggaagagaccaaacagcttcctggtatttcaatcaaacccggtgctctagacctgtggctcactctgagcaaactataatgagttgaacttgaatctgattcctgctaagaaaggtttcattttaataggcagtaaggctatgagctaacaccagaattcattcgagttactagactcactgaaactcctcacaggatccatctttcatgttttctagattttggtattcttatctaaactgcagacccagaaaccctatggaccctacctttccaattatatttctgggaagagtcattctctgcagagctgaagcatgtaacagaaagttctcaacctgaaaaatataccttctgcgcccaagccccactttctgccactatttggtaatctcaagtgggtgaggtggtctctgaacttcagcgctctcatggtcagagccacaaggggttactgggaggctaaagggaagtggcaaacgtggctgagattcagaaagaaaagcagcaagtgtagagaggcaaggacttttccatcttttaaattccttaaaggaagccaaagttcattttccagtctccttcagatgcctctccaatccttcacagcagcgcacacataccgcagaaggaactcaccatcacaaaaagatgacagagcactgggggctggggtgccacttgtgttggctgagagcctggatgcatgtgaggtcaagcctgaccttgggaaagctgctctctggacattacttgctgtgccacatacacagcttgggtttctgaggaaacaacacaggctctaaggaggaactggaacggggcccagggtatatcttttacagcccgtacttttgaggaaaatagaagacaaaaggtttttaaaaaacacaaagtgtatacacgtatacacaaagtttacaagtttgtgtgttttaacatctactctccttaagaacaagtagacaggaaagatattacctgatatgggttaaattgtgtccccaaaaacatgttttgaagtgctaacctttggtacctgtggatatgaccttacttggaaataggtttttgcagacgtaaccaagttaagatgaggtcatatttgattaggctgaaccctgaatccagtatgactggggtccttatat

SEQ ID NO: 999 - DNA, 580 bp, Homo sapiens
agcagttgccctactgagttaatgtgataaggagaaaaaaaaaagggattgatggttaagagaatggttgaacacagcacatctcaggatggggcaatatttggtgagaaccatattggattctaccaaattacaaatatattccaggttggcctgatcactcactcaccactccctgcaactccatggagaagatataagctgtcaaaaatgtatttgtgagtctgatgagctctttcacccaggtgacaggggtttctgccatattaatattcttcttcttctccaccttttgtgtttcaatgctgggcctggagaaggcagggaccttggctcttccacggtggctgttcatcagcactcacacatccaccacaccggtttagtcgcacgctggaaggttttgcttggaatctgccatcagcaatgccgaggcctggccttggtggaaatggaggtgctgcttaacttttcttccaaaacatagtacaaccctagtcatcctgtcatgcacctgagacattcttattagcaagcttggagcagcagtggagtgttgaaaaaatttctctcaaacctg

SEQ ID NO: 1000 - DNA, 807 bp, Homo sapiens
tttggcaaacgtctaatgacacagagccaccattgccaatttcaccactgtctttcaccaagttgattcattttgaactggctccagcaatctactcagagttgacctcagagcaaaaaattgaacaacagctccatatgttgatgtgaactgtgactccaggagaacggtggaaaagtgtcttgatccaggaaggaaggggtatagagaaaatatgagtctcaccacactagaagcaacatatgcaaaatccatcaaacacaccataaaatcaatgtgggagtaacaacaccttggcctactgctccctgaaaagtttttctctcgtcaagtgatgacaggcgtacatttgtaaataaattaccaagttgcttttgatttgatggagaaggaagaaaaggattgtctcctggaagtatttttattgtcttaataggtaggataatatctctgttcagcaaactgagatcttttgagaatcttaacaaatgtatacccctccctctcaccttttcctctctggtgtatttcataggcagctttgctaactgactgcactactacaaatagattctgtcactttagaaataggatttttccttttataggcagattgatggactaagtgtcaaggttttagaacagtagcatgactggggcagacactataaaccataaatccagtattgacaaatgttctagccaatccagattttctatttgttaaattgcctttatgaagtcatacttgtgcagcacagaatatggaaaataattgacaagttctgagaagccagttactgagct

SEQ ID NO: 1001 - DNA, 684 bp, Homo sapiens
atgtaccgcgtgacgtgagagcggagcccgggtctgcccgggcgcgggcccgcggccacggcgtttggatcccagatcccagcccccgcgctcagtccgggcttcctgaccggcgctctccgcgtcccttctcgcgcgcccttacctggggctggggaggtggggacagagccgggcgcagtcgggggcacagccctgaggcggggctgagggccaggccgccacgtccctggaccctgaaaacgggctcggacccccgctgcagcgtggactccggtgtggccgcggggcgtgcaacccggaccctggccagctccgtgtcctccagacctttactcatgtccccgcatcgccaggccgagctgcaccttcggtccccgcccgcggcagccgaggagaggagagcaaggcccagaccggggaggaacccacacagcctctgtgctccagcctgcttgaaagacaaggtctacctacaacgcagagatgcacacattaaggacaatgaaacacccaagtgttaggaaccagaataatcagccctaatagaggggaggctgatcagggagggcctcctggaggaggaggcacaacatcagggtgcactgtgatttctggagacccaaggagttctggtaaatgacaggtgagaaaaagaaaatgtaataaaatataattgaaaac

SEQ ID NO: 1002 - DNA, 335 bp, Homo sapiens
gaacccacatctaccatgaatgaataaatggcgacctggaagcatacttctggtagcaatggggacacgggtcaaaggggacttgaggttatcagctttcagaatgaagacacataatccctattagagtggaagacttaaaatcgagtttgagacccaccttctgaaactgcaggctcttgggagcctgatttccggtgaagagtgttgctgctttgcatttttcacacttgaacacagtgaagaagatgaacattaattaggattatagtgccatggaggcttactgtgctgtgagaactcacaagaaataaaatgccatttctttttttgga

SEQ ID NO: 1003 - DNA, 304 bp, Homo sapiens
aaagacgatgcgaggcatctgggctgattacttggtgtctgcagcttcaagaaccaggttcaattcccctccaagtgcacctgggctgcctcctcttaatcttgctgcaccgcagcagcccctccccaacccggtaaaatgtgggcgataattcctttcttacaaggcccttcacagatacctgctggtctctcccacttggccaaggaaacacttgtggttaataagtctcagaaaagttatgtgaaagttaaaagtaaaactgacagcagctgaaggatgggggggtgggaggtggtgacgg

SEQ ID NO: 1004 - DNA, 1103 bp, Homo sapiens
ttcggcggtcaacgcgctttattccgaggggcttcagatacagatgaccccagccctgcatccgcccggaaggcgtccccttactcccatggggcacctcgataccagctgccctgccctgactcacttctcagcacccatcttacggcagtcggccctggcctcagacccttgggttcagatcccaggccctcctcctactcactgtgagaccctaggcgagtcccttagctcgggagcctaattccgcttcattaacatgggggtaatttaactacctagctagacggttgcaaagggatcagttcactaattctcaatgttggcagtgcatcacattgcaaactccctgcctctgctccagagctgatcagaatcaataagggtggggcctgaaaatactacatccaaatttccgagaagcacagtgtctagcatacccctatctctccatctggggttactgtcactctcaggaagaaataatcacccattattccttcaaccaggaaaagagatgtccagggcacagcttggggccccagaaagtaaccacggaggtcaagatcacaaacccgtcagtgtccagggcatggcctcgcacacatccgaggttttcaaggaccatgaagtgccatggcaagcatcctggcctgagggttaggagagctggatctcaggctcaactttagcctgaattcggtgcgtcatcttagacaaatctggtgagctctgagggctggggtaaggttgagaaactgtgggctcctcagggtggggggtgcttagagaagatggggcctctgagtcctcagactgggggtcttcatcgggttcagcatcctccccaggcccaagccctgccagcctcttgctggcctcccatagccgatgggctgcccggtcgtctcgggcagctggaggcacctcttccacatggcagttggcaaaatatctcccactgaggggctcgatgccctcttgtagagcacaatacaggggtgtctgggcaccccctcttggtgcccggagcaccagccaagccaatgggcgcaaaagtgggcgcagccatccaggaacatggcgcaggaacagctccgagt

SEQ ID NO: 1005 - DNA, 2110 bp, Homo sapiens
gctctcagagaagcttccagtggaaccaaaggaatacagatggagggcctggggagagatggcctgaggggacctgcagaagggatttacctgctgcccctcccccaggggagccaggagactgagctgggctgtaaacactccgtgcctggtgcagcctggtctgcacaggctgagaggatgctctacttctaaaccccataaggaaaaggcccaggagggacggggatgttgctgctgatagctaaaaatgatcaaattcttaccatatgccagaccttatgctggacaattcactgacattatcccacgtagtaggcagaattctaacgtgacccccaagattctccaccttctgtgtaatccccaggattgtgaatgtgatggatttcattctggtaaacaggttttgttatatggcacagatgactttaagacagggaggctttaaatctgtgactagcagaagacatatggaaggcagagattcaaaatataagagggatctgacgcaccactactggcttgaaaatggaggggaccacatggcagaggacgcacgcagcctctagttgctgagggtggtctccagttgacagcggcaaggtaacaggggcctcagtcctacaaccacaaggaactgaactctgccaacatactgaaagagcttgaaggaggagcataagcctcaggggtgagatcatagacccagacaaagccttgattttagttgcctaaaaccccgaactgagaacccaggcatcttgagtgggactcctaacccacagaaactgtgagattaataattagtggcgttttaaaagggttaacttatgatatttttaaaattagcaacacagaaaatcatacaccccatgtgatacccatcataaccctctcaagtaggcttcaccattttatagacaaggaaacaaagacccagggaaattaggaatttgcccaaagtcacatagcctgtgagtggcagagacaggtttaaacccagctatgtcttgactttatggtcagtgctcttcattgcctcatgcatttcctctctgtatgagaagagagcctcagacacatggtgaaaagagtatggaactgtttctgtctgcctgggtgtggatgtgcagaagggtcagaggacctatgcttttgttttggttttaaatggtgaaaagacatatacatagaatcaactagctggattcagtttagatgatcccaatatgccttcttctctccatcaggcctgatcagggtgttggctttggccacagcagtgtcactgagcttcttcacagcctgtttgatctggtgcttgttggctttgacatccacaatggacacaagttgtgttgttgtcttctatcttcttcatggctgactcagtggttgggggaacctgatgatgaattattggtcaagcttgtttctcctgggagtgctcttccaagcatatttctgctgcctgcagagccacactgtcttgggccactggcaggtgggtgatgtgtggattggatcttctttttgtggctgtggacacctttaagcactgccttcctggccttcaaagcattcgctttggcttcagctttgggaggggcaagaacttttttcacttttggtgccataatgtgaaaatgaggacctatgttgagccctcactcctctagaagccagctgtgtgccctcggcaaagtcaattaatcactctgagcctcagtttttataatctgtatgaggcctactaagaatttctgcattataacccttgaagggctgcagctgatgatcccataaaagtgtgtgaggggccactgtgaatgaagtccacagggcagacagaggcacctggatgtcatgtagatatcattttcttttcttgatgactgccaatttcaatgtcctctgcctataggctggatatggtcactctgatggcttatttggaggaagtaattttaaataggttttttttttagaggaaatgattatttattacatttattgaaaaactacagaataagatggaaggtaatttttctttttttcttgaattctttaaaagttagttgactattaaaagccaaagtaataacaa

SEQ ID NO: 1006 - DNA, 677 bp, Homo sapiens
accagatggtgagcccagaggaagaccccgtggctctgggccagtgtgcgtcagccaggtccccagcccccagtgtgctgaagctcaggcccttcccaacgccctggtctcctgcactgagtgagctcttccgcccatttgggccctctgacattgaccggcatagatggtgagctcggaggaagacttgcattgggcccaatggagctgggccagtttctgtcagccaggtccccagctcctgatgcactgaagctcaggcccttcctggagccctggtctcctgccctgagctgtgatggtgagcctggaggaagacttgcactgggccttctgtgcgccggccagaggccatcaaccaggtgcccaggtccttttgtactgaagcttgggcccttcctggcaccctggtctccttcatggagctgatggtgagcctgaaggaagacttgcatcaggaccaatggaccctggcaagtgtccgtcagccaggtgctcagcccctggtgcactgaagctcaggcccttcctggccccttgatctcctgcactgagctgtgtgagctcttctgccaagggggggcctcctggcattgaccaacatagatggtgagcctggaggaagatttgcattgggcccaatggccctgggccagtgtctgtcagccagtttccca

SEQ ID NO: 1007 - DNA, 3177 bp, Homo sapiens
aggagttggcggcggggcccagccgaggtataagttccacagcttcacccttgtcggtgtgatatgggcgtgaaagaagacataaaacaggcttcccgagtagaacctgccaccccgggctggtggggacgcggcaccaggccgggccgggggaagccgctcggacagtggtccttggtgaagcagagttgccagccatctatggatcctaactaaattggtccttgtaatactcggtattatttgccaagatattgaaaaacctctaaacagtgagaaggaagaagacaaagatgactgcaattactgcttccattccacattgtactagaagtctggccagcgatttaaggtaagaaagagaaacaaaaggcagctatattgaaagagaagaagtaacactgacttacttcaaaggcaacataattatttatctagaaaatcagatgaaatttgatctagtaaaaacactactataactaagaacctgttggccagtatacaagatactatctcagtatacaaaattaattttgcttctgtgtagtagaaacaatcagagactaaaataaaaggtatagtttataataggataaaaatatgaaacctttaggaataaatttgacaaaattatgcaaaacctgtacattgaaaactactaatggcgtccaggaaatgctacccccaaatatggcatcttgtcacttcagaaagtaataaaacctaggaggatcactctctgaccttctccagctcttctcccctgaagcaagtcataaggtcttcattcaagaggaaagaaaaatccttactctgaagacacggaaacacagagaagactgaacaaactggcctttctaagttcccccaagtttattactattagatcacaccctcattgtccaataatatttctcctctgctatccacttcttcatcaaacttagcataaaatcctctttctttgattcttcatttctgaaagctcctatgttatataaaacttatattaagtaaatttgtatgcttttaccttcttaatgtgtcttttgttttaagggccttagccatgaacctagtgatgggtgaggaaaagctgtttctttttgcccatcctacaaactattcctgagagaaatttaaaaggacttaactaagtagagatacatgccttattcatgtgttggaagactcaatatttctaacatgtcagttgtccaaataatggaattcaaataaaaatttcagtaggttattttgtaaaaattggcaaccagactttaaaattcatatggaaatgtaagggacctagattagccaaaacaaaaccaaagttgaaaacaagaatgaagatggtgaactaacactacttgatttcaaattattataaagctatagtaatcacggcagtattatattgcataaatatagagaaacagatcagaatagggagctcagaaatagactcacaaatatatgaacaagtgatttttgatgaaggcacaagagcaattcagtggagaaaagtcttttcaagaaataatgtgtagaaaaattggctagccatatgccaacaaaaaagaagaatgaaaaagaaaaaaaaatgactttgattcataccttgcatactttgcaccatatacagatattaactcaaaatagattctggacctaaatgtaaaacttcaaacttaggagaaaatctctgaagtctctgtgaccttgggttaggtagagttcttagatatagcaccaaaagcttgatttatgaaacaacaaattgataagttgaacttcattaacattaaaaagttctgctcttaaaaaacaatataaagaaaagaagaaagcaagccacgtactggaagaaagtatttctaactcacatatctgatgaaagacttgtatccctaatatatataaacagtctcaaaactcaataataaaaaactcaaacaacaaaattaaaatatgggccgggcgcagtggcttacacctgtaatcccagcacttttggaggctgaggcaggcagatcacttgaggtcaggagttcgagaccagcctggccaacaaggtgaaaccctgtgtctaccaaaactacaaaaattagccaggcgtggtggcgggcacctgtaatcccagctactcaggaggctgcggcaggagaattgcttgaacccgggaggcagaggtgcagatcacaccactgcactccagcctgggcaacaagagcgagactgtctcaaaaaaaaaaaaaaagtgcacaaaagatttgaacaaacatcccacaaaggatataaaaatgacaaataagcataggaaaagatgctcaacaccattgttaattagggaaatgcaaattaaatccacaatgaatacttagaaccagttcctgagatggagatttgcatacaagaactttattggggagcactctcaggaactgcaccagtagggaagtgaggaagcagaaatgggtggagagagtagttgaactctggtacggttgcaacacacttattagaatagccaaaatttttaaaaaattgacaacaccaagtgtttgggaggatgtggagaaactggagctctcagatactcttagtggtattatcaaaaggcacaatccatttgctaagcagtttggcagtctcttggaaatttaaacatactcctgtctactagcctcttagaaacttatagaagctattttatggcgaaaacgaggaaacaaatgtccattaatagtgaaggataggcaaatttgtgcatatccatacaatggaatattacccagctgtgaaaaattatgaactagtgataaatgcaaatacatgaacaaatctcaaattaatactgattgaaagaagccagagacgaaaaagtacatactgtatgattgtatttatataaaactcaagaaaatgcaaactaatctatagtgagaaaaagcagatcagtggttgcctcgtaagagaaatgggagaaagtgttgagggagaggaaggagagattacaacgggactcaaggacaagtttcatgtttgcagatgatggatatgtttactgtcttgacatgtatacatatatcaaaacttctcaaattgcatactttagatttgtgcagtttatcatctgtcttttatacttcagtaaagacgaaaagaaaaaaaaaa

SEQ ID NO: 1008 - DNA, 788 bp, Homo sapiens
gactcgccagcgagggatgccgccggccgccgggggccttctccaggaccaggagagaaatcctctctccgcttcacgacgcggccactcccacccctgagacgcccacctggcggactctgagggaggattcggctgcgtctaataccacctccacccctcatccctcacaatgcgcggaaaaccacaggcggctgtgcgcgcagcgtcggctcagccaccgcagctcctcccctgggatgaaaaagcactctgacgtcttgaaagctggcagctctctgtttggaaaatctctgcccagtgaaaaaatgtaccgacaagattactaagtaacacagtcttctgggaatgccttatcaatgccagctatttgaagagcacccaaagtcaaactagtgctccgcgctggcagtctggaaaaggcagatgtatatttcagtcagtaatggatattaccaccagcatttaatcaaggaagcaggaagtgatccatcactgctagctgctatctacaggaattctgtctacaggcagggcagaccagtcagccagtatcttcccgaagtaccttggtcttccaccatccatcccactgagagagccgttcctctaatgaggcatttctaagcagctgtccattgaactctaccccttgagatatcctgagaaataggaatctatggttcctattgtttggaaagtagtatatcttccttgaagattcacaatgcgtattaatatgcttagggctctgataagtcctgtattaaaaatgcttgttaaacttt

SEQ ID NO: 1009 - DNA, 851 bp, Homo sapiens
cccctgcctcccttgtctccacccgcctagatcactgtctcacagtcattctgtggaacttcctctgtgtctctcactggagccgcctaacttcctctcccacctcccttcatcaaggagcagtctcatgcccaggagctagaaatgtaggctttgccggcattggttgagctgtgctgggccctaggcagcgatgactcaaacttgacccttaacccccaggcaggcaagttttcactgggtcttacccgacgtgagcccccactcctccatatggacctgttttggaccaatgaggcatcctcttctgtagtcctcaacacgcggagctccaccactcctgagcagtgtgacctcaggtgcttgctgcagaggcatcgggggtctctggccagaggtgacatctgaagcaatcgggatcctgtttggttttgccacatccgacctgccgcccagctggggcaagacagccacgcgcggcggatgcaccggccctgaactctttctcgagtagtccccagagatttcaggaagagagagaagaggtaaagagaccagaaacaaagtcttctgcaagcaaagaactgcaacaggccccagctgttaggtttgaggggcgtatggggcaggcgactgaactgcagagttggagccagaggtaccattgctgacccctgagcccaggagccttgagaatactgacagtgttaataataactgcaatcatccaacatatgatgctagaataactggacatctgtgtgcaaaaatattaaacctataccttgcaccttatcacaaaattcactcaaaatagatcatagaccaaaatgtgaaacataaaactaaga

SEQ ID NO: 1010 - DNA, 1183 bp, Homo sapiens
gggcccggggggcccggagcagtttccagtggccaggggtacgcgcggccggaggggcgccggggccgtactcaccgcggccgttctggttgggccggtacacgctgcccacgctgaggcggccctgctgcgcgccgttccgctccccacccggcgggggcgtgtcggagctgcgcaccggcaggagctcctgcctgcctggatgaagaggaggtcaagactttgtcccccactccgcaagataccctctctgttccggagcggtgagtccctcccctgttaggaccttgtctccctcaggactggacctggatcctgggcctgcagtcagattgccagtttcacttagaggtggaaatgtcaacccactggttggaatgggaaggtagggtgtggggtcggggagtaccttcatttctatctgcccaggaggccagccgcttcctgcatagcatttccttcctgcagtatgggaaggaccaggctttctcagaccacagaatcttgagagccatttccacgtggagcaagtggtggctaccagccttgggtctacataactagggcctcatccctggcccaagaatcctgctccacagccttcttgtgtccctgtaggaggagaaacacctggcaacttaaattttttaaaataacttttttttttttttgagacggagtctcgctctgtctcccaggctggagtgcagtggtgcgatctcggctcactgcaagctccgcctcccaggttcatgccattctcctgcctcagcctcccaagtagctgggactacaggcacctgccatcacgcacggctaatttttttgtatttttttaggtgagacaggatttcaccatgttagccaggatggtcttgatctcctgacctcatgatctgcccacctcggcctcccaaagtgctgggcttacaggcgtgagccaccgtgcccggccaaaaataacttttaaaaacatgagtatagcatacacacacacaaaagtccacaaatcctaggtgtaccacttgatgaatgatcccaacgtgagcacacctctggattaccacctggatcaagaaataggacatcacagcagctggcagcttccaaggagaagctctggaaagttctgcctgtctcagcacctggctggatcggaaacgagttttctttaaccagattt

SEQ ID NO: 1011 - DNA, 579 bp, Homo sapiens
gcggtggggctccgcgggcagcctggttgcgctgcacccggacggggccgaggggacctgaaagctgcggcagagcctgaccgcgccgttctccagaagagccccggccgcggctgagtcgcgctccgggtgtggacggagccggagcctccccggggctcggtgaggacacagggcccaagccccggaccttcaagtcttgaccgagcgcatccccggcccttctgcgcccacacctgagtttttgtctgtaggagtttccgcagtttgctaagaatcgacatctagaggagtactcaccacttaattgatgatcaatacacgttccttgaaagaaccgatagcatgcgatcgatacagagcatctgcactgggattgtccgccccgcctgtcagggaggcctcgggggctaatggagctgagggtatagtcggccttggaccctcgcttttttcctttcctgtactatgaagataactgccttatctccccctcaggactgttttggggattaaataggacgtttaaattaccaacgctctttgaaataaacatttcaaaattattataacccttta

SEQ ID NO: 1012 - DNA, 748 bp, Homo sapiens
ttgacgactaaagctgagccggcgccgccacgaccttgggcgggtggtcggcctctgccctgagcaggaagtagaaagtctcagcagacccttcctgagggccgagcaacagtgtagtggcgtattccacatagcaaacaggcagcatttcttcctgtgacaatatggtgtaagacaaaattgtggcctgccatgaagttgtgagagaaaagcatccctcatttcttcaggaaaggccactgccgttccctccggctcctcttctcaggagtttgtgcattcatgaggtgaattccttggaagatgagggccaagtcttattcttctcagtctcttctgcatctagcagaagaataatggttgcacagaaaatcttggttcagtggttgagtgaatgaatggatgaacaggctcttgcacacaaagaagagacatgatgtatttgcatccttccctgcttcagccagttttctgaagctcagagggacaccttgtattgctggatgataaaaacaggagcaaagtgatgaagtgctgacaaggcaacaatagaacatgagagattcactgctgtgtaggaagagatcttcggtgaccatgtagcctgaagctctcattttgtcatcgagggacaccaaaactcagaacagatagagtcttgctctgtgacccaggcttgtgtgcagcggtacgatattggctcactgcgacctccacctcccaggttcaagcaattctcctgcctcag

SEQ ID NO: 1013 - DNA, 1721 bp, Homo sapiens
attgcaaggtccgatccattcccatcagtgttgaggagaggaagagaggtcttgttggagaagagtagccatcgaggaggggacagtggtgctagggcttccttcagcctcccagcccccagcacaggagagggagacagcagagagggccggagggagggagctggtggcttaaaatggagccgtttacaaccccgcacagcaaatggagccattgggaggacacttgaccgagaggagagcattgcttgagccaggggtgccgtctgcaggacagagacaggaggcagtgttgtttccagggcatcgtggaccatggcacaggtgagcaatttaaaaaggtgattggaatcatatgttagaataatgaccttagcagtcaaaggctcctggaatttgtcatttaatttcatattttaggtggactgatctgtaatttagttaatttcacatctccatctaggaaaactggagctctgcacaatattttctgcagacgacaaagtattcacccaaactatttctcatagtaaaatgtgctctttgtccccagagaactgctgaatactacataagatctgtgtaggagccatgctttaacaacaacaaacacctcagacacacaacaaccctttcctccctcgataaagatactgaaaagaatctggtctctggggtgaggagtaggggaagcaggtgcaagcaagtgggtgcagaggagtgggaagatggcattttgtgtaggaaagaatttaacgttgcccaaagagaggtctggcttttgtcctcaccttctgggaggtgaactctaagcccttggaatatcatgcctgattggagtttgtttgcctgggatccttgtgtcacagaatggtctaaccatatgatttagggtagatgctggccacactggataggtttagggtaggggttggctgtgccagaaagaccaacaatgtgacttagggtggggtctttgggtcacgtggtatcagctgactctggaggagctggagagggagggcagtcacctgtgtgatggagccgcaataaaaactctgaacactggggctatggtgagctgccctggttggcagtactccatgggtactgtcacacatcaatgccaggaaagtcatgcttttcatgattccatggggaagaggacagtggaagctccatgtctggtaccttcctggactatgccctatgcccttcctcccttggctgattttaatctgtatccttttgatgtaataatgtgcaactgtgagtatgagagcttttgatgagttctgcgtccttccagtgaatgatcaaacctgagggtggtctagggtaccccttgcagttggtgcagcaataaaggtggtcttatgtggatggtgctccctttaacttgacaggtggctaactgatatggttggctgtgtccccacccaaatctcatcttgaatttccatgtgttgtgggagggacccagtcgaagataattgaatcatggaggcaagtctttcctgtgttgttctcacgatagtgaatacatctcacgagatctgatggttttaaaaacaggagttgccctgtaagagctctttctccctttgcctgctaccatccatgtaagatgtgacttgctcctccttgccttccaccatgattgtgaaacttccccagccacgtggaactgtaagtccaattaaacccctttcttttgtaaa

SEQ ID NO: 1014 - DNA, 1057 bp, Homo sapiens
ggaaggttctggattgcagggagaaaggcaattaatgagtgattactatttaaagacaaaacccctgtcaaaacagcttgaccaaaaaaaaatgtgagttttttttgttgtttttttttttaactcacaacttgcagtagtgctgccagcaaaaatagtgggtggtaattctgccagctaaaagggtgccgaaatgcagttgggtgagaagaacaactctgtcccctcctccattccctttcagcagtgactgagtgggctacctcccaggcctgttcctgcagtgccccttggttcttcatgagactattcagggtgtttttctgggcaagtaactccaaaggcaagcatgagagcagctcgaagacttaagaacatgtcacaggactgggaggaatggaaggtgtcacatcagaataacaatagctcttgacaaatggatgcacagccattcccataaacaggaatttccctgcaggaaaacttcctcccatgggatcttcaatttgatgaaagcaattacaggacaaagaggctgatttcccctgcatctgctgaggtgaagccagtgctaaggtttcacttatactgaagaaattcttggtttcctccagaacagaacaccctgaaatatgaagctaatctcatcagagggacaggcaccttaccaagatgaaaattccttaagatttatttgcccagccttaaagcttagacaacttattaagagttacaatagttttgtcaaaaatgacagccttcagtgcttcacagaagccataaaaaaaacaaagtccaataccgatgtgttttcgttaactgaaaatatcagtgaccaacaaatacaaagtttcattagaaatcatcaagaaaaaccaggcttgggaagataaattccttgatgcccatgttttaaaaatgatcctgtctgtggattaaactgcaagtcatttgggccattgctcagccgaaaagacaaatgtttcagagtagaaggccactctcctctggcctcaatgaaaacgcatgtcaccttccggctacagacccaggtggc

SEQ ID NO: 1015 - DNA, 564 bp, Homo sapiens
acaaaacccggaaggaccccgccgaaggttttctccggttcgggagagagacggagtcccgctctgtcacgcaggctgccaggctggcgtacagtggcgcaatctcagctcgctgcaacctccacctcctgggttcaagcgattttcttgcctctgcctcctgagtagctgggattactggcacacaccaccatgcacagttccttgttcaaaatgccaagaacctggatgactcatagtcaagaccctccaccagtaacatatattggcgagccagccaggagcttggaaccctcggtggacagtgcctaagcacagaggcaaccacaggtttctaacagggccactctctggtgaaactgaaaggtttctgtgtgaaagtgcctgaccaccactgcccaattcagttgcaggaatttagccaattcagaggtcttgttctccataatttggaattttccttcggatttgatcaagttggatagagttggtcaaacccaatgggaaaaagatgaaaacaacaagaaacagaaacaaacagcaacaacaacaacaacaaaaaca

SEQ ID NO: 1016 - DNA, 1151 bp, Homo sapiens
cagaagtgctgaacccttgacgtgccttatcttatttgctcctcacaacaaatcttatgagatgcatcactaccagaagttgtccagaaagaactgtgaccgtatgttttaattaaataatttttcatccagtttttttctttgcatataaagaaacagaatcctgacatctgattgaattattggctctcctgatggttgcacgatggctgcagcagttccagatgtcccatcgagacacaaaaagatcccagatggaagatgccatctcctcctatgtgcctctttttaagagtgccatgccactcaaacagccaatggaaaggcccacgtggcgagagctaaggcttcctgccaacaggcaagtgaggaagcccagtcagctgcctgcagtcctgacccatgaagagcctgactgaaagtgaatgagcaaccctgagctaggacaacccagcaaggcccatcctgaattcctgcccacaaaaactctgagacagtaaatgttcgttgttttaaaccacaaagttttgaagtaatagattaattaggtaaccaattgggactgcagtattccttcagggaacttgaatagtcattctgtatatggaaattgtacacatcttaaaattgctggactaaagtgagaagagactgtcttgagtcaactggataaagtggaaaaaaaattaatttggaaatcaatagaattctggccttggctttgtcactaagaaacacttataagtaatttcacttctcttgaaattatgatcattatctataacataaaggaactgagctaaatgttatctgatgcctctttaggctctcaaactccatagatttatgacatgcttgaaattcactttgtttcaccctaattcagagctttgtttcactagctctagaattagatgccttgggtttaaattgcaattcagtcacttatttaaataattgtacttggatgagtgatgttgccattttaagcctcagtttccccatagattcattgagaagatcaaataagatgatgcagataaagctcttagtttgtggggacacttagtaagtgcttaataaatacaggcagttgtgttatctatgttgtagcagcacattttgtaaaataaaacaaagttgaaatcaca

SEQ ID NO: 1017 - DNA, 413 bp, Homo sapiens
gcattagacagaaagctggaagttgaaatggtggagtccaacttgcctggaccagcttaatggttctgctcctggtaacgtttttatccatggatgacttgcttgggtatggagagtcggcttgactacactgtgtggagcaagttttaaagaagcaaaggactcagaattcatgattgaagaaatgcagggtttttaatgaccacaacaagcaagcatgcagcttactgcttgaaagggtcttgcctcacccaagctagagtgcagtggcctttgaagcttactacagcctcaaacttctgggctcaagtgatcctcagcctcccagtggtctttgtagactgcctgatggagtctcatggcacaagaagattaaaacagtgtctccaattttaataaatttttgcaatcca

SEQ ID NO: 1018 - DNA, 598 bp, Homo sapiens
tgttcaccgttcctttgagttcctcgtagattctggatattagtcctttgttggaggtatagattgtgaagattttctccaattcatcgccgttttttagagtttttctcactaaatattgactaacggaacctagccctgtaatgttgatagtcgggcgggtcggaagtggctgaggtggagtatctgcaggagaagaactgaggctcctaagtgcagcatcttgtccaagaggtttcgtcccaatgcgtggggaacatccggattgtgatgtttagctctcagtttctaacttgggcattctagcaactgtatttctcatttaatgttttatgggcacacatgcagaggagttttcgtcactgaaaagcccgacaacttcccctgccaacccattggaattaaaaaaacctcgataacctcttaaacacatggaaatggaaccctgagcagagattgtggtgggtatctgtacagcctaaggaccttgggtggacctggccagcaatgggactgttactgatgatgcatcacatggtgtcactaggaaaagcatagatcagctgaggatcaatcttcccaccaggtgtgtgtgaaa

SEQ ID NO: 1019 - DNA, 358 bp, Homo sapiens
tttccttttatttttagaaataatctattcagttgttaaaattccttattccgggatgggtacggtggctcacacctataaccccaacactttgggaggccagcgcaggtggaggttgcagtgaaccgagatcgcaccattgcactccagcctgggcaacaagagaaactccagctcaaaaaaaaaaaaaaaaaaaaaaaaagaaagaaagaaaaagaaaacaggaggattgggctatttccacatcagggtcccatttaatacccccttaaaacatcagctttccttccagagactgatcattgagaaagcagtactgctgacatagatcctgcctacttataaatcataatggttg

SEQ ID NO: 1020 - DNA, 602 bp, Homo sapiens
ttggccttcatatcctgggaagagataacaggacagtgagaggagtggagaaaacacctcccttctttcattgctgcctgttccattcagggagcccctgtgactccaaaagtggcctttctcctctgagcatcttaacagaggtttcagtagagggtactatactaaataatgcagccctccttctttcttccatgccagagaagtttacaaaacaaggaggaagacttctacacctcacagccaggattccctgctctggctctcggctgctgcctcagggtgaatctgttgctaggtcatcgtggcatctctgcaggatgacagtgttttggaaacagtgagaaacagatactgagagaagtccctagcctgggtacccagagagccttttaccttcctctggtaggactcaatcctggtgttggttaccctagaccaggccagtgaaacagagttgaggtctcactaagttgcccaggctggtctggaactcctggactcgagcaatccccccgccttggcctcccaaagtgctgggcttacagacatgagccaccgtgtccagctgacaggaggtcttaacatccttgtttttcgga

SEQ ID NO: 1021 - DNA, 599 bp, Homo sapiens
ccgtcgaggattaggatcgagtttcttcgatcgtgagggcaattattagtggcctctagccccccagatggcatcttgaggagagagaatccacgctacgagaactaacatagtggacatcgcagttgtccgtagccgatttgcgggttacggagttgttgcaagtaaagaaggggaaatccgagcgttctcgcgttggatttcctccacgtgtgaagtgggaatggtagtgatatctcgtgctatctctgtcaagggcaagaaggagaaggaatttatttgaggccctacgacgtggtgcggtggctcacgcctgtaatcccaacactttgggaggccgaggcaggcggatcatctgagatcgagagttcgagaccagcttgaccaacatggagaaaccccgtctctactaaaagtacaaaattagccaggcatggtggcacatgcccgtaatcccagctactcgggaggctgaggcaggagagtagcttgagcccaggaggcggaggttgtggtgagccgagatcgcgccattgcacagcctgggcaacgagcgaaactccatctcaaaaaaataaataaaaatttttttaaaaaag

SEQ ID NO: 1022 - DNA, 339 bp, Homo sapiens
gcaaaggggaagcaaggcaggccttacatgggagcagaagagagagagagagaggggaagagccacacttttaaaccatcacatctcatgataattcaatcacaatcacaaaaacagcatggggaaaacgcctctgttatccaatcacctcctatcagtcctgacactagagctgagttaaccacagccaccagaagttggggacagggactatgttggctaaataactcatttgtgctcttttgcgtttttttgatggtgttgtatataaaattatatttttttgttcatggtttttgggaggaattttgaagagattaaaaacttcactatcatgat

SEQ ID NO: 1023 - DNA, 1782 bp, Homo sapiens
gtaatacgtgctcattccatcttcaatggaacaaatgaatgttgctgcatcgagcatctgtttactcacatcttcattctctaaccactctattgattctttatcttgacccgcaagcatacttacgtctcatcttggtgacaaagagccctcccgtggcccaggcacctcgctgaactgctctcttatttttaaccgcactgactttgcccactcaacacttcaactctgggcttttggtcctccaggcatcttgctgaaactactctcttgaaggccgccagtgagttcctacaaagtgttactgtctgtctgaaatccctaaaatttccaacaatttaaaattgttctcccctttaacattttcttcttgattgcccgcatttctgagcgaggcataatgatgtatgcaggggctggatgccatggggcctggggtttgtggtaaaatgtcggtaaagtaaccacacagcaaaagggatagtatggccctcatcttaatctctgctgattatttatgaatgggcacgggtgggggttcattatatctgcacttttgagtgtgtatggtttattttaggtcgtctcactctgtcgcccaggctggagtgcagtggtgccatctcggctcactgcaaccttcgcctctgggttcaagtgattctcctgcctcagccttccaagtagctgggagtacaagcatatgccaccacgcccggctaatttttgtgtttttagtagggatggggtttcccatgttggccaggctggtctcgaacttatgacctcaggtgatcctcctgccttggcctcccaaagtgctgggattataggcatgagccactgcacctggcctgtgtattgtttgaaaatttttatgaaaccaaaaacaaacaagtttgctttcatccttgggcattgatggcgtccgacttgcccagtggcctcctgcctccttgctgctgctttgccggagttcaccttcctcctgcttctcccgggctctgcctttgccctcctttctctctctgcagtctctcttggctacttccgccctgccaggatttcagtgatcattcctgtgtctctaattcccacagccctcaattgtctccccgggtccctggtcctgagtttctaatgatctgccgacatcccctggatatgccctgtgtactctctgtctcacacctgacccttttgtatatatacagttcttacttgtccttcaagatcttgcttgagtgccacttcctccaggaagcccttgctgatttctcagtcagatgtcatttctcccacttcattattcttaaatgacttcagcatggtctgaccttattacttagattttgtattctagttttgtgggaactgttcctggaatactagggttgtgttttccagagatccaacatgttgtgggaccttgtacactggaggcaattcatactttgtagaccagttatgatggtaaatggaaaaatctgaaaaaaaaaaagctgagaaaaatggttccaccaaagtattcaaaattgcttttcatatttcagaattgacatataagagtaaaaagaaagtaacccaaactgcagtggtgctgtggggctagcataaaatgttaatcaggtaaataggaactcaaaggaaatttaccaaattgagctcatttacatgtgtaattacccatctgtgatcattctactgttctatttattctgtctttctcctcccacactgggttaaaaatactttgtattaaagattttcttcataaccaaa

SEQ ID NO: 1024 - DNA, 259 bp, Homo sapiens
atggtcaggccctctgggctgttatataattttccaggagacagtggagtgaagcagacctcagcgtcccagaggtgtgctgccacgacagtgtgctttccttgcttggaagtcttggaagcttcttacctcctctaagaagattttccaggcaaaacccagatctgctttagtgacttcagaagaaaaagatctgagggaggatgagaagccgatagccaatggttatgaggatgagggtcgctatccaaaggattga

SEQ ID NO: 1025 - DNA, 3512 bp, Homo sapiens
atttcttagggcactgccataagtgttttacacggtggctgcaccattttacattcccactgaaggttccagttttgccacatccttgccaacacctgtttttaataattgccatcctaatgagtgtgaagtggtatcctgctgagattttgatttgcatttccgtaatgactggtgatgctgagtatctgtttgttggccgtttatatgtcgtctttggagaaatgtctatttgggctctttgtccatttttcaatcaggtgtgtgtttttatatgttctgggtattcacccttttcagatatatcattttaaaatactttgtcccattccgtggattgcctttcactctgttttgttctttgatgtacagaagttgtttctttcttttagttacctgtgtgtgcctctggtgtcatatctaagaaatcactgcctcacccttttcagatatatcattttaaaatactttgtcccattccgtggattgcctttcactctgttttgttctttgatgtacagaagttgtttctttcttttagttacctgtgtgtgcctctggtgtcatatctaagaaatcactgccaaatccaatgttgttaaaagtttcccttatgtttctcctaaatgttttagttttagctcttagtttaggcctttgatctattttaatttttatatatggtgtgaggtagatctagcttcatgtggatgtccacttgtctagcaccatttgttgaaaagactgtcctttctcccttgaatggtcttggcaccatcaaaaatcatttgacccatatgtgcaagggtttatttggggatttgctattctgttccattggtctacatgactgtctttgtttcaatacaacaccattttgattattgtagctttgtcgtaagttatgaaataaggaagtgagagacctcctacttggttccctttcaagatgattttggctgtgtgaggtctcttgagattccatatgagtttcaggatggaaaaaaaaaagccactgggatattctgatagagattgcatgaaatctatagattgctttggactatggacatcttaaggtatccaatccataaacacgggattgctttctatttatttgtgttgaccttactttctttaagcagtgttttatggttttcaagtacaagtcttttgcttccttaagtttattcctaaatatttcagtttttttgttactattataatggaattttcttaaatttccttttgagattgcttgttattgtatagaaatatcatggatttgttgtgttgattttgtaaactgcagtgttactgaaatttttttttgtatatgtatggacactaggattttctacatataagatcatgtcatctgcaaacagataattttgcttcttcctttccagtctggatgccttttatttctttttcttgcctaactgctctaagactccagtactgtgttaaacagaagtggtgagacagggtatttctgtgttgttcttgatcttaaagtcctttcagtcttattgaatatgatgtttacagtgggatgttcatatggcctctattttaggttgtttccttctattcccaattgttgagtttttatcatgaaagggcatgacattgtctcaaatgctttttctccatcaatggagatcacatttttttccttcattctattaatgtaatagacattacatttattgacttgagcatgttgaaacatctttgcataccagctgtaaatcttacttggccatgatgtgtaatcctttcaatgtcccactgaatcctgttggccagtattttgttgaatattgatttaaaaaaatcttgatcaggaatactgatgtgtggtgtttttttcttatagtgtctttgtctggttttggtatcagaataatgatggcctcatagaatgcatttggaagtgtcctttcctcttcagttttttggaagagtttgaggagaattgatttaattcttcagatgtttgccagaattcccatatgaccctgggcttttctttcttgggaggcttttctttactacttcatgctcttgactagcataggtctgttcagattttccatttcttcatgattcaatcttgataggctgtgtgtttctaagaatttgtccagttcatctaggttatccaattctttgatatgtaattgctcatagtactcttaatcctttttatttctgtaaaatcagttgtaatgtctcctcctggtttttagttgtttttcttagtcactcttagctatcaacaaactcttggtttcatttatttttctctattgcttttctgttctctattttgtctctgctctaatctttattattattataatcatctccattctgctggctttgggttgattgctcttctttttctagttctttcagatgtaaatttagggttgacttgagatcttaatttgtttaataggtgtatttacagttacaaatttccctcctaccactgctttgactgtacctgtttttttgtatattacatttttcatttaccacaagatattttctaatttcccttgtgagttccccattaatctgctggttgagagcgttgtttaattttcacataattgtgtacttttcagttttttgtctgttactgatttctagtttcatcccactgtggccagaaaagatattttatttcctcagtcttttgaaatttgttgacttgtttagtcatctaacatactgtctatcctagagaaaggtccatttgcacttgagaaaaacgtgtgtactgctgttgtgtctgttaggtccagctggtatgatgctgttcaagttctgtcttgcgactgatcttctgtctggttgtcctatccgttactgaaagtgggctactgcagtctcctactcttactgtagaactatccatttcttcctttgattctgtcaatgtttgtttcatatattttgggctctgatgtttggtgcatatatattacatcttggtgaattttcaaactttttaaatttcaacatgaagatgaaattataggatgtctgggatttcctttgaatccgtggggctgggagtaactataaatgaaacaagattggccgggaatttgaggctgcaaggataggtacacacaggggagtgaagcagggcttggagcagatggtaaagattgttggcttttccagccatggggctctcttgccacttggcagtagtggcatgaagccgccaccagggggccacgcaccagtgcatgtggctgtgttccaaactttttggacaataaaatctgaatttcacatacttttcttatgtcattagatattacccttttacatcttttcactatttaaaaatgtaaaaatcattcttaacatttgggctgtgcaaaaacagctggtgggcccaattttggcctgtatttcacttgccaacctgatttatacttttgtatctatttgacattttccattaaaagttatataacact

SEQ ID NO: 1026 - DNA, 408 bp, Homo sapiens
gggactgtgacagcatcacggcaggacgggtgctctgtaatcgttacgcaccaggtgtcttgggagcagaggaggtggctccccacaaggtcacgttgtgctgatgtgatgggtgagaacggtgaacgccaggctcgtcaagctttccaatttgagtcttcagctatccagaagctgtgaaggggcagccccgtcaccagacacaatccttgcaaagggacagcctccatcagcctccatggaagactgacagacccacacaggggagaataaatcaacctgcaaatgaagcattcagccagcttgggagttctgctttccattttaaattaatacaccggccttctggtttgtacatcggttgtcctcccgtgggtctggctggtaggcattggtttctgaggggct

SEQ ID NO: 1027 - DNA, 358 bp, Homo sapiens
gcacccggggccaggagcggaagtccgaggggaccccacggcggaggagcggcagagcccgggccccgcgggagagagaggcgggagcctctcacactaacagttgatcggcggattccacttactgtgactatccagtctcctctaggcctttggacatctgaaaggcagtgttaagagcccaactctggagatggactttggctccaccaccaagtattaatagctctgtgacttggggcaagttacttaacctccctacaccacagtttccactgctgtaaattggggatgatgataataacagccacctcacaaggttgcctggagatttgattaaatgaaataattagcatgg

SEQ ID NO: 1028 - DNA, 547 bp, Homo sapiens
aagcgctgctggcacaccgggcactggtagggcttctcgtccgagtgcgacagcttgtgtcggttcaggtggtagacgtcgcggaaggccttgccacacatctcgcaggcatggttcttccggatgcgcttccccgaggcggtcgtggtcaccacgccaccggcggccactgcggcagcgccgccgccggcacccgcctctccccctcccccgccggctccgctcagctggggcacgctcaggaggctcaggggcaccatggtcggcatcttcatagcacccgaggggacccggccggccttggctcccgtgtggatggcttcgtgcctccggagattgtagccgttcttgaactccttggcgcacagagcgcagatgtagggccccttgctctttgtcttcttctccaaggcagacgcgaccggggccacggcgaccgtcgaggttggggctacgacggcggtggccgccgccgcggcgatagtggcggcggaggcgggggggaggaaaagagggcgccttgcgggccgcggagcgccgcggcgac

SEQ ID NO: 1029 - DNA, 1031 bp, Homo sapiens
ggaagtggcttaatgatcctgaagggatttcttctgatggtagcttttgtattatcaaacttttttcagataacatcttctgagtcataaccagcctggcagtatgatggcctagatgcagagaaaacagctccttggtgaattgataagtaaaggcagaaaagattatatgtcatacctccattggggaataagcataaccctgagattcttactactgatgagaacattatctgcatatgccaaaaaattttaagcaaatgaaagctaccaatttaaagttacggaatctaccattttaaagttaattgcttgtcaagctataaccacaaaaataatgaattgatgagaaatacaatgaagaggcaatgtccatctcaaaatactgcttttacaaaagcagaataaaagcgaaaagaaatgaaaatgttacactacattaatcctggaataaaagaagccgaaataaatgagagatgagttgggatcaagtggattgaggaggctgtgctgtgtgccaatgtttcgtttgcctcagacaggtatctcttcgttatcagaagagttgcttcatttcatctgggagcagaaaacagcaggcagctgttaacagataagtttaacttgcatctgcagtattgcatgttagggataagtgcttatttttaagagctgtggagttcttaaatatcaaccatggcactttctcctgaccccttccctaggggatttcaggattgagaaatttttccatcgagcctttttaaaattgtaggacttgttcctgtgggcttcagtgatgggatagtacacttcactcagaggcatttgcatctttaaataatttcttaaaagcctctaaagtgatcagtgccttgatgccaactaaggaaatttgtttagcattgaatctctgaaggctctatgaaaggaatagcatgatgtgctgttagaatcagatgttactgctaaaatttacatgttgtgatgtaaattgtgtagaaaaccattaaatcattcaaaataataaa

SEQ ID NO: 1030 - DNA, 2394 bp, Homo sapiens
tctatggtttccgcggctcgctagaaggagtgcggtccactggaggtctccctacattcttcctccattatctcactgcctccggtggctgctgggataccggaggactcgggtcccggctcgactcagtcctccagccgcccggggaatacctctagttcttcccggccgccgccgcctccgccccgccgcttcctcctccgcctgccggcctccttcgccccgccccgtccgcgcagctcgtccggcccgcccgcaggccagcttctctcgggagcctccacccaggcgcatggctccatgaagcaagaggaggaggcagagcgcgagagatcccgtccgccccagccgcgtctgggccaggagaaaagcaaaaccatattcctgctgctgtcagttttgatgcactgagaaaacttcagagacctaagctttttccagagaagagaagctttactggtgttccagccctaaggctcatatgacattaacagacaagacacttttcagaaagacaggcaacgtgttggaccttccggagcttctcagaagacagagggttttcttttgaggctgttgtacagtggcctgattatagctcactgtagcctcgaaattctgggccgaaatgatccgcctgcctcagcctccaaagtagctgagactacaggctggtcttgaactcttgggctgaagagattctcccacctcagcctcccaaggtgttgagattacaagcatgagccacctcacctggccaagagctagttgttaaaagagcctagcactacccccctctttcttgtttcctctctcaccatgtgatctccacacacattggcttgccttccctttctgacatgagcggaagcagcctgaggccctcaccagatgtggatgccagtgccatgcttcttgtacaatctgcagaatcataagctaaatacacctcttttctttataaattacccagccttgggtattcctttatagcaacacaaacggagaaagacatatgcaatttgccattttaatcatttttaactgtacaatttggtggtattaattatatttacaatgttgtgcaaccgttaccaccatctattaccaaagccctttcatcaccccaaatagaaactgtgcttattcagcaaaaactcccattttcctctccttccagcccctggtaacctctggtaacctctaatctacctcctgtctctatgaatttgcctattgtaaatatttcacataatggtatcatacactatccttttgtgtctagcttatttaacttagcataatgttttcaaggttcatccatcttatagcatgtatcagtattccattcttcttttctatggctgaataataattgtatgtatatactgcatcttgtttatccatttatctttttgtttgtttgttttttaaagacagggttttaccatgttggccaagctagtctcgaactcctgaactcaggtgatccgcccaccttggcctcacaaagtactgggattacaggcgtgagccatcgtgcctggcctatccgtttatcttttgatagacattttggttgtttctaccttttgtctattgtgaataatgctgctatgaacattagtgtacaagtcactgtttaagttgttgttttcaattcttttgggtattgtattaggccattcttgcattgatataaagaaatacctgagactgggtaagtgccaaagaaaaaagggtttagttggctcacatttctgcagtctgtacaggaagcatagcagcatctgcttccagggaggcttcaggaagcttccaatcatgatggaaggcaaagtgggtgcaggtatgtcacgtggcaaaagccagagcaagagaggaagtggggaggtgctgcacacttttaaacaatcaaatcttgtgagaactcacaatcttgatgacagctagagatggtgaagccactcatgagaaaccactcccatgatccaatcacctcccaccaggccccaactctaacaccggagattaattacatttcaacatgagatttgcataggaacaaacagtcaaactatatccggtatatacttaagagtagaattactgggtgataattctgttttacgttttgaggaattgccaaactatcttcctcagcagttaaaccatttacattcccaccagcagtatactaggtttccaatttctccacatgttcaacaacactagttattttttcttctaattatagccattctagtaggtacaaagtggtatctcattgtggttttagcatcttttgagttgcttattgaccatttacatgtcttttttttagagaagtgtctaagtattttgtccattaaaaaattgagttatttatctttt

SEQ ID NO: 1031 - DNA, 2129 bp, Homo sapiens
ttcggcaaccccggccgaacggccacccagaggctgtgctgagctggcgcagcggcagcagcatgagccggaccctcgcatcggccgtgcccctgtcgagtcccgactactacgagaggctgggccaactccagcacgggctgcgggacagtgaaaagaagagattggacctggaaaagaaactttatgaatataatcagtctgatacatgcagagttaagctgaaatatgtaaaactaaagaattatctgaaggaaatatgtgaatctgaaaagaaggctcatactcgaaaccaagaatatttaaagcgatttgagcgtgtccaagctcatgttgtacacttcaccacaaatacagagaagcttcaaaaactgaagctcgaatatgagactcaaattaagaagatgctatgctcaaaagatagcctgggactaaaagaggaactgacagatgaagacagagaaaaggttgcagtgcacgaggggattaactcaggaacagccatgtcaagaggattgtatcaaccagcaacaatctttatgggccgccaaatgtcagccatcttaagcatgagagatttcagtacagagcacaaatctccccagcccacaaagaacttttcaattcctgacccacattcacaccgacagacagcccagagcagtaatgtgacagacagctgtgtagtacaaactagtaatgacacacagtgcttaaataagtctgacaacatagatggaaaggcatctcttcagattggtgagaaaatgccagtcacagccagtgtattgtctgaggaggaacaaactcattgcttggagataggaagtaacacacgtcatggcaagagtaatttatctgaaggcaaaaagtctgctgaactcaattccccgttacgggaaagattaagtccagagaacagaaccactgatttaaagtgtgacagttccagcggatcagagggagaaatactgacacgggaacatattgaagttgaggaaaaaagagccagcccgccagtctctccgataccagtttcagaatactgtgaatctgaaaataagtggtctcaagagaagcattctccttgggaaggtgtttcagatcatcttgctcacagggaaccaaagtcacaaaagcccttcagaaaaatgcaggaagaggaggaggaaagttggagcaccagcagtgaccttaccatttcaataagtgaagatgatctgattttagagagcccagaaccacagccaaatccaggtggcaagatggagggagaagatggaatagaggccttaaaattaatccatgctgagcaagaaagagttgccctatccactgaaaaaaattgtattttgcaaaccctaagctctcctgattcagaaaaggaatcctccactaacgcaccaacaagagaacctggacaaacaccagactcagacgtaccgaggcacaggtgggtcagcatgttgccaccttgaaagaacatgataattctgtcaaagaagaggcaacagcattattgagaaaagcccttacagaagagtgtggccgtaggtcagctattcacagtagtgaatcatcttgcagcttgccatctattctgaatgacaatagtggaataaaggaagccaaacctgctgtatggctcaacagtgttcctacaagggaacaagaagtttcaagtggctgtggagacaagagcaagaaagaaaatgtggctgcagatatcccaatcacagaaacagaagcctatcagttgctgaagaaggccacccttcaggataatacaaatcaaactgaaaacaggtttcaaaagacagatgcttctgtgtcacacttgtcaggtttgaatattggcagcggtgcattcgagacaaagacagctaacaaaattgcttcggaagctagtttttcatctagtgaaggaagtcctttgtcaaggcatgaaaacaaaaagaaacccgtgatcaatttaaaatctaatgccctctgggatgagtctgatgacagtaactcagaaattgaggctgctttacgccccagaaaccataacaccgatgattctgatgatttttatgactaacgtgctgtgacattggtttcaaataaagtctttaaacaaactaaaa

SEQ ID NO: 1032 - DNA, 661 bp, Homo sapiens
gccgcgcctgaagctcaacttccgaggctctcatcaatctacgcttcctttggagcgtgcagccaccaggtggcagccgaggccacgggcagacagaaaagctcccgaaactgaaggactgccaggcagcagagttccggagggctcccaggaccttcaaccagaaagagacagagcatatgcgcatatccctgcaaggaatgtactatagagccaattttaccggcaaaggaatggaagatctgaaaggctaggcgatcccacaagcatcgaggagcaggctggaatttgaaccaatcggcatgattcccaagctcaagcttttggccacccctgcactgccagggacaaaaaaaaaaaaaaaaaaaaaccctgggaggagagccaagctagggagtcaagaccctccagccaggtctggatgggaggcaggtgcctccaccctggtcccagagcaagttctgctggcttcagccacctgacttccctgtgaaggtgggtagaggccagagcagactgtgtgtgattctggccccagccccagcacctctacccccacctttactacccctaggctgcgggaagaggctttgcccagcaatagtcctgatctaatggatccttgaagcacaataaacagatagtatttctgcatgtgtca

SEQ ID NO: 1033 - DNA, 564 bp, Homo sapiens
agtgtgagatggaagatgatgtcgcaagggtggagcccagttgacaggaaatgtttctccagaagctgaaaagctgcctggtaaaggcctttcataaaatggtctgcgtttgggaccaggaagacagaagactcctcaagaagagaactggaaccttaacccacttcagacttcttcatgtctgaagcttatttccaccatcccattgagaaccaaagaagcgagctccttggagaatcggctcccacctggaccttctgtttatccttccaatagctgctgcattcatccttcccagctaatgacacttccagcctttcgtgtttcaaagtatcacggactttgcaaaagattccaggtttctatggagcagatagtacttttaacaatcaacatgtgcattattatttcctcctaaggcatacttagacatcaatgcatgctacagcaaggcaacttatctcaccctcaccaaggtggcttcttcttggatatctgaatggtggtgagatcaacctctgggccagccaagtatggaactcaatccaaaacaacggacttctt

SEQ ID NO: 1034 - DNA, 1099 bp, Homo sapiens
ggagagtccgcgcgcatcgcccggctccgcggcgccagccatggcgtccgtgcgtggccccgccagggatggggcgacgcggtcagagccgcacgcgaccgaaatccgcactctggagccgcagagcgcgcggtcttgctgtttagcggctccctggcaagtgacgtggggaagaaacgcagggcgcaggagagacagctggaaagcgggctagccaggccccgttttcttcagcttctcccttgacttgatccctgaagatggctctgcctctggcgcccttgaaatatgtcgactaggtcatgatcaccgtgcattctgctcagcgtagtctccccgcctgaagtgttattaatgcagtctaaaatgactacggttctgcggtctaccgaactgcccacggaggtaggggtttcagacttttggcatctcaagagacttgagattaccgagaccacgatacccccagagacgtgacgagatgggatcaaggccacgggggaccagaatgctgacccaggcaacctgtccctgcctcgctgccctttgtaatactccttatcatatcatgaggagctattttccgttctccacaaacttggtggtggatggaagaggatatcaagctcaccttgagtgggattgaggtaggaggcggggctcagacaccagaccagattgaggacaaactaaagcaaggtcagggccaaagcagctttccaacagataggaccaccagggtgccacgtcagtttaccgttgccatgtcaataccagggagttaccgcccctttccgtggcagtaacccaataattaccaccccttccctagaaatttctgcataaaccgccccttaatctgtatgcaattaaaagtgtgtgtgtgtgagtgtgtgtgtgtgtgtgtgtgtgtgtatgtgtgtgtgtgtgtgtatatatatatatatatatatatatatatatatatatatatatatatatatatataaaactgcaaaactgccctgagctgctcctctctgcctatgggggagccctgctctgcaggagcagtcacggagctgtaaccctgcctcttcaataaagctgttttcttcta

SEQ ID NO: 1035 - DNA, 4819 bp, Homo sapiens
caagtgccagcccccgcctgcccagcagtgttaggggagtttccggctgctctgcacacagttggtactgcaggaaagaaagctgccttgtaaacacaggccagggcaccgtggaaatggggaccagctgctctgggagggtgcagctagcagagctgtgcagcgccaggctgggtaggagagagccatgctacccacccgcacccctactgctacgaagcccccagaatgggtcattgttggtgctcagcagtcctctccctcggggatgatatccaaaatatcaactgcgaagactcgggcagaccaatcagaatagatgatggcctgagtgctggaccagaggcctcagagcagggacccgggtggcggggcagtaggagacacttaagggactcagggctatggctgtttactaaccagcagtgcctcttactcagatggcatcagctgaactttccccatcatttctagttggtccccaccctgccaccatctaggggcttctctgccaccaccttgtgagcagttgctagcctcacactcctctcccatcaggggctcatctccaaaaggctgggagctcccgccctgcccagttaatcctcctgcctcactgaagcacaggaaggacccaggccccagaccatcacccaccccagggctgggccctgggccactcctggctcactccagggcccctgttgtttgaagatggtaccaaaggctggaagactcttgctagggaagataacgtaaatgcattcaaaagacagggtaccacatgatgctagggaaagtgcgtcatgaccgcagggtagcagcctgctcctgtcactagggatgtgaatctggggagacacttcccctcactgagccatctgtaaaatgagagcattggactgggtgaggcaggctgtgcaaaacacttatacaccttagtcccatgaggaaggagtattccccctgcatattttggggggaaactgaggctcagggggatgaagtactttgctcagggtaacacagccaggaaggagcagagcaaggccatgagctttggatttttctgtttccaatgtctcctctaccgtgctcaattagatgatgagaaacagttggtgtctgatgctggccaataagagaaaagaaagctcaagtgggctggggctgtcagggagggcttcatggagaggctgtcttgaaaatgacagaggtcaaaagaaaggtcactccaagacgcagctgccagaatggtccaacacagtgaggagttgtgtctggatgggccagtggaacgggggaagtgaaggttgatataagtggaggttgaggcagtttaggcgtgatgtacagtccagccacagcaggttcttgagcaggagggtagcatagtgagcatcaggttctaggaagaagcaccagttcagccatcagatggggcaggatgcctcccagctactcctctccccgagaaggaattgcccccggagcggccctcatttattccaggagaagccaggccctgctgcttcagtttccatcctcactgacgcagataatccaaagagtcacttcagctgcttggaacagcagggttgggtcttgtgctacctgattcttaatttggctgatgtctaccccatttcctccaggcttctctagaggtggcaggggtggggtggggagaaagctgccagacaccaaaggagctgagcctggcgggggcgggcgtgcgggtgggcatgagaaattgctcaggaaacccatccctgccctggtcaccctagtcctggagagatcacccagacatgttggaatgagtctggggtcctgtcttttccaataatgtgttatcctggggaaacccagagggaagttgagggagccccactgtgctgtgtgatgctacatacgcatgcgaatacaccaccgggtggccttgacccagccttctgcaaaatggcttctgccatcaaacttaaggtggagaatggtcttgcagctgccagtttttccttcagagaaactaaggtcagagtgttggctgcagaaaaggacttggcctttgtcacataacaggaaagagagtcaactccgggcacaccccctcggaggctaatctcaggaggttggaaccacagggattgcaataatcgctgaatacttaccatatgccaggtgccaaagcattatcctctccactttatgagtgaggaaactgattcccagaggtgattcccagaagattccaaccaggccatctgtctgtagtccttccttcccacctcctgggatttctcaaaatgtttgccatcgcccacctgtatcagaatctcctgggctatttattgtttaacttgcagactcctgggcgccaccccaaccccctaaatcagaatccctggggttgggcccaagagtctccattttttgacaagctcctccaggagattcctccagacatggaaatcctcacttgactcttcccccataacaaactgccctgatgtctgcagagagagggtctgctgtagacagggattaagaaaaagcaggacattttcagataggatgcccaaacccagacgcagattaggacccatgaagtagggggtagagctgaccctcaggaatgtgcccagacagagctaagctttcaggaaaattagaaagaccctcagacccagagtctgtctgagtttagcttcgcagcatgaaggctgccttgagaaagctgatataacaagaagcagcagaaatttaatactttggaggggcccagcaacccactcagggccaccctgggagaccccacagaccccaaggctatggtccagacctgttcactcaacacctggccaggcggggcctccagctggacctagagctacagatgccccaccaccactaccaagcccggctacccagaccaagacacggcttttcctggaggagagagagagcaaaggccctgtctctacccaagacctaacggcccctgttgaaggagagggagcaggagagggaggagggaggaggtcacagccaggaccacatacactcttgggggccctgctgagactgcaagagtcatgaattctaacgttccacaggtgaaagattccaagattctaggattgcaaaaccccatcattctaagattccaatggaatgattccatgtttctaagattccatcacactatgattctatgctgctaattcttgaaatttcgagtctcattgttcgttgctgttccccagacctgtgggccctagcatttttttaaaagcacaaaaaaaaaagagcaagaaagagagaaagagatggggagggagacagctgaaaacagatactaagaaaagctccatcccttggatctgagttacagatgcaccttggcaagggccaaagaccctccttttgagtggggtgcagaacgtctttccctggtagagtggcagaattgcatgcatcaggccttcctgggggtaaaaggggctggctgttccaggctacagctgagtaaagccccacacaggccacagtgcccactggctggtggacctaggaaccaagcagggccccactggctcagtctggggagggactcatctggggtggaatttccctccctgcagcaaggaagctgcagggccaggaatttgccttgggagacccccactgaggaatatttccgaagcagaaccccttcctattcagagccagagtcttaacactggacaaccacagggtgttgctgcaaactccagagccaggtgccttccctctgacatttgggacatagcttccatggccacacagccttcgcccccttccaagaccccccttgacctttctaatcttagtcactgccttccagagctgggaggccacacggcagaggtgcctgtgaatcactccgtcatcagcctggccgctttcccctctgtggagagggactctgatgggcagggggcaccaagttgagcctctgaggctggcccagcataggccaggcagggacattcactcacaaccagcctttttggactctagagaagagtaattaccacttggtcatgcccagcccccaaatcataatcatagctgctatttcttgagtgccagcaatgtgccaggcaccgtgcccaactttttatacacaatgtcttgcctaatcctcacacctctgtgagacaggtacaattattactcccattccacagactagcaaactcagagacgtgacatggtggctctcccaggtcacacagccagtaagtggcctctgaccccagtaccccccacttaatcaccatgctatgctgctaccagtggtacacactcagcccctctccactgtcagatcctttgccagtcaaatcccagatccccgggggggcactgtggcaccctctttgagcgtggcctccctggagctgctgtcagagccatgggctgtgggagtgagtgtgcacactccttctcctgaagtgtctgccccagcctgagctatgcagaccggagctctcaaccagggtatggggctgtctggcagggtttcccagaaccctgtttcctgtggtcataaatatgggttttcctgacaatgttgggaggtcagggactgatacagctggggttccaaccgccgtgggtcagacctggctcctccggaccccactgctgtgaccaaggaaatctcaccagctgtgtccaagatcaaccctgaccctgttactccaatgcctttgtaggagtatttttagcagaaccgtttttttcccaaaataaatgtgaattgtaaaaatta

SEQ ID NO: 1036 - DNA, 4258 bp, Homo sapiens
gaatgctagttatttgtcagatacatgttttgcaaaccatttatctgtatttggtttctttttgttatcttagcagtgtatcctgaagaatagttttaaattttgatgtaatccaaaatatttcggttgtttgtgttctttgttatcctatttttgttgttgttgttttatagatatgggggtctcactacgttgcccaggctggtcttgatctcctgaactcaagtgatcctcccacctcagcctcccatccttgtctacctaattaggctttgtgtaactcagtgttgcaaagctttgacatctgtttgagttaatgtttatatatgttgttacttaagggtttcacattaaatttaaacatacttatattttataaccaaacaagtcatgttggggcatactcattaggattgagtgctttcttacaccaaaatacatgtatacaaagatttaaaacactttcggccgggcgcggtaatcccagcactttgggaggccgaggcgggtggatcacaaggctaggagatcaagaccatctggctaacacggtgaaaccctgtcgctactaaaaaaatacaaaaaattagccagacgtggtggcaggcgcctgtagtcccagctactcgggaggctgagacaggagaatggcatgaacccgggaggcagagcttgcagtgagccgagatcaccccactgcactccagcctgggcgacagagtgaaggctatgtctcaagaaaaaaaaaaaaaaacttttataataacaactgtaaatagttcaattgacagtcatttgtaagatgtttaagtaaactgtgaaacagtaagtaaatggatgaaaacacactgattaaaactgctgcttttatccaacaagatggatgaatttcccaggaaagaatacttgagttcaggcctgttcaagtcccaacctgtttgtggtttgaggttgctctctgcctcgtagagcaaagtggaaaatttatcttctgggaggacagagttttcttctctgaaaaagtttcctacatagttggctttggcatttgcaaggaatgaaaggtcagggattgaggcctcatgagtctggatttctagctgaggttgagagaaaaggtagtgattgtaaccagaaaatccagagtgggtgtatttacctccagaactcatcacttaaaaaaaaattttttttgaactgacatgcttgaggctttttcttttttttttttttgagatggggtcttgctctatcccccaggctggagtgcagttgtgcagtcatagctcactgtagccttatcctcctggcctaagcagtcctcctgcctcaacctccctagtagctgagaccacaggcgcatgccacctgtgagtttctagagatgaggtctccctatgttccccagcctggtcttgaactcctgggctcaagtgatcctcctgcctcagccttccaaagtgttggattacaggcgtgagccactgtgcctggccagagctcatcactgttaactcagcctgggtttttcacagcagtcatggaaatagattcattaataatagtaacaaatatatagtctccctctcaaagaaaccttgagtggcagtggcataccagatacacagtaggaaatactgtagaattatgttgttaagttcataaccaaacatcatacatgatgataaaagacaagataatggtcacatttatgcagtattaactgagagggcaaatttgtgcctgagaagctattgggaatgttctctctctttgcattactaggaattacatgggaaacacatgtagacagtcttcaggctattaagatttgtccacttaatctttacttatacatgaataaaaaatgggaaaacatgataaatataataaactaatacactcaaccctgccccttgattatataatagaacaaaatcagcatgcccggcatgagcctgccagattgccaattccatcctccaccttcagaggatgccgccatccagaattttgccttactcattttactttcttcatagttcgacaccttaaatgtatattactaatagtagctttgcatttttggctgatttaaaaattgatataaatgaaataatgctgtagagatgctttttggtattaagtggatatactgttattcttaaagatgtttgaaatgaatatacctttctaaatatctttttaaaataatacattaaatgatactgctttagaattcatgaactgcatctcatgagaatatgtagagatgacgtgggcaggtaaagtaaaacttcaggttgaatatcctatgataatttaaaaatgacaaaatagtgtggtgaataatagagcttgagcactttaaggcaccgtagggaccccttcaatgtaatgatgacagtgctgaggtgcagagaagttaggtaatcagcccaagccactactctaaggacagaccctatctacttttcctaatttgtcagaagactgcctatgatactactaataaaaagtcctatgaaattggtattgtcattattttacaaataaaataatcttcaatttttgtttcctctatgcatgggttacttagtattttgtaatttgaatttcaagcataattaaaaagaaatcaggtatctaggctgggcatgatggctcaagcctgtaatctcaacattttgggaggctgaggcaagaggatcacttgaggccaggagtttgaggtatcttttgttgatctctacactgattgtattctctcttttattctatgaaagttaaagattttttctgatactacatattgtcagttttttaaatactcagtttgtgctaaaagaaaacattcggcaactgatatctgctgttctgtatgtatctgtcagtccagatttgtccattatggtgtatgaatctaatagaacctcaccaatgttatacctgccttcttgaaatcattactgagatagctaatattaaaatatcctggtttgtctgtatatttaattctttactctcattatactaaatttttttaatgtaatttgaattgatggtaaaaattgtatacaggccgggtgcagtggctcactcctataatcccagcattttggaagtcctatgcaggaggattgccagaggccaggaatttgagatcagcctgggcaacatagtgaaactctcatctttataaaaagtaatattaaaatttttaaaagtgtataaactgtaaagtatattttactggtgttttcttccttattcctacttgtcagatgcaaatacacatttttgtgtgtttgtgtttagtaattataagtatacatatttcattcttctatttcatatatttctatgacattatatcttagatgtgtaatttatgaactactactggattattttaatccattagaaattactattcacgcattctgtattcaattcatgtgatagctaatatatttggttttaaatgcatcttattttgtggttttcttctaggctgttttttgtgctttcttttaaaaatatataggttttaataatcttaattttcttttagtttgaaatgtatatactcattttattcattagtctaagataagaattgtaacacttctctaacctattatagaattgttaatacctttacccttctcttgaacacatcaaaggatgtcattgagtgttggtattggagtatagcatatctattattctgctcaattagaagatattgttcatgttgtatagagataataagtaattgtattgatctgcagatgcatccatctcttggattctcattccttctaccactgcagaactttcacctgtaatcactttcctttggccttaaggataacttttagggttacttttctactaaatttccaatttttgaccagatataatcttatattgtgctcttcctgaaaaatactattgttgtggatagaaatctgggttggtagttatttcttcagcaatttgaccatgtcattccactgtgtccctggcctcctgtatactggatgtgaatggatacaattatatattgtgtttatagttttcctgtgctataggaacagtattcgaatctgatgcaaaggacaacacaccctagagattgtaacagtgagatgaaccaagtgattggatggggttttgagttgctggaataatggagttacagtgtacaatgcataagcaacataataaattatatatctggtgaacaaatgga

SEQ ID NO: 1037 - DNA, 1016 bp, Homo sapiens
aaacatctgccgttggttgcggcgggcaccggccgacatggcggcagcggtggcggctgcgctggcgcggcttttggcggcctttctgctcctcgcggcccaggtggcctgtgagtacggcatggtgcacgtggtctcccaggccgggggccccgaaggcaaagactactgcatcctctacaacccgcagtgggcccatcttccgcacgacctcagcaaggcatctttcctgcagctgcgcaactggacggcctccctgctctgctccgcagccgacctccccgcccgtggcttcagcaaccagatcccgctggtggcgcgggggaactgcaccttctatgagaaagtgaggctggcccagggcagcggagcacgcgggctgctcatcgtcagcagggagaggctgctacaaagacatgctggacatcttcacggcagcgtttcggccgcacggtgagggcggcgctgtatgcgcctaaggagccggtgctggactacaacatggtcatcatcttcatcatggctgtgggcaccgtcgccatcggcggctactgggccgggagtcgggacgtgaagaaaaggtacatgaagcacaagcgcgacgatgggcccgagaagcaggaggacgaggcggtggacgtgacgccggtgatgacctgcgtgtttgtggtgatgtgctgctccatgctggtgctgctctactatttctacgatctcctcgtgtacgtggtcatcgggatcttctgcctggcctccgccaccggcctctacagctgcctggcgccctgtgtgcggcggctgccttcggcaagtgcaggatccccaacaacagcctgccctacttccacaagcgcccgcaggcccgtatgctgctcctggcgctcttctgcgtggccgtcagcgtggtgtggggcgtcttccgcaacgaggaccagtgggcctgggtcctccaggatgccctgggcatcgccttctgcctctacatgctgaagaccatccgtctgcccaccttcaag

SEQ ID NO: 1038 - DNA, 613 bp, Homo sapiens
agaaagagaaacttccattgctaacatgaagccaaattgtcctaaacaggagtcttgagacttctcttcttttggtgtggattccggaactcctttctgaagcaagaggcaaatatctctcagcagagaatgccaagaccaatcacttaaccatggcaatcttactcagcatggtaattcccaccctgatggtcccaagatggctgcagcagtttcagccatgttatcctaatccaccaacatctggaggtatctgtcttttcaatctccatctattacaaatgtaggatacttttaccagaaggtcctcctctagactactactcatgtttcattggacaaatttggtcccatggaatttcttaagtcatttactgatgaggaaagtggaattatcatgactggattagactacctaagattcaccactcctgagcctggagaaagataattttctcagagcaaacaactgcatatggctgaagataggaatgaactataaaacaaaattggagtcctccaggaaagaaagggggaattaaagggaaatgattgtgtaggcaaaacacaatagtctccaatgccaaataaactttgttttgttactctctca

SEQ ID NO: 1039 - DNA, 589 bp, Homo sapiens
atttccctgtgtcctttcctatggctgtggttggagagacgtagagagaggctgctgcgaagtcacaatccagccacacggcattgatcctgtcatggctggtgtggttgtgtccacacgtgacctgaacatccttcccactcagtaccaaatacagtcaattctgtggcttgatggtgcgtggacataacattcagatatcgcccatgatgaggaaacagaagctgggatatgtgagtaaacatttccaaggtcctgcagctaatcaatggttgacaacttctttcctctgcctatgttgccatccatgtcatggtttgtgtcaagactctaggagaagtctaccatcagcaccacagctactgtgcacaaatccagaatgccagactgaagtcagaaggaaagatcctttatatattgaaagaagaaagtagaaccatttctgggtcccagctgtgggaagagctcctgtggctgtgaattctgacttctgggtcttggcacaaggtgtggccagcaagctaagctgtcctgagggtgtgcagggccaggggctgaagacagtgttggagcatccacagactggttt

SEQ ID NO: 1040 - DNA, 445 bp, Homo sapiens
attaaactttctattttcttaaaactctcacatcaggtatttccagtgttttcaagcatgtataaatattttaatgtataaatgttgtttaaaatcccctcaatcggtatctcctgattgagaaaatacacagtgaccaatagctaataggaattcagtattgctttcaaagaaatgtgcatattaatcactgtagcatctgcatacatttgaaacacggagtaatacaggtctgtgcaagaattagcagcttgttccttgctaataatgacttgtgtcatctggaaggcccccaagagcccatggtctacaggtggaatgaccaccacttgggagtgagctgatggagagcacccagcaggtctcctccatcttcctggttcctgtgctcaccatagggctggtgtacattgggccattaataaacgtttgttgaacaaattaa

SEQ ID NO: 1041 - DNA, 395 bp, Homo sapiens
cccagggccacttagggtgcgtccacgctgggtgtgccaggcatgcacgtgggctgcagacgcccaggaggcagagccgagcctgccaaggttatgcgtgcacctctcagctccctgcttaacactgcgttcccgggagagagatttctccctggctgcttcacatccagaggagaacatcagctctcagcagaacataaggccctcttcacctgccagctgggcaacagcagttactctcattggagaccctttcccttcgccacttcccaggctactccagactgaatgcattcagggagtcacctcccaggtcaaaacctgctgtgataccatcaccctgcagcacagaccacagtcccaagcctcccattcttgactctaacaccagccca

SEQ ID NO: 1042 - DNA, 5842 bp, Homo sapiens
actcctgcccctgccacgagaacacaccctttccagtttgctggagaaatataagagaagtccagtgaaagagagctgagtttccccaatgatgccatcaagatgaactaactacagttaaccagccagctgatagcagatgcatgagtgagcccagctgagagcaggtgaaactgaaattggctgtatcatctgaaacttcatctgtgaagtccctggtggtttcctagatgactacacagttgagttgcctctgattggaaaagcagtgttttggtttttcagtttgtacaagaggaagaagacgcatgatatgtgtttggctcatgtgcctgaatatggctccacagggaagacttgatacagctgaagctattgctttttagagactttttattttgagcagctgccttaacagccttcgtcttgttacatcacatgagatatatctctggaataggaagagaaaaaagacatgactgagcaataatttttgactaaaacttaaaattacaaaaccaaaaccagagatagatgtccctgaagttgtatttttatagtatgtgagaacacaattttcttatcctagttttaaggcattcctctggacccaggatttttgtttagtttcattcacataatcaaactcttttttttttttttgccatagactaatgcattttggtgtaatgatctgagcccttatccagaaggcatctaagactcatgtacaaaaatagatttcagggctaaacattctaaaagacaattgagtgcttcttttttctccggcccctagatgtaaatgaataacctctgttcactaactcttaatgtaatataagggataaattatgcttgtttatttaattgtgcttaaccagagtactaggttggagtcaaaccacagatatatttgtgagatgtgacaaaatgtagcttttagcccgtaatacccaagtcatctgggaacataactgatgacagtgtcaacacctttcaggaattctggaggtgcctttgagtttagaaattcgtaggttctctagaagcaacagtagcatactaaattaacacataacatttcaagctacatttacataattgcagtggttatgattaatacaaattatattaactgcctgttttactccttatagctgattggctgaatttaccagtgggtttggtatgttcaacaaatgatccaaattaccttttcatttcagttaagaaactaatcaaagcaaatacactttgatttgttgagaggcagagattctccctaagtggcaatgtccttggccttctaagctaaaacctaaatggaactataatatatattttgatgctttatctcacttgagttttttattctttaactgaagggcagccatggaccataaatacatagaagataaaaatatattgagcttaggagtttggtctgttcaatggatgagaactttatattttcccttataaacacaattttcaaagaatagcctgtaatagtcgtgaaaatggaaaccaatactggggaaatgtggactgcaactctgaaaaggtatcaaaatgcccgatagttcaacacaagggctaagcaatatttcagggatgtggcctgtctttggtggctcggtcactctagtgagatgaatttggaaaaggataggcatacagaatcccccctctggcagggtttgcctttggggtctgcttaaagccatgtttgctagtagaaatcttgagtaaccagatatgttttataatgctgtgtcatatttaaattctgatgagattgacatctttaaataagcttggacacagattggatttgtacagggaactggactgaagaataatcgtaggtcagtaatagatttagatatactatttttatattgtaagcagttacttctcaggattagtattctaattcatttgatttaatatgtaataggtaatattaaaaataaagattttatgctttgaaactccttaactgaatattttcataggaataagcatagtttttgtgtttagtaattttagttagtgagtaatgattagcagacaacatggtaattatattgaaatattacgtgagtgccaataacaaagctttctgatcaaatgctaagaaatatgttgtgtaaagggatctcacattttttattgcggctttctttctacaatgtgacaaatttctgggatatttcattatcttctttttgaatttttttcaagcaagactgttcagtattatgttagcattgatataaaaagaagcagaccattgttaacattaaaatgttactgagatttcaaaggtagaggacattatcctttcttatttttctttatgatacagtatttgtaacatagtgcttctgaaatagaaagcactttttggaaaataagtttagtgaatagccaaataatttcttacatataacttacaaaagtaataccatctaggctaagctattaaaaatatcagtacatcagtaactactcattatattgaccaaccagagcttatccatttttggtcattctcatctagatatacactttcaggctaaagagagatttccttcctttttcaattggttatgaatagaagtcatcaatttttttcttacttccatcttaatggtttgaaataaagagtcagatgcacggcttttcaatttcttttactactttattttattacttgattattttaaggtcaaaagatttccatttccaaaatacgtaatagaaatgataaagcagtaaaatttggacttaaaataatatggacatttttcttacaagtgtcaacatgatttacacattattaaaaaggcagtaaaatttgaacttatacagcataaactttacttaaactgtcaaatacatggttttaaagttattttattaatctatcactaataattatttttcttatcaacagagaaagtgaagtttcctaagccatcactagaattggaaacactagattttataaattaatttcttttcattgacctaaactccacatttctgctgtgttcatctgaggtcatgtccatatagtcaaatagctgaaggaaaggtgatatttttagtcaaatcaaactccaaacatcatttttatctaaattatctggagaattgaataaatatttttttaaggctgtctgtagaagaaaattatgtcaatttttcatttagctagagaggtcctgaccacagtgtcttctgttgaatttctcctcaaggtaggattccaaaatacctggaaaatgtgaaacagtgttcctcgtatgggtaatgtagcatcttcacaaaaattctgtcatgattcatttgaaaaataataccttctcatgtctaaaatagtttttcatgagaaatacattctataagaaaaaaacaattggcctatcttagaggaaaatgctattaaaaattgtgttatggaaacaggtaacattttctttatctttgtgagttttttcaacataaattttggtcagagaaatcatttcaaaatagaagagagtcagaaataatcagtacagaaatggttttgttgagaactgttaattgaaaaggcaccaagtgaagccctcatctatgtttgcataaaaaactgttttcatccctaagaagcttgtagcgtttggtgtttctagaaagctaccgcagaagtggtgctgtaggggatagtgattttttttttttttttttttgccaactgatgttccttaatggcagcaggcttctcagaaaaaatggaaaattaataattctatatagcaagttctacatatcatcactctattctctaatacttagtgtttaatgtacataaagagtagccaattgtgatattaacaaacttattaacacctgttgacaaagatctttgaagacaaatctacacgcaagcttttgccttagcgaacaacaggaatagtttccttaaaaggatacagctattttgaaatttcctcaaccattgcatcccagtgggggggatacttacatggtaggactgtttggccaaagtgcttgaagcattaggacacaacaaagatagttttgaaatgttttcttgctcaaaatacatttgttcttaggacacggctagtgctcattttacattccatgcctgaagtgtttaaaacactgtggtacaggtttctgattctgtgttggtcaattttgaaatccatgtgttagtagtaagtgtgctgattcgtagagtgggtaacttctgggaactcccctttcttttattgacaatttctttgtaaagcaaatgctaattctacaggctattaataaagactggaactcccttgttcattagacacgcagtaggaaaatgggtaacatagctgtagaaatatatttgcaatatgttctcttcgcacaatttgcatataaatgccgctttccctatttactcaaattagcaatgtgtaatggagcactcatagcctttttgtaggttcctgtgacctttaattggcactcatttcagacaattgccattttagacattgctatcgccatcttttgcaattaagtttcaaagttatcatcatggcatttttaatatttagaaatttctttttttatctctggctttcagttgaagactattcaccccggtggactcatcatgttggggactttcaattgctactttaaaaagaacgcttcactgaaataggtctcatcccatcaggaacatagaaaaacaagcagcaggccgggcgcggcggcacaggcctataatcccagctacttgggaggctgaggcagaagaatcgcttgaacccaggaggcggaggttgcagtgagccgagatcgcgccactgcactccagcctgggcgacagagagagactctgtctcaaaaaaaagtaaaaaaaaagaaaaaaaggaaaacaaaagaaaaaagaaaagcagttgtttatcttttggcttaagccaaaagaacctcaaatgaaagaaaacaaacagatgccattagaaaatgcactaaagatatgatgaaagcttatcagaaataataataaaaaatcaaatgtagcacatcctatgtacctggcactgttataggagctgtgtctgtattaacacgtaagtgtttgaggtaggtactgttattatccctatttgccaatgagagaaagaaggcaagagagcttaaggaagttttcctaattgcccagctagaaggcaggacaggtacaatttggtgctaggtgattaggcttcagaatcatccctcagtcatcatatttaatcacaggcttcatgccattaatgtctttgctccaaagtcttcatttgattgtttttttctaacttgttatttttttgagcaaacattcttgtgaactttcatatttttaatccttctttattgaggcttaaaaatatttttaaaaaatagtaaaatgtatttgctacaaaactgagcactaacttttgagaagttgttctaagctttcatttgtttctggtctgaatcatcagccacgaattctgaataaggctgatcttatattattgccacgttcaggtctctagaaataaccattataggacatgacctatcattcttatggattttattgaatgatgagctcagctgcttgtacaaatcattttatttgccttctcctttaatatatttatcagcaaattaggaagcagtatttcgttttgtgttgttactcaaaataagaggattttacatttgtaaaatatgtttttatatcttagcccattatctattaaaaacaaaaccaataaaattttgtcatttataa

SEQ ID NO: 1043 - DNA, 4531 bp, Homo sapiens
tttagagagaaaaatgaggcagcatctccatttgcaggctgggagcatgccctgggcccaggttacagctctgtccacagggggctgcgcaagaaagagtgtgtgctttgctcctgggagccccgcccttcctcgaatattctggagatctcttttgtggtggggagacccagcaaaggctgcacacacagcttgctcaaggtcaccccatgaaaagttcagctggggatcaaggtcccttttttattttggggttttttgggggctaattctgggacatggggaccttctgtcaccttctgagaagggctcttgattgtacactggtgcctgatgcctgagtgttagaattcatatcccaaacgcactttaaaaatatttaaatatctccgctctagatcacccgaatacccaaaaatagcaggttagtaacaaatacctgaaatttcctccacaccatgaaataatacacagcctttaaaatgaggatgaggatataacaatggaaaggtttccatggaaaatttttaaaaagcagatagaaaactgtatatgtgatatgatttcatgtattaaacatttatatatgtttatttatatacattcacagaagaaacgcctagataatcatgtaccaaactcttaatagtggatactttggataataggattataagtgcttttaattttcttataaatgtagtatctttgctcatttaaaaatgttttatatttgccatatatcatttctattattaggggaaatgactgaagattcaaaaaccatccctgataaaaaatattccatatcttactgaactcccaatattctttctctttctctgaggttaggtaatgtggagggcctggtaatattgtcagctttatatctctcagagatatgagactatggtgagcatagctattattatgtatagaaaagcagaataattaatagccaataaccacaccccctatttgactgccagagtgaccatctagtggaaaagatgctatgaagcatttttcttctactttccctgcctaggggctggagagacttcttcatgaaggaatacagggacagtcacaggagacaggagcaccaagggattcggacatgtggctgacacagtcttctggagagccccggatggcatcagggggaaacctggcctgagacagtgccctgatggacaaggacaggaatacggtcatacctcctgcccacttgaccaacgaccaggatgagaagccaacagatgatgaatatgaattaaagttggacaactagcaagtttaaaacttggactgggacctagatcttccgattcctacagctagcctccctttccatcttctctgtggtcatcactaatgcagtttttgaccgtcttgtccagaagctgcaaaacagacaacagaagccaggactggccctgccttagatggctttcagtgcaggaaagtatcaagacagtcttgttcgtagcgtatatctctctccaccttttctgctaagcacctcatgtatgcagctgccaatgtaacacctccatttgcgtgtttaatcaccatctcaagctaatgtaaccaagcagacttcttggccttcatccctgcctcctctagtcttctcatctctctctctctctctctctttttgagacagaatttggctctgttgcccaggctggagtgcagtggcaccatcttggctcactgcaacctctgcctcctgggctcaagccatcctcccaactcagcctcctgagtagctgggtcttcccatctctttaaaaaacaattcaattgttcagaacaaaaccctggagtcatatttaattcctcccttcctcttgcacttctaaaccaatcattcatctctactttgaaaatgtttctttattcatccagtgcaccaagccaccatcacctcgaggcaggaatattcaacggcctcataagtggtctccctatttgtgttatattcaatgcatgtcttttcttactcaaaatcctataaaggcttctcttcaccatccacgactgtttcctgccttcctcactatgatcccatcactgacccctcaagactatgttccagcctactttctgctccttgaccaacacccttactctgattcccacttttgtgacttcacatgagtcccctgtctgcctggacactctgcccccaaccttgaagtgctcacccttccctgtcactcagttgaaagtcaaattccatttcctcatgagggcttccctgaatacccacttttaattaactctctgcctcctcccatcacttctgttttaccccctcttttagttccttcctatcttagtttcataagagccagggccgtttccgacttctttccccgtcaagcctccttagataggacaggtcctctgcctcaccgactttaatcagtatttgctaagtaaacagagcacaggaggatcctgttgtcatcaaagagcagctctgcctccaatggcgaaaggattgttggaacctcatccttccttcaagttctggttcaaaaaattccatgctatgcctcacatggccttgcccaggtgcctgtttgatttgcctgggttgtctgttctttcttccccactgtcctcatttgccatgtggctcggtggtggctggagacctccatgctggcccctgggagcagctgctaaggctcggcgcctcaggacaccttggcacctgtggatatcgaccaccaggcttctcttctgttcatgtctctgcaagaatgagaacctgcccccataccatttgtgctgtgtaggcctcaggaggcatggactcacgcatccagcttcctgcaagccctctggtacatcgcagtgttcacccccagctttctattacagccaccacccagggactctggtgcaggctccttagagagaggccaggaaactgccgaggtgataagtgacagcaggtctcaggggaagagaggacttctctccttagtaaagaacctgtcgaggtcggaaagacactccaggctcaaagccaaatttgaaagttaggctgacagcccaactagggcagattggaggagccaggtggagagaggatgtgggggagtcaggaaagaggtggaaggagaagcctggaagagtggctccgctcctggagtatggccagcggcacttcgtcaggacctcgaccttcacccactagtgggagggtgttcctcgcatgacttgtaggatcacctgggaaacacacaaatggaagaatttaaaaatatctgctaggacaccccgtgtcccccacaactcatcacagagcaaacccatcacagagcaaactccttggctacttcttgtcttgggccgtcttttcatctggcctgtttgcctgactggactttggggtctttgttcccagcatcaaaatttcctaccagcgactttccatcacagctcccttccagtcttctggaaattgtcagatgtgcctggatttgcagggcctgcacaagatatgctgtcgatctgggatttttggggatttttgcagttcacactccaatgtgcaacagcaaccaaacggagatggaggacgtgaacatgaactactggagatgctgatgaaacgtgtgtaaggaccgcaatggtatctgtgtcctgctcgtgaaattgaccagatacagcggcttccttttgcttccgaaggcccggattgacctgacaattgatatgctttgctctatactccaactcccattgaccatggggtgaaagcaccctttctcggtcagcctcactgcttccccgcagatggagggattttctgcaggagcatgggccctgggccttcctttcccactgtctcttgaaagcctcctccagatgtgctgcctggctcagctctttgggtgacttttgttctgtctcatgtgacccatcaagattcacacagggctgtgtcccgggcagggctggagtcgacattcagggaggagatcactgttctggaacagagcagtgattggtttaattgaaatctgatagatcatcatgtaaaaagctggcatgtaagcatgctcccggagcctgcagggccctgcgcggcctcttgcctggccatcacgtagaggcggtcctcttgcatggttgggggcctcacctgcaccacgggcccccaagccaaacagtgagattgtacggagaccatcctggtcaggtcttgcagtttgcaccaggtagccccaggctatcctgccgtgcaagagctgccttctcagcacagtggagttctacggctgcctcggctgcagaggtcagctctggagccttgctgagcacctccatggatgcattttgcaaagggccgagtaagaggcattaacgtggcctgtgcttagttcctgacagcaagcgggattaaacccggattaaaggatcagccctaaaccaaagcagaccagtaataggtctcatgataaaagcagccaaataataatagtaaaaatctattcttggactt

SEQ ID NO: 1044 - DNA, 1948 bp, Homo sapiens
atatccttcatctttatgctgctccactccagctcacagcccctccaactggatggagctcttcgaagggaggggcatttcagaggagggtctcagggatagcccctttgtggggctgggccaccaggttggggagagtggagctgctggaactctggagggactggctgagccagctttcccagtgcacccctctgggagggcaggctctcggtgtaggctgcccatctcctcgctctcctctggcactgctcctatgcccccttggttagcctgggagcccatactacccagacttggggtcaataagcagaggacctgtaaggagtccttgatgggatgtacagcactgcccaaccctgcacaaggtagggtattgctgtttgttgtgtggtgagctgcctgcttatggctgggtttgggcctccatccatttttattttctttgagttggtctctgggcaaagcttctcccagcaggcggaatctggcctgggggctccagcttctctcacctgcctggcctcccaagagctagagagctccacatctcaactcatctataactcattagcagaaccatcagctagcagaaactaggaataataaaaatgtgccgtattttcacaagctggatgccaggcttggtggtcaggacacagactgctttcagctcccacatgcccctcctgctagctgctttgtgcagagtagtggctacatggctgcaggtgagagccctgcctgtgaacaggccaccaggatgctgggacatacgagttgataacccatgggctcctgagagcagagattgtgacttactcatctttgatgtagccaagttctaacaaacctaaatgtgcagccatttgtaagagaggatcatggaatgaatacgggcattgagtcaagcagtctgtgttccactggcggtgtgacctggggcaggccatttcacctcactgagccttagtttcctcacctgtaaaatgtgaaaaatatcaccttccttaccaggcttttctgaggatttaatgacatcatgttcagtgcccagtatgggtggataatacccaggagtttcctcctcttctcctcctaagttgacttgatgccccccgctgaagatcatggctgaactggctcaattcggatccaggactcctggctttgtctcttccctagttgcccaccacacccatggacacccttaggtagtttatccttttgggacaactggatttattagaaaagggtattctggggtggaataaggcccttttcagtccccatggagcctttttggaagatgaagttctcaaacccacaagagaattcataagacgagcacaccacccacagttaggtttccctctcaagtgctttatctccacgtggggcaaatagctctttgtctgcatatgttattggagcttttggagtccagccttcagaagagctctaatttttggattcatatcagtttattagagaagcctagttctaaggattagcaaatgggtaggtgctcagccagcccagaacaagcagagccatgacagaagtttctggaatctcacagagtcggtgtcttcatggactcagggggcctaaatccaatagcctggatttgtcactttcccttattcccttatcaaactcttcccttttggacatcagagaaggaaagtacttcctgtaagggggcaatttgcaaagcttcatggaagtggcatttgagtgtggccttaaaggatgtgtaggattgggaaccatagatatttagaggaaggcattcctggcagaaggaacagcagcaaaacacagaagtggaaattagtagcagcattaatggagaataatttggggaataagatatacaaatggaataataaaaatagcattaattaaacattgtgggagtcattctgtaagatggcccctggtg

SEQ ID NO: 1045 - DNA, 589 bp, Homo sapiens
agttctgggggtcgtccgatcctgcagagaccgtccaggctggacttgaactccttcctcggctgaagtgatcctcctgcctcagcgtcctgaataggtaggactacaactgtgagtcactttactcaaccagaaatggtgaatgataaaaaatgtttatagatcattgcttctaaaaagactatattagacacactgtggtacccaaaaccaaatgctagctactttttaactcaaaaataattagtcagctaatgatctatattttgctttacagtttaacttgacgagtagaaaaatgtcaaggtataagacaatgcaaaatgtagggacaaagaagaaaacttcccctttcaccctctgaaggtttgctgaaaatgaactgaaaaaggcagagcaacaggagaaaaggcatgcgtttattttaacgtgcataccatggggaattgcagaagagtaatggcctaataacccagcagggtccagatgcctgtctaccctctcttcttagggaaggcggggatgaggtgtgtaggagtaaatgacaaaagttcctctgagctctgggggaggtgttgggaaggtgagg

SEQ ID NO: 1046 - DNA, 1418 bp, Homo sapiens
gcgagaacggcaaatggcggttgcagaggctcgtccgaattctcggctcgctgctccctggctggcgcgtgtttgttcattctgggctaggtgagcagggacaatacgtcgccctctcaggactttgctctctccttaaaacccgaggattcaccgtcaagcttctggtttctctgacatccttccccagccgccccttcatcgccaccgatgatccagtggagaagctgtgttggaggtcaagggatggaggcgaaactgcgcgttctcgtccctgcagaaaccggaatatccgagacacatgacgaacatgaaactttctccttgtctcttggctcccactccgctacacagatgaacggtgttaccttccctcatgttactttgctaagcctactcctcagagctggtcctttgcataacctcttcaaatgctctcaactctcccttgctcctacataatggagtaatcataagtgcaatgagaaaagcatgagatttgaagttccataagtattgagtctaggttctggtggttattaactccatgatcttaggaaagtatctgtcagtgttctgtgtaaaacggaaatgctaatgtgtatttaccaggactttttcttgcgagaggcagatgaaatgtatctccgtttcatgagtaagttcagagaatataagtgacttgtccaaggtcagcaagctaatgagtgggaaagctgaggcttgagcctagactgtcaacacccaggccaaagattcattgcctgcttttcatcttatggagttaaaccttgatacacactcagatctgcagtgacttgaccagcactgtgggttcatgctttactgtctgataacgaattttcatttaattttattttttttcttagacagggtctagctctgtcacctaaacctgatgagggctgagccttcatttcgccgttttttgtttgtttgtttttgtttttgaacgagatggactctggctatgttgccagactggagtgcagtggcaagtcacaggagccatcatagcgcattacagcctggaacttctcgtcttcagggatcctcccaagtagctgggatttcaggcatgtgccaccatacctggctctaattttgaatttgtttctttaaattattatttgtgtttgctgaaattgtgtgtgtattatttttgtgtatgtgtgtgagtagttatatgttacataaagtaggttgtggggttttttccagtaatgtttagctataattgaagtttgggccgaaatctgctagtatttgttactcctcaccaaatcctaccttatctcacaacaaactgtaagatcttgtgatatttcacttccaataaccttaccaggcatcagagtggggtctctactctgaaattaaatatctgccataaggta

SEQ ID NO: 1047 - DNA, 892 bp, Homo sapiens
attttcctgcccggaaggatgcatggcccggggtctcctgcacctgagggtgggcgggaggcggccccgcgggttgtgttgctggaaaaaggggtctcgatccagaccccaagagagggttcttgggtctacttcagggaagaattggaggcgagtcacagagcgcagtgaaggaagcaagtttattggaatctactccgttagagagtgcaagtcctcagactgcaggaggaggaactcccgtccttcggtagtgtcactacttagaggcagctgtgaggagctgtgattaatcgtggaatgtgctgatgtgcccactaaagatgcctggtaagcagtggctcctctaacaagtgggcagcttggaactgggaacgagagagccaccgaaacagaatgagggagacaaagaagtgggcatcacccttaactccacaagggcttcccaagggcgctgtaccgtacgcaggcccaggacgaactttatttctcgccccagcatcgctgtccttgtcggtgagaccctggctttagggcagacaggaccacgtttcataagttcatgctgtcccagcagaggaataacgccagaaagtgttccagtacaaccagagaaagagagtccatgagaaatctgcccttgtgaagttggaatcccctcaacctcaccccgctgacttgaatgaagcgactgagacgggctatgatggagcagatccggttgctcgaccttctcccttgcaccaacacatgtagttaatagttactggacatgcatattcagtgggttccaggtaccaaacttgtattgaatggtatgtgccagacaccgtcttgagatctggagaataaaaaaataaaaaaataaaaacgagacatccagagcacagta

SEQ ID NO: 1048 - DNA, 717 bp, Homo sapiens
agtgccgccatactctaatctgccagtaacgcgatcaatgctagaaacataatagaagggaaaaaacagagaatcctttaaaattacatatattggctggtctcgaacccctgagcttaagtgatcctcccacctcagcctccccaagtgctgctattactggcaagagccccagcacccagctgagagctttttgtatttatgtagctatttatcacagactagccaagtgcagtattgagaagaggggaaagagtaaaacaaggaggttgatctgtaactatgaacaagataactcactaccagccagagagagctttttaatataaccatttcaagctcagctcacagcatccactttacaaagttcatttgtttttatagggagatgcttattcagcaagacattggttacctgcttggtgattttgtaaatgatgatttagggggcagatgtaaattttcagctaaccaaccatattacgaattataggtggaaatgagctgtaatcattgacttaattatcttaaatcttggaggtatttattggcatttctgtaacaagtgctaaagacttgccgatgagtgcaaggtttgtaagtgtcaggcagtagcagtcagtgaagtgcagcagtcacaaggccctctggtctagacagaagcagcagcttcctcttaaggccttttcctacccttatgttttgtggtgtgcttac

SEQ ID NO: 1049 - DNA, 3814 bp, Homo sapiens
ccgccccgaggaaagaatcagcaggctttgtgtaaagggattaaggcattagcctgctcagcagggagaagggctcttgactctgtggcagtgtggccacgtttccatgtgtccatgtgtccatgtgggctgctgtaggccctggctcactggtcccaggacctgtggctaaaaggaggcattgctggaggcctctcttgagaggtgggtacgtgggccatgctgcctatgccctcctcaggtccccagaaggagcacttccaaggggtgctgagtcgggggaggtgggcaggaaaagatgccagggaaagttctgagcccaggtaggagtgacagtgatgtgtggtggagatcctacagccaaacgaggagcagttaacaatgccacttcaaaaacagcgcctgaggctcagaaagaaggtgtatcttgccaaccatcacacagcaagtcaccagcagagctgagaccagaacccaagctcctggtccagggctcagtcattgattgttccagccacacgtggctggtgccaggggcccgtccggtctactccctgcggtgactctttctcctgcctcccaactccagaaaaggatcctgctggggagcctggggtgagatcccaagagcctttccgtgtggacgtggacatagtggggtaggtcgagagaccaaagcaggattctaacaggcctggacatatgtcatgggccatcaagaccatctgcatgaaggtcttttgctacagaagtgaggtggctttttgcagctgctcaggagaacaatctggcgtagaagtgggaagggaccagagaatggggcgttggaagacctaggttggagcctcacctctgccctatcttcgctgtgtgaccttgagcaggtcactctaactcttgccgcctcagcttcctaacagcgcccctgcccggcctctcttgcaggcccacagaatgaaaagagaggagttccaggaaagggtttggcagatggcatccctgcaggactgcctcgcggcgctctgccccatccagcccctacgtactggccatgtgacctcaatgtttgatggactcacttggcctctctgaggctcgctttctccatctctaaaatggaggatgaagcaggttcagccccacgggcaggcagcactatgccagggacatggcgagccctctggaaaagttcacctgatccagacgttgctgggtcaacgggaaggaatgactttcactcctctgcttcaaaccaccagactgtccttggccctccctaatgaaggagcagagaacagcagagtgggcagggaccttggaggtcagcagggtggctgctcagcccagaggcaaccgggagctcgtcccagggtgtgacaattcagtcagccctttactgaacactcggctttaaaccgcctcatgcctggcatgaggaaggcaccgtgctggagggtttcaccacggttctctgtgtgtctccggggagctcactgtcctgtctgaggcccgtccggggtccggacagtggagctttcaggttcgtgcgcaccctctgcctgcctcttctccctgtcagtaaggacgtgggtgtggctgggaggcagatcctgggtggagaacggagctcctggttctgaacagtttgagggtctggaagtcctttaagaagatggtgaaaactatggaccttctccccaaagagaagcacacatccacatccagaggcaaaaaccccatcgctcagaaccccgtggatgaggcagtcattatccagtggtgctgtcactatggctggggctggccttgatctctgttgctggattccacatgttcattctctctggccacattatcagatctctagctccaacatcctgtgtgataccaggatggccattgccatgatcttgtccacgggtccactttcagcagctgggccctggagggcagcacacagctcatgattgggttggagatgggggagtcaggggcagatggtgggagctgtccccagccctgcctctcttaggaccctcctgggactcaggtacatagggtccctgagaaagacccagtttgatgagacaggcaggaggaataaggaagagtgtagtttaagaaagttttctccagctctggttcatgcatccgtcctgaaagaaggcagggaaaggattattcacccatttcacagatgaagaaattgaggcttggagaggtcacggagcacacagagcaaagaagtcaaaaccaggatttgaatctactctgattacctccagagcccatgtcttgtcccaatggatggaaaattcttaactatttaactcaatattgagcagctactgtctacagaattctgtgccagacagcttgggagacacagacctacagggagatatagttcccactggaagcacccagggcagtaataattatcatcataacaaaggaataataatagctaacattttggagcacttactagggaccagcattatgctacacagttttcatggattatctcatttaagctctcaaatattttggggtgtaaataacagtatgcccacaatttttgtttgttgttggtgttcagaagtgtatatccgtttttgagaatggaggctcagcgagattaggagccttgctctcaacgagggaggaattctggctgcgactctgtcccttactacctgggcatcacctctgtcaaacctggacaggtgccacttagacctggctgaggttggctgaggcggggaggatggggaggttgtgggtaggcagcacctattcatacccacagtccagggactgttccagaagaatagtattccctgtgcccttgccgcctctgagccttggtgtcccagcctttcgatcctctcacttctgatgtccttgagccataatctgagccattctctaggataaggagatgcttgaggttgagtgaaaggttgacatttctgcaggagcaaagaatgacttgatgcaggagagaaaggctgtggggggaaagtgagtgaggcaaatccccaaggcagagcagagccttccaaagggtgcaggggagagtcttggtggagggggccagccttgctcagcagccccaacctcaacaaggacccctacccaagaaggcctgcaaaatagcaaatcaatgaagacagcaatgaaagcaatgaggagggaagagggaccagaatcccagtcacatcatcacccctcacccctttttctggcctcagttttccttctgtgaacagagggagctggcccttctgtcatttgcaggattttcatctcaggctggcagcaggagctggaaaagtgagggaggtccctcccttccccggcccggggtctgtgattggcagcacctcctcctctcttcctctcctgtcccttccttccccttccctcccctgctttcctttcccttcccctcctccccttcccttccccagtcttcccctcccactctttcaagcccccagcgtgctgtgcagttattagtttaggttcatttagaatcggcttagcaaccccacacccctggaacctggaagcttaaagcacaagatgtctggcaaatggaaattcaattgctttaatatagagactattttgctgcagtcgaactggagcctcttattaagaatctgatggaatttctaaacagggagagaggccccaaggagggggcatcgcccatcacacaccaacattgctcttgacatatttatggctccaataaaatctcacatctggtatattttaaaataaaattgaaaatttatcactt

SEQ ID NO: 1050 - DNA, 606 bp, Homo sapiens
tcctcccagtttgctgaatcagaatttacagttcaccaagatgccccggtgattcagccgcacacagttccagaagccctgagctagttcgtacagtgttctttacccacgctcatctccctggcctgaatcacagcgtgtttgacttgctcaagttgtagccatggctctccgtgttttgactgtgacctacagaaagaaacggactttacaacgaggaagcaagtacaccacagaaacaatgccttcactacctggggtgcactctgcactcccattcattcagcaggtagttttggcacctgctttgcgccaggcctcattctagctgcctgtgtctagaagccccggttgttgggaggtttctattctaggaggagggcaaggggatcagaaagttaaaagtaaaccatgtatataaagggcacgctaaaagatatttattaaaatctttttttttaaattacatttttagggtagggttctggggtgctggttatgttccatttcttgatctgggtgctgggtgtattacctgtaagaatgcaagctttcagcacttctctggaggtatgctgtacgtcaataaaaagttcaaaaattaca

SEQ ID NO: 1051 - DNA, 592 bp, Homo sapiens
tcaggcctgtgattaggctgtgcaacttcctcgctgtgtggccttgggcaagtggcctacacccttgtgactcagtttcccccttgggttgctttgagaactaaatgagcggccaggcacagtggcttacacctgtaatcccaacactttgggaggccaaggctggtctcgaactcctgatctcaactgatccgccctcctcagcctctcatagtgctgggattacaggcatgaaccaccgcgcccagccaaagatgtaatcttgatcatgccgtccccagcccctcttagctccagagcctcctataataacagccctcgtgggcatctggctgggtgccagccccattcacaggctcccacggagaccttgtctctcaatttcctcctgcatcatttttcttttagtcacttgtccttctctgagcccttctttgctcactttttctttagagccaggatctcgctttgtcacccaggctggagcatagtgacgtgatcatagctcactgcagcctcgaactcctaggctcaagtgatcctcttgccttgccctcccaagtagctgggactacaggcacgtatcaccacg

SEQ ID NO: 1052 - DNA, 4037 bp, Homo sapiens
gcccatccctggattgatgtagtagccagcagcaaggacatatgaagggtctggaagtggaaggctgccacccctgccctgctcccacttctgggcccccagggatcccctgacataaacagtcctgcaggaggaaataataggtggacttgtccctgtgacacagtggagataataaggcccacccaggttcaagaaaagtggggcagcaggggaaggggatggactttacctcctagtgagaagatgataaggtctggaagaggaggtatggcaaaaaatattgctgtggccgttactagaatatataatctgacgcagttacctaaagtgaaaagcgtgaaataaaggctgaagagatagggaaaaaaagtacatttaaaaaaaaagttgtttcatgaatttgaaaacaaaatgaaataaaaagcctattctaaaattcaaaagtcagagaaacaattgaacctaagtgtgtactcaagatgctggcataaccacttgataggaactacccctagttattttaaaacgcagttatttgactctgtccattaaagacaattgaaaaccaaaaaccaaaacaactgcaaagggaaatcttaaagtattttcaataatactgcttttggaggtagtgttggtatatttattgttatataaaatatagtataatattgtgtgtattgaaagataaatgtatatgttaatttggagaactagaatattgaagtatgggaggaagaagatgcagatataagaccagcgagattaatttaaaatgctagagaattggaagtgggattatacatatgaatttattaggtgttttatcttagaaattcatgtattctctttctactaaaaagccctagaaacagtgaccaacccaatagcaataaacttccttagcaaatagattatggtcactagtgatcattttctagcaaaagaaaccaagctgtcttgagaaaatgattgagtttatatttgaggcaggaaataaacaagaagaatctgtaaaatcttgtcataccaagaagcagagaggctatgagatgtcattagggtcatgtcatttaaagaagccagtatgagtagctcaaagatgagataatttgagcctcaaaacaaaataagtgatttcaatggatttaaatacactaaatctgtttaaatacataagttcataatgataggggaaaacaaaattatttataggttaccttacaaagatgatagaaaccatctcattattttagaaacggaaaggaaaaaaaaacataaacaactatcctgcctttgttttcagaattccttgtagaaataattaactagtggatgaagagagtttctctttctaggtaataagcaacgaaaaaatggcagaattagaatataatgaatttgcagttcttactaaattaatatatctaggcagtaaccatcaataaaaagaaagaccatatgacatttgtatgtcctgaagtaagttcacaacgccatctagtcttgagccaaaaatactgcacctgaatctgatccagcctccaggatgtatctatttataggaaacacagtggacaggcgaacatgttaaatgacaccacagagatgcaatctgcgaacttccactgtggaaacaatccaaatgattcaacacgatgttgcaaagacaaaagaattatacatgaacaggaggctggatgaattaaaaaacataagagatgtatcaatcataatctttggttctaatttggattctgatttaaaaatagactgcaaaaaaatttgttagaataatatgaacaaagactagatgtttgctgccatttagaaattctcattagtatttgttcagttatgataatgcatgctgcttctgttaaaaaaatacttttaatcttttacagataccttctaaatatttatagatgaaatcatatgatatctagaattttctttaagacaatctgtggaaggggtgagtggatgtgtgctcaggtgagctaatggtagccatgagtttaatattgaggttgagcgatggatacagagaagttcatcatacgaatctctccactttgatgttttcttgaactctccaatactaaaaatttagccaaaaaaattaacaggggcaacgaactttcttctttttccaagggctttttatcgatgattttaagaaaatggtcagacagcgcaggcgtgttttaccttagtccttccaaagcagtaaggtgcacccacttctcagccaccctccctgactttgttttcacaacccgaattcaccaggaaaataccaggagtctgctttgtattgtgccatcttttaaataatgcctcactttctagtagcaaagtacctcattctttttcttgatacttcaaaaaaacaaaatgaaacaagaacttctcattagctgaaagtgtttttatctagtgagaactgaaatcttcttggcttatttcctcttagatctaaacaatattaacttttttttttttttttttcccaaacagagtctccctctgttgccccggctggagtgactgcagtggcacgatcttggctcactgcaacctccacctcctgggttcagggaattctcctgcctcagcctcccaaatagctgggattacaagcatgcaccaccatgcccggctaattttttgtgttattagtagagatggggtttcaccatgttggccaggatggtctcaatttcctgagctcaggtgatccacctgcctcagcctcccacagtgcgaggattacaggcgcaagccactgtgcccagccttaacaatttttttttgtttgtttttgaggcaaactctgactctgacaccaggctggagtgcagtggtgcgatcttggctcactgcaacctctgcctcctgggttcaagtgattcccctgcctcaccctcccaagtagctgggactacacacgcaccccaccacaccgagctaattttttgtatttttttagtagagtcggggtttcaccatgttggccaggatggtcttgatctcctgacctcatgatctgcccacctcagcctcccaaagtgctggaattacaggcttgagccaccgcgtctggcccaacaaatatttttaagatgcattgtctactaacaggagatgcctctgattctgaagtactttgcgataaacagccacacaatagccaaatgaaatcttgaaatcagagggttgctttctcatgaagttagactgcttgagaattgcagtggcttctatatggcaggtgcttaaattgtccaagttgaaattctaatttttataatgagtagggatgagtgcatgaaatggttgtgtgtttttttatttcctacatacaatatcgaattcaatcccaaacttgaagcattgatgtaattgaaacatgttggtaattttaaatcgtgcagttctgtacatgatcagaatcctaatcattattaaaataggtgtttctattatatgcatatgtataaaaagtcctccaaaatgttaaattacctttctcatctcaggaatagagtcccaatcacttccagattgaagcacttacggggggaaaaggcgaagggctccagtaattttaaattgcttcgtacaatgaagagtgcctgtaaattactgaatgtgggttcttctccgtgtggatcacattaagggagcgtataacctttcataccgcctgactaggatgatggatgtggaaatacacagtttgggagccctgtctgcttgcctgttaagccattgactgttatatactcttgggcttgaaacaccttccaggctggaggggccagtattgcatttacttttatcccatttctgttttcacggctacccaagaggaaataatttgatttggggctgcagggggtagggtggaaaagtgcagtcggaagacagagaaaatcagcaagaagattactgaaagggaaagagggggaaaccaaccagctatatatttcctgcaacatgagttaatgaaattccgttccttctta

SEQ ID NO: 1053 - DNA, 629 bp, Homo sapiens
tccagaaattaccagccgccgccgctgcgccctttctagacaaatcccacagcagttcacccggctcccccaaaaccgcagagcttttctttactgagaggaccccttggttccaccaattcccccaaatccccgtggctcccgatctctcatccagggggactagaagaaaagattttctcagcactagaagaatacttggagcagcaaaggtgcccgtggtgtctttctaccattcaaggggtgtcctcctgaaggcgtctgagagggcctctggcggttccaaggctgtgcagccggggaggaaggtgaggaatatcgtgggtaagaagaggcaccaaaatcacagaatagagaggaaaattattgaggaaatgtacttgcctgtgagggtgaagctggcatttcgaggtagaaggggactagccttttttgatatctaatagtttagcattatacgtaatggactcactttagcactttcatgggaggaaaaaccaatctgagctctataaatgtggctcttggcttctcactgtgcatgcttttatgtagaaccagagtccatccttagatatttattcagcttgctggcactgaagcaacaataaaaagatgcctctaacaaa

SEQ ID NO: 1054 - DNA, 870 bp, Homo sapiens
gatatggaatttcactactgttgcccaggctagagtataatggtgcgatctgggctcaccgcaacctccaccacctgggttcaagcaattctgcctcagccgctcgagtagctgggattacaggcatgtaccaccacacccggctaattttgtatttttattagagacggggtttctccatgctggtcaggctggcctcaggtgacccacctgcctcggcctcccaaagtgctgggattacaggcgtgagccacacctggcctaaaaatcatttaattttttatgcttgcctagttataaggtcaaagagaatcaaatgactgatgcagtcagcacctaacaacctctgtatatgggaagggggtaatgagaacatactatttggaaataataacagcctaagagccaagtgctgaagttacatttctgcctaccacagctaaagctctcctcactgtctcctacccagtcctcctttccatcaattaccagtctcttgtataaatgtatccattaccaggctcacagactgggagtgatttttctcctttggagctcgtccagaatccatcagcctcacacacatatttacctgcaaatcattggaaaagcaaaaatgtttaactgcatgtataagatggttgtcatttgcttgaatacccccttgaaaaatgttgattcttgagcatcagtgggacatagaggtgtctgaagaaccattttacatgatttcataaataggaggtctctgcattaccatgtttgcttgcaaagtggaaaccttttagatgtgtaacttgaatatgtatcaagatctcaagtgcttaatgataaggtgttgacttgttaaattaaaccatttggaataca

SEQ ID NO: 1055 - DNA, 1699 bp, Homo sapiens
agcacttaatacacattcagccttcccatcatgtcattgtaccttggaacaaggagcaaataattggctgtgggatccccactaagtttttgttacacgacttcccttctctgtagaatgggcacacgatgagcgaccaccctctcggagacaaaccactgatgaaagcgaggtgtaaagctccttgtgggcaatctgggaaggacagaactcctgagaccttgagccccaccacaagagcgcccggaaatcggttcatttccgagcccagcacgtacgtgcccgcgggttcctctgccacggcgtggttggccagactctgccaggcccgctcgcaggtctccagcgccgcccggaagtccaggtgcaccaccaggaggtcggccgcctcctccagaaggtccacggccggcgcccgggccgggaccgcgcgcaccggctcgctgctgcgcaggggtcccccgagccccctgaggggggctgcagaggtcgaagaatcgctcttcataacgagtccgggtccaaggcccaggtcctcagacgtcggagtgaccgcctccccagaggctccgggatatcccgagttggcctgggcgaagagggagagtcctcatctctttgcccacaccccttcccgaggtcgattccccgagaaggaaaaggaaggggcctatctgaggcaaaagctgggctcgcctggaggctggggaagcagtttacacgtcagatttgcaggattcttgcatccctggaatacctggccctagcttctccggccccgcgacacgtgcaggaactgcctcagctccgggctcctggttacgatcaaagactcacctcgcctcccggcagcgggcgcggacatctttgcgctcgcccagccccgcagccgcgcggcgtcccggcggcgcggagtactctaggagttgtagttcctcagctctcggcccatcgccttctgtaatggaagtaggaggcagagcgcggactacaacccccagcacgccgcgccccggaagccgcccctgtgccgtgagaaaacaaactggtgctacagcttcggggtgcggaagtcaaaacgaagcaaaaccgaagctgtcttgtgaaatggaggggtcctcactaaccagttccagcggaggctaacggaagaagtgccagcaatggatgtgcagctacatgcacgcttttaattcagagcttctgcgacggtggcgatcaggggatctgtaatgtaatgtaatgtcaaggctgacgcagagctgatcaaacattttggcaaccttagtcttgaattgattcacactttctccgcgttgcctccggagtttgctgtagggtaatgaatattgcctggtgaggatgagggacttagggtggaaaccttcacaaggaccactgagaatatgttggtcccaagggcaatgttccaaaatgaatagtgaccccaccgaggcggggttgggggcgctgagcataagggcctcatttttctcactgctctctgccccatcctgaatttgctgttaaaaaacaacgttaaatgcagataccaattccacttccccactgttgtcacttccgatctgtctttatatttctccttatcatttatcaccatctacataccaatgtctatattttacttatttttattgtctatttccttccactatgatataaactcacaaaggcagac

SEQ ID NO: 1056 - DNA, 525 bp, Homo sapiens
gagccatgctattgctttagagaagcttctccttgtcatctgctccctagcctggataacacatggaacacttgaaacagaatatctagctgagccccagacctgaatacaacatgtttaagaccacagaacatctgcataggctgtaaatttcgttgaatgatggatgcaaagatggaagacagatggatagaggaaaagacagaatcagatactggatgagttagtactgctgcctgtgcttcagagctgtcttattaccacaaggccggcaagcatcaatgtccccacatccccctctgcctccccctgaaatgtaccgatttatatgaaaattaagattacaaattaaagcctggctatcctggagttttccagttcatcagccatccaataaaaatgatgtcaagcctgtatgcataattcccggaagattactttcgtccttacagctaagccctgtccctgatatgaaagatctctatccacttttattgaaataaagaactaacatcataatcccaa

SEQ ID NO: 1057 - DNA, 2034 bp, Homo sapiens
gtgagcgcacgcaaccgtgcagtcagattcctccgccgaccgcggccctctctcctcgggctttgccttcgctctctagcttttcttctttcactcccgctcgccgactccagcccgctgggctcacgctctgccggacaccaatcccggcggccctgcccgacggagctcaaggctaggcctggccttgtccgcggagtccgcccctcgccgccaccgggatccgcccccgcgccgacacgcacttccggcagcgccgcggccgggagggaccgagcggggagcaaggcctgcggggaggcgcaggatggacgcgttggctgtcatgatgtaggacctcctgacctagaaccatgcccggcgcagggagaacaacgagcttacggaccgggtgcgggggctgctgtgcgagaaagcctacctgctggcccgggagcgttcgccggcccacctggtggctttccctggacgtttaacggcgactccgcccggcctcccgactttttgatgcaggcgttctcttacatgactttcttcgaggctagattctcgaaagacatcctgaaggtggctttcttaattagctgcctcaccggctggcggagcagttcgtagtcgcctacatcgagagggagagccccgtcctggctcagtactggggcttcgtggacgcgctgtagcgggtcttcgccgtcgtgggtaggaaacagtcgggccggatccccggtgtctggggagcggctgccggccgggcccgcgcgagccgcttcactcctacaagcccggctcactagttccaagctgctggactttgaccctcgctgggaagcttgatcgccgcctgttctcgccaatctctatgcctttgcactgcccagcaacccggtcactgcccaggacctgttaaaagttgaatggacctcccagaatcacgccgctgccaccgccgtttctagagacggcttttggccacctttgagaatcagggtcaaacttggaagggcctgcatttgtcacacttcctcggacactaatttggatagttcaggcccagagacggcttcccgggttagtgtgcctgacaacactgaagaaaaattgtgacattttccttccccagaattacttcgttttatacatttcacttctcttctgaaatcacagcaatgccagtttgcgccttttggtctgaggaacgcaggccctggccactaccaggaaaaagtatttacttttaaaacttgaatgtatatctttaccgtatgcctagtacagtagtgcttggaagaaacagattagtaagacaaaatatatgtcttcaagaacacttacgttctgagaaagaattctgaatgcagattctaatgtctggtaaaatgctttacagtgtaaagaatgcatatatgattcttattttatggcattttaaactttccaccccacggttttaaagtgttaatatatgttaaaaatatatgcaatttataaaggagaaggaaagcccagcttgatttttgctgccaaagatggtatatttaaaattaaacgtaactaatggcaaaaaataatgggaatggtgcagtctttgagctgtatccagttggcattattctcttggactaaaaggaatagtattaacttcctcactttgggtaagccactttagatttttgggctgcagttttctcaggtaattagagactttatattatgaaagtttggttcacaattctttgagtctcttttgggaacaaagaaggtaagaggaggatatgtgccctcctctcaatcaaggggtttcttgaaaccctctaaggagaaaaatctgaaactgcctttcctaaaacgttcatgggtttgtcattctgatgatcaatatcgtcccactgaagtatctttttgaattcctagttaggaatctttatgttaagataaactgatcactctctccttcgtggacagtttatctacctaaagatgataggggaaaacactgtttttgaaagacgaaataaagacatgttgtagcagtta

SEQ ID NO: 1058 - DNA, 367 bp, Homo sapiens
acagaactgtctcggaaagccctggtcctcgcagtccgcctgagagagtagagaagaccccctcccagaaccttcctgtaaggtctccccgctgacttcctgtagtggatgtgactgtgtgccaggtgcctgccgaagacccctgtcactgactgtgccctttgggaaagagtcaacaatggcctcctcctatggctgacttcgttcatgttcaggctctccagcttgctagtgagaattgccaaggattggttcatggcaggatagaactaaactgatagatgaaagctccacagtgcttcaagacggggtcccgttcatgttaagcagttttccttccttcaaaataaaaaactagcagtcctta

SEQ ID NO: 1059 - DNA, 4275 bp, Homo sapiens
gcagcctcggaattggctagagcgccagagccgagtcagccataaagctacgcgctaggctcttggccctgacgtgaggcgcgcagagatggcgtaacgggaatagttttcaacgtctatttcattccctgcttcagaggacctctttaatctttgattttggtccctgtttctaagaaaagcaactgaaaaggtcgtaataccgcccctgagaaaaaaggagcagcgctaaataatcgagaaaatgcctcctcttgaaacggatatagagatggaaacaagatataagaaggattgagaatcatataatacaggagcttaaacacctatgcgcgatgataaagagggtactattagagcgcttggaaaataccaggaagttgagagagttaacagaagggcgcacgctggattggccacaaaatcgaattactgaaggccactactgattaggacacttatggagaacgtgggtagcactgaagcagcattctagtttccagtgccatcaacctcatacgtatctacctggtctctgatcgaagctaccgtaatgtgttcttgaggtcaacatgttttgtggaagtcactgtatttgcccctttatgtcaattacctattataaaccgagagaaatgggaaaattaaaaacctgttttgaattatttttaatgcagaactattttttcaagtgaaatcttatacagaagtctggtatatgaaacagataaaaatgaaccaatgagattgaagggaatgagtagcatgtaatcctgcccactcttcggagaatttgaggcaactttgtagagccttaggagttcagtttgtatgttactgggtaatttaaagcagaaattttaatctgactgcacttaagaatcatctgaagtgtttgtattggttagtcttatttttaatactgatgtcctggtctctctcccctcaaaaaaactctgctgctgggaccaagcacatagatgctttttaaaaagctcccgaaaatgactctaatatgcagccaggattgaaaataactaccctacacagcatttttcctgattctgagcactcagcttttcattgattttccctagggcaagtccttcatcttattctgggtccttgtgttttctttctgaacctacaatttctccataggtcccatggttttcaaaatttctcattttccattttctgtccttttatattacctacttgaaaaccacagtcatctttcaaaacaaaacactgcctgtttcttaggtctttattgtgggcttgttattcctcaatacaaatttacataaaataataacaattaagacatgggccttggtgtcagaattattttatatctttcttattaactctgcagcttaccagctctggataagttaaaggacagctatagtcttactacatagaatcattataaggaattggtggagtgatccttataaagtgtttgcatggtacctagcacagagaaagtgcttgaagttgttaactgttatggttacaaaatatgtaaataatttttattgtccaattttctctcttcatatacactaaattgttctaattcttgaaccacagtaacaacgtgtgaatgacttatgcattcagtgtgtccactcaactactatttattaagtacctgttatggtctatgaaaggaactggcaagacagtcattattccccttaaatattcccaagtgttagtggtcaaagtttctctctgctgaaaatgaaaagtaccccgtaggatggaggaaacagccatcttgagggctaaatctggtctaacataatatttgttgacctgttactacagtgttgccacatatgctttgttggttttttaatttagcccccaaacattttaaaaatcagatcatttcatgttaaaagaaatctagacttctagttctcttgcaaatgtgagctctgacaaacattgaaattatagagtagcaggggtagtgtgccctttatttggtgcatgtcttctgcaggttcccaagttctgctgttctctgttgttgcctcatcactgaggccaaatgtcagttgctgcttacatgcatttgaacagttgttattttttatagtgaaattaaaggtaaactgttttgatatccatgtttctaccaaaggtaagaaaacacaagccaaaaagacacagatttcaaaaaaaataagagaaagcataattctttatggaagtgaagaatagtctttttatctaagtatgccaaaaaaagcatgtataaaaaaatacaatttaagatgccattatgaaaaaactccaagtcagtgtttactaacatcttttcagttttaggaaggaggcaggttgtcttgcatctcattggatctccggtactacctatttcttgaaataccataagtgctaatatatacttgcaatagataaacatgaggagtattacaaatacaagagatagcaggaactattttaatattaagagatatcaaatatgcacgctaggattaataaatgaaataattattttccttcttctacaatatttacttaatctggaggcagaaatacatgttgtctctcttcctgcttctccatcaaaatcccgaccaagtaatcaggatctttgagaatcacaataagaattacagcctcatgtttggattttttaaatttaaattttaaattactcctttccactgatatttattgagaaactgctatgctccaggtactgcgataaacactgggcaaatgttggagagctaaaaaggcatattcctcttataaagacattatttacttgtaacaaacaagtaaataaatgtattagtcaatatgtaagtaaacaaaaaaatggacaagcacaaattatattaagtactatgtaggaaaccaatagagtactgtaacagaataataaggtatatgggatgggggtgggaatctgttcagagatgatctacctgagaaggtaacatgtaggcagagatctgaatcgtgaggagtcagcctttcagagtaagtggagtaggcacttccaagagaaaagcatattcctggctatttgcctatcaatgtcatcttgaacaagggttagcaatctcctacctgtaccacagatgctatgtgccacctccatgctacctttgccaccaagagattcaatgtgatgcatgatttgaaggttcctcatcctgataccctgtggaaagtaaaatcagtgacaaataaaagcagatcattatctcaggtagagtctgctaaagatgatacttgcttgtcagtacatgagtatccaccctagtaaaaaaccacagaagaagtgggatttatcttcaatgttctctcacttccccttccaagtgcctctcctgccttctgatgctctttcccacaagttgcaggcaaataaagcatgtatattactctctttttatccagagttgctccttgtccttatatgaagtagattccagacctcacaattgtatatgcctacccttctactccaacccctcaaaaaaagaggaagaatgaaagaatgaacaagagaaaaggaaggaagagagggagagaggaaaggagggaaggatggtcctgaagatcacagttcggtgctgaaaaaagcatttctattaaacttcaagacagaatgaatgaccatagctaataatgtaccttaagcttttctagaatctttgtattaaaaaagttgattgttactaaatgtattttaatctcataaaattttaggaatttaaatgaagaatttcacaaagggtaagaaaaattatatattatatttataaatttgtcattatgattctcccattgtggaaaaaaaaacaaaatctcggtaccccaattcacaaagccaaaaggaagaaagtaagctgaacgctgagtcatgcaagaaactgctcgcttttgttcctaagctaatagctacagataaaaggtcagatatctccataggtaggtactctatgttcaccttatgtaaagtgccaatttattgagcgtaagaggattacctaattgactattccccagcctgctccttttctcttgcaacacatggagtcagcaatgggaccatatcctctctctttcccctccagcctgctttccccctttaaatactgaagccctcaaaatcatctttctaaaaaggtatgaaccatagattgttcctgtggatttgtgtttctttcttccgggcatatccttaagcttggcaaaataaaattctaaattgat

SEQ ID NO: 1060 - DNA, 268 bp, Homo sapiens
caattctgtattcactttttgagtgcataagggtaatagaaaatgacatgggaagcgttaattagaaaaaaaggcattttgtttatgtgcatttgaggatacagtgtttgaagtttctaaataattgttttatgacattttcttggtacatagatattgctaacaattagtttgctgaagtatgtagaaacattttaagaaatgattttagaaatataattgttaaagtacctctgatgtatattaaaaatccttttattttggttta

SEQ ID NO: 1061 - DNA, 3217 bp, Homo sapiens
attctctaggcgaaggagaacaataagaggcaggtaaagctggagcccgtaacaggaggaaacgtgagcattgaaaacccgccctttggatgaactgaccacagctggacaacaccagtgccaggccagggttccaagcactgcagagatgaagcaccttcttccaggagttcctggagttctcagaagccagagtggacttgttcctccgttttatttgatgaggttctaaatatagctgggcaaggcttcggattttagtgggagatggccagaggcgaagcaactgataaaagtagctgaatagctctccctctctgagctaggtgcaagctcctgacgtaggaagcgatccctccttgccacagataacccacgtagccaggtgctgccaagcagcttccacctggaggagggcagctgctctgcgcatgaccagtagctgtggatggcatcgtcgaggcatctggaggaagctgcagccccacaaggcccctgacccctctgcctttccctctgctggctcctcttcctccctctttccctgctgtcccctgtagagaactttctaccagtccacacaccaacctaggtgcagcccccctgcgtgactccctccctgactatcataaccatggccagcagtatctccacatctctgcccagatccccctgggaaggcttatcccaggccccaggtttggggcaatgcccagtggcatcggatggggtcccccttgaaaggaagcacagaaagactgagccatcaacgtagtcccctccatcacctgccactgtccccaaaatctcccacaccggaagtgtttagattgtctaaggacaatattgtctagggtttgaggaccaccccacagcaaaaacactagaaagctagttccaaaatgcaaatcccaggccaagcccctcacctcctgaggcagcatccctgggtatagatctcagaaatctgcagttttaatacaaaggccccctaaacttaaagaaacagcctgaattcacatgggcacaccttacctgagcaggcaatacagtgacaagggtggaaacagaggggacgagacctgacactgggaaggcctgacagagggaaggaaggaaagctctcaggctaagggcgctgggaaccccactcttccctctagggagttgccgttccctgaggggcctgaggagcctcctcctgaagccccagctattcaaattacaccttttcttattaggacatcaggaggtgttgccccttagctttccattctaacctcctcaatgtaggggccttgctggtgtcgaggacagagcggaggcctcaagggtatgtgcagtctaggtggccttggtggaggggcaggattctacatttgggaggggacttcttgctgaactccttccagatgggtcaaatggggtagactgagggagtggtgtgggaggtggtaaagaaccaagtagggactggatggatcctgggagtttacagggctgcctcggagagggagggtgctgagagagaggagaccagggtgggcaccaacgcgatccctgcaggctatgagtgtaggatcagagagggttaagggccagaagcccctgtgtgtttaggactgtggcaccatgggtgcatcccctgagaagcgaagctcaggcaggagcagcagtgggcaaagagcctggtggtgcaggtgcaggccctgtagaggaggcagtgacaacacccagcccaggccgactctctctgcctgtcccctgagtcccctggcacctctccacatctgctcagccctcccagttaacctagcactggtagatggttgatatgatttggatctgtgtccccaaatctcatgttgaattctaatccccagtgttggaggtggggcctggtgggaggtgattggatcatgggggtgaatccttcatgaatggcttagctttatccccttaatgctgttcttgtggtagtgagggaattcttgcaatatctggttgtttaaaagtgtgtagcacttcccccccaacactcttttgttcctgttccaactgtgtgaagtgctcactccccctttgccttctgctatgactgttaagtttcctgaggccttcccagaagctgagcaggtgtcagcatcatgctttctgtatagcctgaggaaccataagccaattaaacctcttttctttaaaaattacccagtctgagatatttcttttcttttctttgagacagggtctggctctgtcacccaggctggagcgtagctgcacctctgcctccagggctcaagtgatcctcccacctcagcctcacaagtcactgggaccacagcacgtgccaccacacccagctaatgtttgctttctttgtagagacagggtttcaccatgttgcacaggctggtctcaaactcctgagctcatgcgattctcctgtcttggcctcccaaagtgatgggattacaggtttgagccactgcactcatcctaggtatttctctatagcaatgcaagaaaaactaatacgaaggtgaatccatctgcagatccagactccacaggaagccagcaagtgtgattgcgggctctgctgcatttcaggggcggttctatacttggcacgtgcatgctttccccagcctagcatattagcctgctggggctactataacaaaataccacaaactgagtggcttaatacaactgaaatgcattctctcacacttctagtggccaaagtccaagatcaaagttttggcagggttggctccttctggacactcagagggagagtctgtcctgtgtctctcccctggcttctcctggttgctggcaacccttggcattttttgcttataaatgcatccctcttatctcagcctgtactgtcacgtgaccttcttccctgtgcatctgtctcttgtcctcttcttctaaggacagcagtcatattggattaagggcccagccactccagcatgacctcctcttaacttgatggcattcaaagccatcaggtttggaaacaaggtcacattaccagggaccggaggctaggacttgaagataccctttgggaggagacacctgcaacgtttggattggagaagactcagtgaccttctgggatgtcgtttaccctccctgggctgcagcttccttgtttgtagaggaagaggttaaattaaacaatctcttccaggtc

SEQ ID NO: 1062 - DNA, 6103 bp, Homo sapiens
ggccatgtgaggacacagagaaagcaccatctgtgagaaacagggcctccactatatactgaacttgccaccaccttgacctgggacttcccagtttccagaactgtgagaaataaattttttatgatttacccagtctaagatattttgtgacagcagcaggaatggactaacatactgggtctagcaaagagttctcaagagatggggcctggatgtgttgcttaggctgtgtgaaacacctggtcttaagcgatcctctcaccctggcctcccaaagcattgggattacagggagaaaagaatgggaactgtgaggaaaagaatgacatgaacaatgggaagaccaaggtcccagcacaagtagtagatgctgaggaaagaagaagtatgttgtggagtaagtgagtgggcctgagttgagaagatcctggccttggattttaaaactgtcaggaattgcataaattcgctagaatcagaagtcagttgtcctgatctcagaacaatttggtgtgtacaaagtccaaggtttgaaaactcatcaagaagtcagcatcctgcaagaatcagccacccatgccacactttctatagtaacttctgttctgcatcagactacatcactctggctttctgagggcactattccaggccagtgctctgggaggaattacccagaatccctgtagaagccactactgatgtcagctacaagaggaagggaacccaagtggacttcagccagaacaaagctctgtcacatgttggaattttactgaacttgaacaaattattcttcagaaaaagtattttaaagtcaaaagactcctagatgatttctaggtcttttgcagcattaacttcctttgaatcaatgccttcaatgattatttaaaagaaaagaaagaaaaaatcagaaagtaaagaaatggatttagctagtaacctttaaagaaagccctctttcattcatttttcttcaaagatttatgtgatttttttcttatcttgatgtataataataagaattagctgcaaaaagctacaagaaaggttgcataagtgcatacattcttttcgagttctgcttcctgtggtagttcttcacttttaatgatgagttgctgaagcaggcactcattcttttattgcatcatttattcttgttatctggggaagtaacaatgacaagctttcctaagtaacagcccaactcttatttgtggccccttttcctatgtcaatattaggatcattctatcaacgaagaggtcctattacctaggaaaccatgaaaggtaagacctatgatcacaggtgcttacatgcatgcaaatgtaaaaggaatacttaaaccctcacctaacttctttggaagtttcagtacacagtttttgttgataggcaattaaggtgcgtgtgtgagtgtagtatgtgtttttgtaagaaaaaaagtagaggaaatgggagataatttagtgtgctggaaagttatagaatttgatatcttgttttgcatagatgatgcattgtaggagtgacattattgtgaaactttgttcagtcggttttccttcaagcgattttggtgcagtttttccaatccagtgttaagggcatgacgatgtatttttcacaagcttgtctaagaggaaactctgacagattatgatgaggaaaactaaatccactcatgtcatgtaaacacatagaagacttctcagtggggtctctgccttgtacctcagatgccaagggggagtttgagatttgtcaagttgttgacaactgccttagtccattttgtgctgccataacagaatgacacggatgtggtaatttataatgaacagaaatttacttcttgaggctgggaaatccaaggttgaggtgccagcatctggcaagggctttcttattgtgtcatcatatggtggaaggcagaatgtcaagagagaaggaggaaaccaattttacccttttataaaggcacccattccacatgtaagggtgaagccctcatggcctgccaccttttaaagactccacctcttgatactgtcacaatagcaactgcatttcagcatgagttctggaagggacagtttccaaaccagaggagcaattgcctatcagaggttgcaagaaagaggtattttactattatttgagctaccatttttagctttatccatacttttagaaataggtgttttattgaactccaattatccagtttgagaatgtcataattttttattaggagtctggctgatctagtcattaaaaaagacacataataaatgtataagcatgtttttaaatggacagtttataagttagttaataatattagtgttaattactgttaccactaaataaataaaccactacattttatgttctttcaacaatctgaaaaaaatattttgtaaaaaattactgtaatgcaaaatttggcttagttagcaacagagagggtaaatatctgctttaaagatcacaatgtctgatggctatgaaacagatgagaagttttgagaagatgacatcaatatggtgttgattggtttcatgtggctttgagcttttctgccactgggaagatcactactgtacatagtttacatatgattcatgtgtgatgccagattgcagcttccttcttgctgtatcttaagtgtacttggtattctgattcaagagtgagatcttgaagctttggcaaatagaattgcctaattttcatttgtccactaagcaatgcatgcagttaaaaaaatgaaaacaataccaaacctccttcttttgcagtgaaggagcccaaaacaagttactctctttccgtctctctctttaacttagaatattggttattttgtattctcacacatgtaaaattcctttcctttaatgcatatgttctcaataaaaaagaattttccactgaatttccaggaagactcaacataatttaaagatggcaccttacaaaaagaactctcaatagacaagaagaggaggcagtaataaacaattattttcaagacagagttacctaaaatctttccttggtttcttaccggctacaggacacttttcaaactctttggtttcactttgacaaacttgcttcttgcaattctcctaaggttgtgtgtatacaaccacgtgggatgtggtgaatttagtcggccacaatgtaatagtctcttctctatacataaaattagattactaaaatccctatgtaagaaacttacaatcccgccagggaaaattaggattggggaaatgagataattagttaatctctcaaaaatctgatgaacatagtttatgttttctaaaatagagccatgaaaacagcccaccaaataatgagaatgtcaatatctcacacgttccttcatttggtaattaatagcatggaatggatatatattaatttatcattctttgatctccagtgacttttcagtatctctgttctcctttttccatatattaaatacagaacttatacatttgttttgtttgatggtgttaatctacagtgcagaagagtccctgtgtttgtccactgtctaattttcaaagcctctctgattttatgattttaatttaccttttatcagtgtggtttcaccgcatttctgcagacattcatgtggatgcctgagctgaaaaactaacctcacgtagtctttatttctcaacttgcattccccagtgcagggcccagtggtgccaattctgaacatagtaaatttacaagaaagcccttcctcacctataacttcagggatgttttcacccataaaccaaaacactcaattgcaaggtttggggataatcttctcccagctctctttctctctcctacagtttcattgcattgcctcatctctcttttatcttttcccttatgagttatttcagcttccttttcttaacttctagtttcctatttctctaataatctaagtcagggagaagtgtaaattcatgtgcatggaaactaaaatttccccgaggatataatgtacagagtaaatccatcttcactagaattttagaacttgagatcgggcatgtgtgattattctacacatttttaatgggtctctgtgctttcacatgtgattttgcctcttccaaaaacagtctttgtgttcttcaccatctgggaaatgtgttttcatccatgtaaacccaaatcaaatgccatttcctttatggaaaattatccagcttcatcaggcagaataattagctcctctgtaggcaaatagctccttggtctatttttgccaaagcaagaaaatcttattttccatacctactatgtgcttggcattgtatcagtacacatttctattagtgcattctagcactacatattttcaggcctatcttatgtgattggctttgagcatttccagagcaagtatatttttgcttcttatacctacctcaggatttaacatagtggtgtctggcataactagacatggtaagaataaatgtttgttgaatgaatgatgtgtgaatatttgaatgagcatattatatgagttggtaagactattcagttgctggatgtcaaaactaattaactgaatgtatttttatctttggctttttattagcttggttgcaaattctgtgacaacagaatctgtgtctttcattctcatctttacacccccagttccaggtacctggtgcccaacaggcattactggatatctgtagaacttatgattaaagaataaaaggataacagtgtgggatgaaaataattcaatctttgacctttttttttgagtagagacaagcacattaaatttgatttttgtttagccctaagcagcatcgtagttctgtatcacttttataagcagctagacatggaaaaggtaaaagtaaggacagaggatggaggcataacctattcagagtcaatcatatgacttttgtctgaaaaattcgtacataaaaaaatgaatggtttgaaacaaaagcgaactattggatggaagtaatttgcacatttaaaacctgtctcgcaaccaagtgcatcagttgattctctggcaaactattgctttgccttttcttatccaatatttgtttgtttttgaaggaaaaaaggtatgtgactgagaggtaaaatatatgtattttttcaccatgaatacttgtctttatgcattttgttaaaattgtagtaattgataatatgtaagcctgtttcgtaatggtgatttttttggtatgatatctacagatacaaatagtgcatgtgttaaggaaactcatgcacaaacaaaacagcacatgctgtactcacagccagttacacagaatgctcatgcatgcatctgttgcttattaattttcttcctgctgtttgtatcattcttttgaagaatctccagcaagctttgtgctttgcccaattgtttataatgtctataaatcaggggcttggaccaaatgaaatgtcttagtagtgtttgcaaaatatttggatattctgattgcgttttattttcccagctttagaaaacatatagattagcctctgttgggaacttatattctcgttactccttgtctcttttcttttttcaggaattggtcactctttcagccaactcgtaggttcaaacaatgtttacatgtagtgctcagtttgttttaacttcctgctgtagacattgacagttttttcttcctaagagtcttatgaataggcaacaaaacaaaaacaaaaacaggcaaagtcccaatctattaactacgtacttacaaatcaggtgaaagtgcttggtgaacagtctatgttttagcaactgttttttaacgtttggttgtgacattttttaacaacagccattgttcaattgttaaactatgtttggatttgaggtctgaatgagctgaattcaaaatatgggactttttattagaaaccctggtaaagtggacactggggaaaaagcccaagatttcatgtgtttgatttattgactatgtgcgtcaacagcctgcttttaattctcagagtaaaataaaaatactcagaatctaa

SEQ ID NO: 1063 - DNA, 1060 bp, Homo sapiens
tttcgaggtaggagtcgactcctgtgaggtatggtgctgggtgcagatgcagtgtggctctggatagcaccttatggacagttgtgtccccaaggaaggatgagaatagctactgaagtaagttgaaaattccctctcaaaaaggtttaaagccattggatgtgccacaatgatgacagtttatttgctactcttgagtgctagaatgatgaggatcttaaccaccattatcttaactgaggcacccaaaatggtgagttggggaacatagagagtacacctaagttcacatgaagttgtttcttcccaggtcctaaagagcaagcctaactcaagccattggcacacaggtgagacacctctattttgtacttctcacttttaagggattagaaaatagccaaagcaatgatgattatctatgttagtgcttctctcccctcttttcaaatgagaattttgctctcatattgatactaagtttaatactgaagaaaatgtgaaaacagatactatgatggttgcatagttcagcagatttaatcatgaagagatgtactatctgtctgatgtatctggggtagttgtggtttgctgttaatggttaagcagtgtaccaccaatctaccattaaaatattttttgctgacaattttgtattaaaattacaggcattagacagaaagctggaagttgaaatggtaagtgaaactgtatccaagtaagcaggtaactgggcaaacttcctacggcacaaatggctttttagttacctcctagtgctgaatgcattaaataaatggcggattcttgtcttgttatgattaataagaaagtttgtaaatgcagcctggatgatgataagcaaatgctgactgaacatgaaggtcttaattagctctaactgactaaaggcatttgttagttttggcagggggtgaacactcatctgtggctattctaagaccactcttatttcttaggtggagtccaacttgcctggaccagcttaatggttctggtaagtattaatgaaaacagtagatagacttaatgaaaa

SEQ ID NO: 1064 - DNA, 235 bp, Homo sapiens
catccgggtcctggcgcggtgctctcccggcagcgacgggcgcgagggccggggcattcccacggccgcgacggccctctccgcgagcgcgaggatgtacatgaagcatggcaccaacagctgctcctgtgaggcctcaagaagcttacaatcgtggcagaagctgaagggggagccagcgtgtggcatggcaagggaaggagcaagagagagagggaggagctgccaggctctt

SEQ ID NO: 1065 - DNA, 3897 bp, Homo sapiens
gttcctaagtactccactggcttaccaagtataggattaccctttgattactttatctggctaccaggacagagagattcttgggagccaaccagccatcaggtcaactattttgctacagatactgctttctgggtttagtcccctgtactttcaggtcttcagcctcagtttgacttcctggcttcttcagtgaggattttagagttatgtcagaacagtggttggtaggatggcggagacatggacttcagagagttcttggtagaagactcaaagagccacctgtcatgagacatcccacttccttccccaggttacttccaagactgagcagccaggtttttggtagatgagaacaaatgtttcttcctgaagccctggggcttcaggtaggaagaaggactgctatacttgttctcacccttggcttctggctgctccagttaaacatggttcccattgatacagacattagagtgggaaaggacttcgttcatagaccgaagaccctcaaaggaaagtccttccattttgggaagggtgacattgatttcgtttagctgcttaagatatgtacttgctgttgtcttgtgagacatgacatctgaagctgaagaggagtccctctcattgttgtcattgtcccaccgggactgaaagtctcccagttgaggcagcattttagctttgatgtctacagggcaatcatggatcaggaaatttctgcaaattagacttggaaaacaaggtcttgatccttcttgtctttggacgaagactaatcatcacttttgactgaaggtgtagtgctggagactatgttggaggcagcacctgatgcactatccatattcttccccttgatcttgtcttaaagttttccaaatggattccgaggcttgtctttgatgaaaaggtcaaacatactggcagtcatgttgtttctcataagctggatgtcaacctcaatttctcctctttatccttctctcctggtttggatttcaaggtataccaccgcatcttcctgctcccctagtctgggtgcaggtcctgcaggtacacctcggcgaagcccaagtacagtagcagcagcacctcaaaggtggcctcctcctctgacactgaggtggcatacttctccttacccacctgaatcaccgagtacatgttgcttgtaccgtcaggctcttggttcttggcccctggccctatgcctgcaacactgtcacctgcacgtggattgggaaccacatagcccccggacctgctaaggccattaaggacaggatggtgatgcctcggctgactgacgtgagaagattgtcatgacccatggcctctactgctgtcctaccaacagaaacttcataatgttgtgcaggcgttaccactacctagttccagaacattgccatcacccccaaaataaatcttgcattcattaagcagtcacccctattttcccccatccctgtcaaccactgatttatgttctgtctctatggattcccctgttccggataattcacgtaaatggaataacacaatagatgccttttatcatgggtttctttcacttaggatgttttgtagggtaatccatatagcatgtatcaggacttcattttttttttttttttttttgagatggagtttcattcttcttgcccaggctggagtgcagtggtgcagtctcagctcacttcaacctctgccttctaggttcaagcgattctcctgtcttggcttcccaagtagccaggattacaggcgcctggcaccatgcccagctactttttttgtatttttagtagagacagggtttcaccatgttggccaggctggtctcaaactcctgacctcaggtgatccgcctgcctcagcctcccaacgtgctgggattacaggcgtgagccaccatggtcagccttcattcattttcatggagaaaaatatttcattgtatgagtataccacattttgtttatccatttatccattgattggttgtttctacttttttttagctattatgaataatattgctgtgaacatttgtgtacaaggttttagtggacacaagtttttatttttcttgggtatatatctaggagtggaattgctgggtcatattgtaattctgttcaactttttgaagaacttcccaactgttctccatggtggctgtgccattgtatattcctaccagcagtgtatgaagttacaaatttctccacatcctgagaacccctttattattttctgtttttctttttgattatagccatcctagtaggtgtaaagtggtatctcattgtgattttattttgcatttccctaaatgattaatgatattgagcatcttttcatgtgcttcttggccactagtatatcttctttgaagaaatgtctattcaagtctttggcagtttctaaatgagttattgtctttttgttgttaggttgtaagagttataatctggataacagatccttattagatatgtaatttgcacatattttctcccattttgtgggttgtcttttgtcttttttattttttattgcttgtgttttggtatcattattgataattcattgttaaattaaaggtcatgaagagttactcttactttttcttctataatttttagttttagctcttgtattcatgtctgtaatcaattgaagttaatttttaatatagtatgtgttaggagtccagcttcattgttttgcatgtatctatgcaattgacccaaagtgatttgttgaaaaatattattttctgatggtatggtcctgacacccttgtagaaattcaattgaagatatatgtatgagtttacttctgcagtctcaattctattctattggtctaaatgtttatctttatgccagtaccagcctgttttggttattttagttttgtaataaaatagacaaacatttggccgattaatcaagacaaaaagaaaagtatatagaaataatattatgaaagaaaagggggagcatattgaaaaacaccataaagattaaaaagattaagggacagtgttaacaatttatgccaatagggtttgaaagtttagagaaaatagacaaattcctagcaaaatataaattatcaaaacctactcaagaaaaaatagaaatcttatatagtcacaaggtattaaatattcaattcttcctagagacccaaatatatgctttctacccgtaactcactgtaaataaaaagaaagggataatatattgtgcaaactctagtcaaaaaaaagttggaatgacaatattaatataaacaaaagtggacttcaaaagaagcaatattatcagagagaaagagggcactgcttggtgaattgccccctgataaagacataacaataccggaagtaaaaattgacataactgcaaggggaaattgacaaatccacaattatatttgggatttaaatgctttactcttaataattaataaaagttagctaaaaaattaattttagctaaataaattagctaaaaagttaacaaggatagatctgaacaacactaggataaacttgtcctaatggacatttatagaccactataaccaaaagtggtagaattcacaatttttgcaagtacacatggaatattcaccaaaataaaccatatcctgatttataaaataaactaacaaactggcttctctcacttagcaatatgaatttaaatttcccccatatctcttcatggctttatacctcatttccttttattgctgaataatgtttcattttatggatgggccataaaatgtttatctatgcacctatagagggacatcttggttgcttccaagttttggccaatattaataaagctgttataaacatt

SEQ ID NO: 1066 - DNA, 2082 bp, Homo sapiens
atgggttgggcattaggaacggcctggccccacaaatcacacaactggggtgtagaacaaaatggttccacagatgacaccaggctggtccagggccgatgcaggccagaaccccgctgggaggactccccagaacaggcactgagctgaggaaaggcaggacacgtggtctgctaccgaccccaccagatcttgctgggactctgggcagctccggagtaagagcagcatgctctgcaacgaagagctaggtccaaggaccgcaggcggaggcaggaagtgtcaagatcccaggttacggaatggcaccaagtcggtaaccaaaggaagcaacaacccgggtgttcaaggcagtcgtgcaaggcggcgcgggggcgaggccgaggccactccctcccacttccttgacgctatttcctgggaggagccggagctcgcggcccggagccaagagattcccagcccagtgctccaaaatactcggcctgggggaggctggtccgtgagcgtgcgcccggaccgttccgccatgcatagtggacccagcactacagcaagcctggcacgacctctaaggcggttcgcggcaacgtccgcacgtcggctcgttggtctaggggtatgattctcgcttcgggtgcgagaggtcccgggttcaaatcccggacgagccctcctttaccttttactgagacaagagtgtcttcaaggaataggttacctgaccagcgctgcaggaggcttgactgtaagtcatcaatgtacagtaagctcttttgtggcaccgcggtagcagaaagcatctcaatccccagacccgcctggcatgtcaggaagagacgaggcacgcccagacttgggcaggtccctccctttctgcttcctgacttccttcctggtgtctcaactcggccaccacagcctggtttcgctttgattgacacgcgtcaatctatagttgtggatgacagtgttcgggagagcccaggaactgtcaaaacttggttctctgcagtcctgaaggcactctgtctctttcggtcactccatctgacgattggtgcctgaaatacacctacggtttctggtcagcgtttatcagtggttggaagaacagaacccctaggaaccctgctgtcagcacgcagagtgtaaagtctcagatcaaggattcggagaaaggtctctacaggtccctcctcgttagtatagtggttggttgggatgagtcgggttggacccgtgcggatccaggaaaacagcgatcgaggtaaaagtaatggctgccgtcgtctgcccagcgcgcaattgtgagtgaccttcaccgctagcgcgcgccacccaccccacatgaacctgtagggttatgcccagtctacagacgaggaaaccaagatccagggaagctgagtcaccggcagagctgggattacgtctaagatttgtccagggggcgagaactgcagcgacaccatgatttatcatctccagaaaacaaaaaaaaaggcctagacacataaaaatggcttctctgtagagtgagctcaacgagctcaatgtgattccagttaaggaattgggccttaagccaaatgcgcctaaacgcaacttgcctctctattatttatccagaggatgaatttaattcctacgtacatgcgcccacatctcgtcagctggtgcctcagagaaatgcgctgacaaatcttaaaggtggggcttcatgacaaaagtccgcccgttattgctgctcaacagacccatcaagtcacgctgttggacaggcctcgtggcgcaacggtagcgcgtctgactccagatcagaaggttgcgtgttcaaatcacgtcggggtcaaacaaaacattgttttccctaatcaaatagacctacggtgacatttttcaggataggaaaaaaaaaaagcctcctcagtagaaggataggaggggaatgagacaaatatgaacgttattcagaagttgggtgcagactttcaacattatgtgatatatccctgtggcaaaactgcgcatgtatccctaaggtctataaaagtaaaaataaatttaaaaataaaaaaa

SEQ ID NO: 1067 - DNA, 674 bp, Homo sapiens
aaatctgagacagccttggtctgagggagcaaagacagagaattcacgtgctgcccaggcatagccacatagcaggtggacatccctggacacttttctgagattttatgtcatagaccctcattggattttcctggaagtacggagagttacatccagagaactctgaacattttggaaggaccccaatcctgcaaacaatgaatggcaataaatcctgggactggaaaggggcttctcaaccccaaggcaaccataaagtcctatacaaagaaagatacagcagtgtgaaagaggcctggatgaaaaaacaaagacagagccagtgagccagagccagagccagaggacaagagagaaaggcagagaatggaaaacacagacagagaaggcagatgcgtagagagacagagattcaatgagaaaataaggaaggaagaaagaaagaaaacaaaaacgttctcagcactacaacttctgccttgttctgttccagaacagtatgagctcagtactttttcagactctcaattttctacaactaataatttgctctttcagttagtggcaaaggcttaacgacaaaggttcatctttaatattagagaggcacttttaaaatttatgatgctaagccttttgttctggatatggtatgttgcacaggtctaggg

SEQ ID NO: 1068 - DNA, 439 bp, Homo sapiens
ctccagtgggcgtcttgggccccggctctattctgggctgcgggcctgggaagggctcgccgggtgccaaatgagctgtcctaactctgcggggctgcagcttcctgcatgatgctggggagcttggcgcctgacccaggatctagaaggcactctgggcaggccgcgctccgcccacgaaggtttaaccaccaaggactctgagagctggcaggtctgagtaaccctggtaacaattctcttcaccttatcaaaacctgagctaaaaccaatgcatcagctgatgatgacagcagagagtggcagggctgaggacccaaagtcatttcccaggctggcggagaataaactgccagggagaagaatgagaagacaggagacaaactgtttggaaagctaaatcttccctcttaatgaataaaggtttttgccttgtctt

SEQ ID NO: 1069 - DNA, 4592 bp, Homo sapiens
gaatggagaagttgggtaacctgccccaggtgaagcccaaattggatctcagcgcctgggagctccaactttagcaagtgcgaaatcctgtcttcggttttggaattttcatccgcacagactatatcagccacggataggatatgtgagaataccagcatgtcaaggctgggaatcatccttaggcatcacctagccagtcctgcctctcattttaaggtgatcacaggatctggtttgccactgaaaggaatcttgatgctgaccacttcacctcggagagcatgaactgctcccatgccttcaagagttttaggatggcatcaactgttccaaaaacattgctgagctggactttgtatttcccagcatgagtcttacgttggacattcttcatgacaagatgagtatagtgctcagtgttttcaatagtaatgttttctgagttttgcaaaagtttctgaccatggaaccaagtcatggcaggtactggacgaccaatgtacataacatgaagccgaagtgtggaacccacagctccataatatttctctttcagtgggtaaccaggatggaactgcggtgttgcttgcaggagaagcttactactggtttctacttctccaacctcattggtggctatgcaggcactgtctccagactgtctatattcaacccagtatccaagaatttctttaccaccatcacattcaggtttctcccactgtagagtgacactatctttggatattgaaagaatctcaagttctcctggttggcttggtttatctgaaatattttaaaataatgaaaagggagtcagctttactggtgaaataaaaggaccaaacatggcttgcttctttaatttaaccccttcttctgaattccttaccaaatggatctttgcaaacaactggttcagaagcagggctggtctcactcaggccaacatcattctgtgcgatgatgcggaactgatactcagcatcgggaacaagccctgtgacagtgtacattgtggtggtgatctgagtcttgttgtgtctgacccacttgtcagtggatgtctctttgcgttcgatgtagtagcctgtgactctagaaccaccatcatctttgggccgggaccaggacaagctaacagaactcttggttacatcgagtacttctggaggattgcttggaggttctggaggatctgtaaatataagtggaaagcacacatgtattagaatacagtcccaagtattataagccaatgactttcatttaaaaacagaaaagtgctgaaataatgtttataattttgtggttgaaagggcacttactcaatggtgtttttggtgtgactggttcctcagatttcaagggtttgcttatgccaaactggttttctgctgaaacacggaaatggtattctacattctctttgaggccttttaccaccagagatgtacctcggactctggaatcaatggtataccaggcggctttaggcacttctcgtctctcgaggatgtagcctaagatgtcagcaccaccatcatcagcaggaggtctccagctgaccctcacagagcggacttggatgtcatcatattccagtggcccttctggactgttgggacttcctatcaccctgaccttgatgtagacagccttcttgccacatttattttccagaaccaggtcataagtgccagaatcacccctgtctgcttctttgatcacaagctcagtgtgtgtttcagatgttgcaatcatggcacgcttactaatatcctggccttccttggtccatttacatattgggaatggttttcctttgattggtatgcaggctcaccaggtccaccagcattacaagctaggacgcggaacctgtattctgcaccctgagaatcagaggtggggagagtggtggaagggcctgtggacttacggatgctgctgcgacactctatgacctcagactgcaagtaagagccaatcccgaagcggtttgttgcagccacacggaacacatactcatttccttcgatgctggaggacccggtttatctgaaggaataaggaagaagagtgaatatgtggaatggggaatgagtatagagtagaggtctggagacctgggctgcagtctttctattgtcaatttcctatatgacctaggagcagtaatggtatagtctcctgagtccttccggttcacgctgaatagctccaaggtgcacagattccgctgcatggccatctttatgccttctgctggttttagcagtgtgccatcttttttccaagaaactgttggcatcggtttaccaaaaacagtagcatccaagcagacattagttccagctttcacagtgtatatttagttttttattaggaaaaatgaccatcatgaatgctgttacatctttgcctataatactcagcagaatcttaccattttctgcgaggatagtcactggatcagaaggttcagaaggtgggctaatgtttaccgcggtcctggcaatagctctaaattgatactgagctttctcttctaggccagtagctgtgtactcttcctggggaatctggtgaggtgcagtattgcaccgtacccatttatcaccaggaagtttgcaagcttctacgaaatagccaataattttactgcctccatcatgctttggacgagcccagatcagagatacagtactcttggtgacatcaataacctcaggtttcccaggaggatctaaaacaaaaagaggaacacctggagatgaagacaaggaagatgtcagtttctacattaagtaacaaactagaaagaaaacaactttttttctccttcacaaaaacataccaaatgggaactgcgcaaccatctttggagatgtgagaggctctgaaatgccaaatcggttttcagcacggacccggaagatgtactcctggcctgggatcagctttccaaccctgcaggaagtttttgtgactgaagctagagccgtgacccagtcacctcggcttacatcacacttctccactatataattggtgatgttactgcctccgtcctccagagggatgtgccatgacagggagcaagcatcagcgtctatatcagaaatgtcaaatggaggctgaggggggccgggggcatctacatgaaccaagaggaaagaaatgtggctgccatgagatagtcatgtgttcaggagtaacatccagaatattaataggacctgttggtggcccaggaacatcaagaacagtaagatgtacggctactgttttgctaccggctgcattggaaactgtgatttgatattccccagtgtctctccttaagcagttcttaatgagaatagacgccttgatggctcctctggcagttcttgatgaccatggatgagctaatggctgtggtctcaatggtggcttcttgagttactttggatccaccatcttttagtgggggagaccactccagatctgcagatgatttagtccaatctgtcactttgggaaatggaggaccaggaggggctgcaaagagccagtatacattatttacagctgtgatggtatataagccagtgtcactcctgcgagactgcggaataactaaagtgcaagtatcatctaccaccagtttgttgacatgggtgtcatagagaacaggttctttgttatcaggcttctttggaggagctttaaaccagagaaataaaaacttgattgtgaagataaatgggtctcagcagttgctaagaaaatgactggttactttctgtcccttttgaggagcatgcagagaaattgctttagcctctgataaataaaacagactgcgaggaaaattacagcgaggaaattacagacatcatctcctttgaacagggaaaaggtaacagtgttggtgacttcctcccattctgctttcttcctacttgcatcacgtttgtcaataacataatgggtgatttcactgccaccattatcaagaggggcatcccatgtcaagtagcaagattcagctttaatgtcagtaacagcaagatttcttggtggggatgggcggtctggaaaggaatcaacagagaatattgagaaggcaattcttaaacagacactggatgcctttttgatgtaagaaagcaagtcacttaccatatacttcaacgtgaacatttcggaacactgagccaaggcgattggaagcagtaactgtgtaagtgcctttgtcctcccggaccgctttgggaatgctaagctcagtttttgcctcacttcgggatacctcttccttggttatctgaagtgcatcagtgggtttttcaattacagtttcatttttggaccattcaatcttaggcattggaaggcctgtcacatctgcagggatgtggacaggctctcctgccttaactttgatagtgtctcctcgaacactcagacgcaacttaatagttggaggcactgcaaagagaagagaaagaaaaacagtaacaaagtcataaggatgtttttttcaacttatgggataaaggcacactgtaaaatgcattaaaattattattatattcaga

SEQ ID NO: 1070 - DNA, 2138 bp, Homo sapiens
ctcctcctcactgcttgagctccagggcccagacgtgctgcggccagcccgtccggcctttggttttcttgtcgttgctgctcactgtgcttttcaagatttcgttctggacagaggaaaggcgagggcgagaaaagtggaaagagaaattcagagaggatacctggttccacaccaacccggagcttcctgcgccggaggagacagtgaaccagagaggaaaggatacgatgggggagtcccagcccctgcagagaagctaccaaggttagcgctaccctagccggcggggaggcctcggcgctgcagcgctcaacaaccggatccacaagtttataaacaaccgcccgttttcgagtcgtttatggaggagcggggggccttttctcttactccagatgtaggggcgggagctggagtcggcgctaagtctggtttctctgttttcattagcaatcctagatccacatctaggaaaaatagggcgaaggagcctctgtttcggcctgggcctctcggccagaggctctcggcctccagctcagcagtgcctctcctccaaggcttctgaaatctctggttattcgggaggtcactcgattatgcagccaccaaagggctgcaggggccaaagaagaaaaattcgacaaatgcaattattttccgggcccttcgtggacatagctctatcctgcaccactgccctgtgggcacttggtaggaatctgagaaaattttaagcggctcaatttactttcgtgttatttttaataacaatgaccatagtaatgccttttcccccttaaaatgtacaggcttattcaaataaaattagaaatgccaatggaatatactcatctgggaaattacattttaacgtcatagccaaggaaaaattggagctgtattttgaagtcaaaagtacttattttatgtttaccattacgttttccgggcatagtatgagaacaaccacaaaactcagggctcagtctctggcagcctccttctgggagtggggtagggggtgcgatcaatagtgaaataattggaatcaagggcttcttcgagacttattctggaaacatctgaaagcaagattggattggaggccaaaagaagggtctaacagagacggggtgaggcatccagaccagtgcgatcgcgatcgatcgcgacccagagttttcaaggtccgtcctaagtactaggggagcagcgataacccggagggacaccagtccctacgaagaccttgggcgattttgaagtgcgggcacctcgattccccgaatctgtagtgtggctggtatcggtgttcccctggtttaactagcctgtttgaaggcacagatcattcatggggatgtataaccgaaaccagtcctctccaccgcctggggatcttcactttcgcagtctacgactgcctgtgactccagaaagacaaactgcagattggccaagatggggaaattgaggcagagaagccaagacatgtgctaaaggtcatgcaggctatgaatggagctggaatgtgaacgcaggccatatgaccccagagcccatgttcttgaacccttagaaagacagcagcaacacacctggtgcagcagctgcttagttggagtggctgacaaggttggcagaggatcccgttcctcccgtggagtggctgccatgatactgcctgcactgaagctgctcctatttctgaaatatgtattgttatttttttccctgcatgttgaacattatactcttctgttctttcgcattctcttcttcccttccggatgacttctagggtttttgtgattctgtaattctaaaggagaaaggataataagaattgtgaggccgggcgcggtggctcatgcctgtaatcacagcactttgggaggccaaggtgggcggatcactaggtgaggagatggagaccatcctggctaacacggtgaaaccccgtctctactaaaaatacaaaaaattagcggggtgtggtggcgggcgcctgtagtcccagcaactcgggaggctgaggcaggagaatggcgtgaacccgggaagcggagcttgcagtgagccgagattgcgccactgcactccagcctgggcgaagagggagactccatctt

SEQ ID NO: 1071 - DNA, 964 bp, Homo sapiens
ccagaaccagccgttgtcccctggcaaaaagaggcccagggctgagccctgggcaagtgtctcccgacatcgctacccctcctccctttattagtttccctttcccaacagaaaccatttccttctgccaccaaaactaggttgcatccaaaagtttttcacaagcttaaaaaagaaaaacgaaaaattgacaagtattacacagaagagcccacaaaagcttcagcaacaccaagggcgaagaagcagcgtcagatccaggtctgcaggacacaccaaagaactcctccaagtcacacaagggagaaaattaacttcattggcttctatcaggaaagctattttttttttcctcttctttcctgcaagtttcccaaaccccatgactctgatttccaggtcagagactaaggttttatttttcttactctgtatactttatatgtggagagtccctgaaggaacactgtgatgggctgattactgtgagccagttgtgggccagacctggcctcaggtgctgcaaagggaattcagtcacccctgtgcagtgatctgtgagccccaagtcagatccaactttttcctgatagacagcaccctcctcctccctaccaagaaatagcagggttggaggtagtgacccaatattcaagaggtttgaaattctacatgagatatttctgagttaactcctaaatagcagtttccttaatcatgtggaaaataagaacacttactaaagagaccattggtttaagagaaatggaaacttatgtccacgtaaaaacctgtaaatgaatgttcacagcagccttttcataatagccaaaaagggaaagcaatccacacgtccatcaaccaatgaatggataaacttaacgtgggatatacgtgtaatggaatgctatttggtgaagaaagaaatgaaatattaatacatgcgttaacaaggatggacctt

SEQ ID NO: 1072 - DNA, 525 bp, Homo sapiens
aagacctgggtgcctccctgggtgccaaccagcctaaccagccggggccaccaaacagaagtgcttctgacattaacgcgacacacagaaggtgtgtagggtgggtagtggaagtgaccgcagaggcctctggggattgtagttttggagctagagaggcaggcaagcagttgggttcgcccacacggtgtgcctctcacatctgcacagcgcacacaaccaagcttaggagccgactgttaagatgccccagtgacacggacaagtttctcctctgcaacccaatgagagctgctgaccacgagagcatcgcgggaccgccaaaggattctggaaaatgtggtcccgggtggccagtgtgcgctgaccttcacctgaaggtacggcttgaaggaaacttctggagggtggggtggtgttgaagagaaggcacaattgtcaccattttgttcaacatgggcgttttctttgtgcattgatttgcatttttaaaggtattccattaaaaatatgtttatctatttt

SEQ ID NO: 1073 - DNA, 277 bp, Homo sapiens
cttaggtggtggtagaggtgtgggcagaatatcaggaaatgcttccctcaggaattgatgtgcatgaggaatcctggagaataagaagcactgttatcagctgtgacagagcccttcctgcctcctgtctgccagcgtacttgggaccatgcctctgtgaaggacttcaatttctctttacaagaatcaacgtggagcaaactccagttgcctactgcctagcattcttgctaagatacgtatgtaaataaaatgtctttatatacctgagaattta

SEQ ID NO: 1074 - DNA, 1914 bp, Homo sapiens
attttagcgcatggtaatatttgatgcagttgtctctccttaagtattgtgattttcttcctttattaagagggttgtgggtcattccatgcttctcttaaggtatctttttactctgttttactgttatattttagaagatagttttaagaaacataaaaaccatgcttgttatcttaacgtagtagtagtgtacataatagtaaaaagggcaagccagccccctctgccctcgaaaaactgtattctccaactcccactacattttctcatattgaatctgttccacctgtgatttattgttttcctgaactttgggagttttaagcaatgatacagttgaagggactgtttataattttcacatgtttaagttgtgaggctttaaaacttaaatataaggctttgtctaggaagaaaatgatctttaccttcaataaatttataatgtagcactaatccagtatagattggagactgaatgcattcttactcttagggttcatacctctaattcatgtggttaagacagtgttgtggtgaagtaatagggccccttgaaagaatctacagaaacataaattatactgagttgtgctgtactggtttgtgagaacatcagtgtattaaggagaatggtagtttaatttgaatatttaaagaaagtaatttgaatggttctagtactagggccattattaactagtaacatagattagtgacttcaactgggtgtccttattatctgatttgtctgaagtgaaaactgttaaggtgctcttttaaaatgtatttggaaacaccatagttagggtaaatacaatgtcacaattcactcttgcatattatttgcttagccaaatttatgaattctaagttaggccaaattgaaggttttggagttttacattgtgggtgagtctaaattcatgcgtttggcaagcacaaggacatgggaaaagaatctggtattttgaggcaggcttgagtttataatgaaagcaaactcagttcctcttcatgtcctatgtatttaagagaggacagttttccctcagtttttttccccttccttacccctacccccatcaaatacagcccaaccaaataactgtgttcttaatttaaaggaaaatggcagacttgacacctgctgaatatttcgtgtagacagagtatgacaatgaatgagatccccagtcattgcccttgtaagcctgggaacccagtttagtgggagagactaatgtaaacagctttaatcaaaagtatatcaattggccgggtgctgtggctcacacctataatgccggcactttgggaggccaaggtgggtggatcacttgaggtcaggagtttgagaccaccctggccaacatggtgaaaccctctccctatttaaagaaaaaaaagtaaggcatatcaatttatggttatcaaataggtttttttttttttttttgagactgagtgtcgctctatagcccaggctggagtgtagtgctcactgcgacttccgcctcctgggttcaaatgattctcgtgcctcagtctcccgagtagctgggattgtaggcgcctgccaccacgcccagctaatttttgtatttgtagtagagatggggtttcatcatgttggcgaagctggtcttgaacacctgacctcaagtgatctgccttagcctcactgcttgcccctaagtggtgggattgcaggtgtgagccactgtgctggcctcaaatagtttttatcaaagctacttcaattagtggttagcaaggcttaaagactaattcagtgctttattttgacacttgttcgcaacatgttgctttttttcctgtgtcctatgggacctagtcatctgtatgttagattcacagaggaattaaagagataaacatgcatgtgct

SEQ ID NO: 1075 - DNA, 653 bp, Homo sapiens
cgccaagagcgcacagactttgaagcaggaaaagacagtctctagagcaacatggaaaggatccagtatttgttttcaggcaaaagcaagcctccaaaagccccttggttcttctctgtgtgtctcgccccttctgccttgtacaccagactgccggcaagcaagcggggaggtggcgaacagctgggatcctccagtgaaaagtttgctcagcgcgagagatgtcaagaggctgggattgtcgcctatcgggaggtggggagctctctcactcacacttcctgggaaatgaaggagaactaataggcagcccgcatttgcagccagccaacctgggtggtattccttgaagtgaagcgctcataaatcccttctggggccagagccggtttcacaagctgcaggatttgggtggcctgcctgctctttgggagcgggcttgggaagctgaagaaattgaatcaggacctcaggccctttacagactcccttctacacttggttgctgattaagaacattatgtggcatttaaaatggcacaattatcttccgttggccgttcctagctaaaagtagactcctatcagcccgtgactgacgacaagaaggctcttcgtccctgtttttgaaataaacatgggtataatctgaa

SEQ ID NO: 1076 - DNA, 641 bp, Homo sapiens
aacgctattgaagtacattctaaaatgatcccacctgcaatttggatttttggagaatcgggatcggtgtaaaattctacatgcatacacgtatttgcacaagaatatttatagcaacgtggtttttaataggaaactatctaaatgttcattacaagtgaattacataaagctcaatacatccatactacgaatcactgaagagctgctaaaatagatgaaatatatttataatggcatgaacaaccgacacaagacagttgcagagtaatgtgtatttgtgattacatttatgtttttaagttatacaaacgcgtatgtgcctacgtgtatgtaaattcataggaagacaaatcagaggacggtggttacctggggaaaagcatgtgttgtcctagggtatagctttgcaggagagcttggcagagcctgccaaacctgatcagcttttccacctctcagctactgctttcggctccccagcctcataaactctcagctgccacattacaaatcagcagatgtcttgaggtgaaatgtggtgccaaatgtcaagctcaactttttggatcatctctcctgaatttcagttcctcgaatcctcactgtcctgggtctccaatgccttcaaaaaggatttt

SEQ ID NO: 1077 - DNA, 723 bp, Homo sapiens
ctccacatcactcctcagggaggaaatgaacgcccaggcaggcagagctgtgggcatctacagcaggccctgtgctgctgtcacaacctcaccctggtcccctgaggcggatatcaccatcccatttcagagacaaggaaaatgaggcccaggtgcgtgaagaaactggcctatcaaggcagagctagcgggtagcatgctggacttctaagccttcctgagaaagtgaactgcttcctctgagatgggcataggcatggctgtgtgtgcatcttgtcctgaccattccacagtggctgttatcacactccatttacaagttggctcagaaaaccggaggtgaagctgaagcagcccagctggccctaagaagccctggacgctccctcccatcctcacatcgttgagtcaatgctattatttgaatgtctgtgtcccctccaaaattcatgttggaacttaatccttaaggagcagttttaagagatggggcctttaggtcatgagggctctgctctatgaatggattagtgtcttataaaagggcttgagggggccagttcccccctcttcagtcccatatgccatgtgaagacacagttcatggtgccatcttggaagcagagagcaacccttaacagacactgaacaagcccgtgccttgatcttggacttcacagcgtccagaacagtgagaaataaatttctgttgtttacaaatta

SEQ ID NO: 1078 - DNA, 802 bp, Homo sapiens
caccccgagctgtcaggcgttccgccgcggccgcgaggcccgccggccggcggggagctacgcccggacggccagcaggcccgcgggagtggggctgccgcggctgaggcgaggcgggccgcgcgcgtcggcgtcacagcccgcggcagaggcgcccagggcggccgggcccacgacgccgaaagcgccgctgcggttgccgcctcggaggctcccccgggccccggcggctggacccggcgcgggcgggaggctcgggcgggcggtccggcccgggactcgggtttgggcgaccaggaggtgccggtggccgcgctcggacccggtgacttaagagattaaaattaatttggttgctgttggttctgaacaaataatgagttcttttatttgaggtatgccattttgaagactgagacgttggagttttatcctagaggataaaggaaatctttgggaaagtcagtattttatatagcaaaaatatgaacctcaaactgaatcctctaaaggccccatacaatgaagtagacattggtggaaacatttacacccagtcagcttgaagagtttcaaatggaccctaccactgagaaatcaagatggcagtctactatggggaattgaggaaaaatggattaatacaagagtcctgtgataatatacaaccaagacagggttcttttaacatggattccatgcagtgaatgaagacataggtttcttacccaacacaaatggacagtggatttgactttctaaagactttttttgtggacattttgacatttggagaagaaag

SEQ ID NO: 1079 - DNA, 446 bp, Homo sapiens
cccctcaagaaatatggactccgtggcagatgaatgtagatgccggttctggaggctcttctgggtagaccagaagcacccacctcctccgctcacaccctagggcacagccaccttcccctctgccctttcccctcccccaggctctgctgcactccactttccccacacttccagggtgtttacactaggggttggaaaacttcttctgtgacagtccagagaggaaatattgtaaactctgcagatcccacaatcacggtgataactcctcaaccctgctgttggggtggaacagcagccacagcaagaaatgcttggccatggctgtgttccagtacaatgttatttatagacactgaaatttgaattgcatgttactttctcatgtcataaaatagtattcttcctttggttctttttcaaccattaaaatgtgaaaatca

SEQ ID NO: 1080 - DNA, 597 bp, Homo sapiens
tgaaattggataccaagcttaatggtttacctacagcatcataggaaaatggcaatgataaaatgggagagaatggattgattattgctgcttgagcccatacagaaatagggccttggagttgctggatgccattgattgctatctattcattctcacaacaactttaaggaaaatgcagccaagaggagatatactcccaggatgaagttgttctttgaagtttccttatctgcctaaagactggacctgccaaaaagaaaacaattactgctggtcccttccctgagttttcaataactgaactcacatgacaggaggaaacactgaagtcagtaaacactcctggatagacttgtcacaaaccactgtaggttctgtgggcccagcagattttgtcccaggcctttgtatgttcttcgagcccattgacttcccctaaaaatcatttactatgcccctaaaatcatccagacttcctcatctcccttttcccctaagaagggtgtataacctgtaccccattgcatagtggggtaatcactctgtgatcttccctcatgcacatcaataaatttatatgcttttttcttttaa

SEQ ID NO: 1081 - DNA, 454 bp, Homo sapiens
tctagaagtgaacatgttccaggtgatgtccctatgtaaaccaagggttggttttcagtgttctggaggctgggatgtccaaggtcaagatgctgacagattgattgtccctggaaagcctgcttcatagatgaccatcttctccgtgtgttctccctgtgttctcaggagtggggttacctttctggtgcctctttttcataaggacactattcccgttcctgagggctccattctcataacacaacatccagaaggtcctacattctaatatcatcatactgcagcttgggtcctcatatgagagatgtatggagaaaatacctaaatctatcttataacctggagcagagccaccacagcttcagatatgtaacaattatggtgtttactctcttgaataattttattttgcttattcagaaacctcagcaaataaaaatctttttggaaa

SEQ ID NO: 1082 - DNA, 594 bp, Homo sapiens
gatttgggggtctttggaagtggagaatgtgtttgccctggggaagagaggtgatgtctaggagacctcttcactcagggcaagctctatgacctgctttgactccagaatgtggtagaagtggcatcacataaattgcagagcctaggcttcaagagaccttgcaacttgcctctcactgacttgaagtgctcccatcagagcatcttgtaaggagcaggtggagcatgtggacaagccatccccaccagcccctgagacatgtgagagaggccagaacaggccatccggaccccactgtgctggtggatgagacagcagaaggaatatcaacctaccaacagaatcctgagaaatgctcactcttacttcaagctgctgcattttgatgttatgaaaccataaataacttatgaagtcatctttgctgacttaaagttttccataactttattataacatatcaaaattatgaaaaatgtgaaaagtagaaaactgatgaattttgcttcttcatatggtctttaagaatctcaaaggcactgaagttttttatcttttctgtcttagaataaaaaaccttgaatgaaaatc

SEQ ID NO: 1083 - DNA, 564 bp, Homo sapiens
cacgaaggctgaactatctactgcctgggcctttacggaaaatagtatgctgactccttctttatatgacttgcaaagcagagttaccacagtttggatcaagaaaggtgtgtcctcttagaagcttttggctgatagtgagagaaaaccctcgcgcactgaggaagtccactggctcacatggctggaagggcagcggcaaggtcctacccatcctttatgtcccagcttagagaacatcaactgtaaagaatctatctctggtcaacatgtctgaaagtgagcgttgtgatgaaggcagggcatcacgttagtgggaaggctcattctcccagtgttatcctgtctgggcactgagtgacgtggccttgccatattccattcaacctcctcaggccctaaccatcctttatgtcccagcccagagaacatcagctctaaagaatccatccctggtcaacacgtctgaaagtgagcattgcgatgaaagcagtgcatcgtgttagtggaaaggctcgttctcccagtgttatcctgtctgggcactgagtgacgtggccatct

SEQ ID NO: 1084 - DNA, 2613 bp, Homo sapiens
tcctgtgcaggacagcttctatccccgtcacttaacaatggagaggattcttccccagcttccttccagaggacacaaaagctcagagctccacagtctagagtctagaccaacaggcctccacactcacgtcccagagatttccctggtcccacctactcccagtggcaaccagacttctgcacataggagagatgtcatactcagagtccagcctcccacatccacaggaccacctcttcctcctctgagtcttgttaatagggccatcccctgccttagacctggcccagtggactctgatcttacagccaatatggggcagcaaagtgggacatctgtctacagggccagtagccccaggtcatctgcttgccaaaaggagggggaccagcccccggggggagcccagagctcggcagggctggggttagtaagaagagaaaacagggttagtaggggctgggttagtaagtcagagcacagcaccagcggacagggcacctcagcagacacacacaggagtcgctaagagaaaaggaagaacgcacgcaggtccgttagtttgttaagggatgatcggggtgcagttgaggcaccccaggggttagacgggttagtaatcgaacaaaagagctgcctacagaaaagaaagctgagacggaggaagaatgtggggaagtgacatggattcaaagccaagtgtcttgccccaggcagaaggatctgtgtgcagaacacccagagaggccagggcctaggcagcagacgtgttcaaccaggtttgaggggccttcctccatcctcatactttttttttttttaggtgtctgccatgtgctgagacccttatattgacgggaatcctcactgcaacctgtaaggtatcagaactcgcattctaccactgaggaaactgaggttgagagaagtgaggtgacttactcaaactcactcaacaggaagtggcagagttgagaaaaggccatgtgaggacatagtgagaaggtgccacctgcaagccaaggagagaggcctcaccagaaaccaagtcttaacaccttgatctggactttccagcctccagaactggcagaaaataaattcctgatgtttaagccatccagtctggcatggtgctgtggcagcccaagctgatgaatagtacacaccactccgcattctgggaaaaaggacatctggcttttaaacttgcctaagggaggccacaagctgctctcttgcaaacgctgggactgtctcctctggagggagctggaattgcagattgtggggcctgtcctgccaccttctgttccccaagaacagaatccaggagcagtgcaactagaagcagcgatctgattggagaagagtgtcctgagactgggctaaggtgaccccttaagcctttgggatggtgcactctcagcccctctggctgcccctcccagagttcaacagcacagggggaaggctccagctcctcccagatcctgactgtctcctctttgtaaccatcagggagaggaaaagcatggaaaagccccaccaaggaagtcccccacaaaatgacaattacgcactgagcaaatggagacaaaggactccagccagcggcacccgaggagctgcatctgccctctgcctgacagcccctccccgactcccatccttgttcctgtccccatcctgtagggtcctttgagacccagccttggggaaagtgtggtcagtggggacttggcccaggccaggctctgtctggtcaccggcagaaacgcgaggaggaatcaagttcacatggggcaggaaagggcccccagacccagacaatagggcccagcaggcagggcccgagcaggtgaggagggagtagtgggctgccaggcctccctcatacccctggagctgtcctccagagccagatcagtcatctgctgagcatcaaccaggaagagttcctatccatgggaggctccatcccaacaggtgtgaagaggatgagatcttcagggagtcacccagcgggctagaaaaccaccggagtctgaccgctaagtcactgtggccagaatccaaggtcacccgaggtccaaagagaagtccaggccaggagtcctggagatgcggcccagatggagccacctgggggagaagacagcgagtgaggatgaggccacagcctccatccccaacttcccacatccccccagcctaattctgcatctgaggggactcatgttcagagatccccccagtctctcatgcccccagcacacacacagggtggaagtgagggttttggacatgaaacatttttagaagaaacttaggccaggcacagtgactcccacctgtaatcccagcactttgggaggctgaggaaggaggatcacttgagcccaggagttcgagaccagcctgggcaacataatgagactctgtctctacaaaaaataagccaggcatggtagcatgcacctgtagtcccagctacccaggaggctgaggtgggaggatgtattgagccctggagttcaaggctgcagtgagccgtgatcataacactgtactctagcctgggcaacagagtgagaccctgtctctgag

SEQ ID NO: 1085 - DNA, 2803 bp, Homo sapiens
attgggaggggttgcctctccctgtgtccacacatatgccttgagttgctcttcagtgaatatcacttttcctttcatgttttttctacatgctattatctgtatgaaatgaagaccaagaaaggatgggaagaaggagaagaaaaattttgatttatctcagaaactatactccgaagtgagagtcctggttgcagcatccttcaccgaagcacgaagcagaatcaagctgttgccatgaagcttgtttcaagagctcagaaatactccagggactcctttactactgcttttcaaagaggcctttttttctctcttctccttttcctgcaaagagggttatatccagtgctcaaggacatgggattatcagcctaaggcatgagtacatgctgtggaaacagaaatatgtatgaagggatgtatgaaaccacagaataaatggaatccacattcttgaagtagctacaactctacttgagggtaagtaattaagtattttaaaatgcaaaaaagtatatattatgaggtagaaactaaatctttatttttaggataaaacatttgaattcaaagggactttcagcatgtcgggaagcaagtctgacacaggaataatgtcctctgaagcaaaggctttttcagtggcaaagcttaagaatgctgatctgcatgatgggaaaatttagtgttggcacaagaaattaactaatatgtttttctgttgtctgaaaaggaaaataatgcttggcttcaggtatttggaaatactgcacattcgggctaagaatgagatgaccattttctcattttcaactaattatttcaagataccaaaacaaaacaaacaaatgccattggtgagtacctgctatatacaaaatgagctgtatgtagtgaagtggccaggaaaggcagagttcacagccataggtagggcaggccctggccaccctttaggggagcaagaaaggtaaaccaggtggatgaaacatatcctatagcatattgtaattggtaagtggatgcaagtggtttcttagcaagtcagaggcatcgggctgtctaaaagaggtaagaagattatactgacagagaggtggagcaaacaatgaggtgtctgggaggaagcatttgaagagctgcaaggaggtctgatttatggtagaaaaactgagtccccaggaactggggaagtgactggcaagaagaggacagggcttctagtctagaggaatcaaggcataggacatattgcttacctagagattcagtcaggggtatgggatccagcctgggtatagtttttggaaggctgcttacttgattgggttggagtgggactaacagcaagtgtgatttgatgctgacccttcagtactggcctgcgtagcttacaacagttaccctgtctaagaaggagattgattccagaacccagaataaagcagagaatgcagatggtggtcacatgggttcaggtaaggagtaaggaaagtcactggcccttctccaagtgctgtgcaggtgcaaaagttatttaattttctgtttctctcttgaatgaatatgctacctatttggtggtataacacgtaaactcattcatattaaatgtcaatacatgctttaatgttttaatcaataaatgtactaaataatttaaatttacaagggattttggaaacagatccaactttaagcatggcaggaaattgatatttggacaaggaatgttagcacattcttagatcatactcagatttaaggtaagactactctatttttcaaaccaatctaggtatataaaaccaaatctagttagaatgagaatactaaattaaacataagtttgttattcagatattccatgtagaactgtgggatgaagtgcaatcagctgtgactggttggaataaggacctgccttatcccatggagagttagagaatctgttccaacaaggacagaaggtccaggtgggaagagctctggaaaacaaaactctctgacagcgctcttgaaagctctgctggcatcccaaggcacgtagatagtacctatacatctcatcaggaacatggatggttctctgctatcagctgaagtgctgtgaccacaaaactgaaaattcccattctgtgtccttgccaataaagaatgtccatcagagcacgcccagtatcctagctccttatccagactgtgcttctcaatgtgacaaggaagactgcaaccctatttgcttctgataaccttcctatgactaagcctattcagtggaacgatgaggataaaggcctttctgatgatccccttccatttaatatcttctctggttgagattcctggggaggacactcatgacaattgtggtttttggaggatctatctttaggcagctaaaaggaagttcagagaaagccccttcctatacttcgcaggagaaaaaagagcaaaggacaatctaactggctgaatgagaggagcgggaagaagaaagggccaaaagatgacagaaaattgccctttcagatgttctaaaatggccaaaatagcagtgactcctattttgtaacttggtgattcttaatacagcttccatttaatggtctaagattaggagaccacaagtccctggagcaacaggagcaaatgtgagtgtcctagataaaccaggccatatggtcactctatgtgaattggttgttctttttaaagggatgacaagtaggatagggggaagggaagagaaaggcatattcctttcttagaaaggcaatgcctgcaagttgtcctcata

SEQ ID NO: 1086 - DNA, 1790 bp, Homo sapiens
agaagtgaaacaagagatgaaggaatgttgcttgaaagaaggaactctcaaagttcctcagccctaatctaacacaaattgcacttagggttactggggggagggtgcggccgggagggttcaattgtccagcaagggcaacacgggttaagtgaaaggtagagacaggacctccactacaccccgggactctcacccccgagtagtagtggaagccctaccgcccactcccaccccctacaacagcagactgagaggccggcaagaggtccgagctgggaagtcctgcgcgccgcccccgtcactcagccggcggcgccatccgagcagagcagctgggggagaggagacgtcccctcgccccgactggtgacccgggcagggggcgccccctgccctgaagtccccgcgtctaagtccgccggccgctccgccagtcccggtgaaaagcagggaagttgtgtgtgctgggagggggggtccgtcggctctcccagggaagcctggcggggcccgggaactcagcggcttcacctcgaggggactcccgtctagagtctcgtggcgtccgaggcagagtacagcggctccccaagtccgcaggccgggggcgggatcagcgcggggctgggggtcaacgagcacttcctcctcccagccggggatccggggcttctccagggattctccgtggcgaggattccgggtgggggtggggatcccgcgcggttccgcccccgccaggccaggggcagctggcgactcgctcggtctctggtggtacgcgccacggcccccccaccccagctctgcgcgccccctcccctccgggcaccaccccctttccaccgccccgccccgtccaggcaccgcccctggcttaacccattcccggcgcgtccggctgcagcgggagaaacgcagggaaccgagagggagaggcggcatgtggacaggccgggcctcatttgcctaatgcaatgcggctgaactctcgctgaactcgcctggcggcgcctcacctccgagtgacccacccaccgctgcccgtgacatcacccgctcgccagcccgcccgcggggctcgcccgccagccccctgcccggccgaaccgggccacctcccccggagacgcggagagcggcggcaggaggcgtagggccgggtcgcgcggggccaagtgtttggcacccgggtgtgacattgtgcagctcggacgctgtgtcggaatgagacaccggcttgtgtcattgtctgtgacatcatgtgtgactccggccgccggaacccgacgcggcagcgcgggtgctgttggcacaaacacaggcagagggggccctcctccccacgctctgcgtgcttccggcgagcaaagccccgcccaaggtgtctcctagctggggaaccagtaccggcccctggtgcactgtccagctctggagagataaaaggaagagctggtgccttccagtggactacttcatcctagaagccctcgggatgcacgtttcactggaagaaaggcctagcttgggtaggtccctagaaagaggggatacccctggaggagggggtatcctattacccccactctctaaaaggaaggatggaaatgtacatgctacccaaggacattcttctagaagaagcctggctctttatatatgttgtcattttatcctcacagcaactccaagagatgttttacaaataaaacaggtctcagcaaggctatgtgggttgtccaagatcacattactaataataaagagtagagcaggtatttgaa

SEQ ID NO: 1087 - DNA, 441 bp, Homo sapiens
ggggaagagaagaggagagaggtccataccgctgcacagtgaggacaagctgatttcctgaggcatcgatgaggctcatggcactggcatgggagaggttggtgcaagagaccccattgattgccaagagctggtccctctctcggagtcctgctctgccagcctggctccgtcttcgaatctgagatgttgaaggagacactgtagggacctcgcgctgacatctgggaaatgccattcatactggaacctccgacacactgccatgaatgtgagggtttcgtgactgatggggagactgcagtcaaataaaacagatactacacgcactcgtcggggcagccgtactgcagaagcacgttgatgcactcctggctggaggcctgccgggcgtaggtcagcgctgtgttcccgtgggcatctcgggccatgacgtccacc

SEQ ID NO: 1088 - DNA, 779 bp, Homo sapiens
gtcccagcgcgcgtgcgcccctgaaggcgggttccggtggcagcgccggggtctcagaccctgaggagactgagcccagcgccaggcgaccggtccccgccgccgccgcccctgcgcgggagatcccccctgcttagtccgcgcccgagcccccgtccgtgggaacagacaaggggcctccgcagcgcctcacaacccccgaccaggtccagcggcgggggactcggccgtggagggcgctgttcggtctggatggctccccccatcagcgggaggctacaccccccaccagcaggggcaagaggagcagcgggatgggagcaggccaacgtcctgcggcctggttgagctcgcactgacaatcgcagctcaggcgctcaggactgccaggacccagaggattcacacgccagccccggctgaagcccagctcctcatcaaccggtgagccgcctgccagctcctgctccagctgctgagaggcctgaagagaccaagacagagacacagccccgcagcaccacagggaggccccagttaccccatgcggatgagtttcatggccatctctaactaaggacaggacatcgatgtcatctgtaacttccggtgcactggggcacacagctgcatctccccatgctcacctcctgcctcttgctctgcccagtgctggagtgcagtggcacgatctcggctcactgcaacctctgcctccaggattcaactgattctcctgcctcagcctctccagtagctgggattacaggcttgcacca

SEQ ID NO: 1089 - DNA, 814 bp, Homo sapiens
cgtcagtcccgctgtctgtgtcaaatcagaaaaagaacctgaccgtgaggactagagtaagaggctgtgaagactgccgcctcctcgcacgacccacaccgtcgagtgtccggagatggacgggaaaagctaccacagtggcatggccttatttcctgatcttaacagcatttgtttgccatgagaggctgcatgacttggagccagtcaatctacggtgacagcaaagcagttgtgactctaatgtactgccaccaaaaacactttcttttccgtctctcagccttagcaggatcatctgagccactgccagttcagagtgagctggggctgcttttccaggagggcagttggggacctgacttttgaggagattctgaggtttactgaaggagcaaaccctatggggttagacagagttttgtgaaatctgagctctgccttctctgtacttcagttactgcctctgtaaaatgggggtgtggacactgtagacattaaatggcagtgtataaaggaggcaccatctggagcatttgtccagcctgcaatgatgccgtttgtctgagaaggttgtagggatcatttctggtttgaatctcagccctcttcccagctcagccaccagccatctggaattgtgggagaggtcagacggctgcaaagcctctatgtggaattggaactaaatacacatatttatcagtatttaatggaagactgcaggatgcttgcagagtctacagaaggcactggtaaggtggctcttttagtctgggaacaagaactgggcaatggatgcctcagaggctga

SEQ ID NO: 1090 - DNA, 5391 bp, Homo sapiens
tatgcctcaatatcatttatgctgaaaaacaacttaaaatgcatggcctgctcagagtggtttagaaatgtgatcatttagtcttcctcttatatagattttacacctcttgaaagtaggaactgttacacataagtcaatgagtatttgttgatagtgtagtgttcacttaataatatacgtatttcttttttctatttaagaaagcctgggcgacagagcgagactccatctcaaaaaaaaaaaaaaaaaaaagaaaagaaaaaaaaactcagtggcttaaaacaataactatatattattgtgcatacttttcatgggtttgctgggcagtttctcccgtttgtttctttctctagtttctgtggggcctgctcttatctgagatcacctagtcaggtaagaggctttgctgatcttggcaggtctagcatggccttatccaggatgatgggaatgactcttcctctaataggttccggcttcatctgctaggcccaggcttgctgtgattgatgaagacaggcatccacccgagtgagcagaagcacctaagggtctcttgaggcctagattcagaactgggacagtgtcacttttactgctttctgttggctaaaggcagtcacaaggtcagttcagattcaaaaagtggagaaatggactccatctttggataggaggagttgcagactaacattgtacaaggttgtagatacaaggagaggtggaagatggaggcatttttgtaatccatgtaaggtacatgctgaaaaaattactgaacccagctaaagtttaggttcttcagtctgaaatatgggattacacttgatcctgaacacactgctgatcatatatgtactccttagattatatagaaatctatgtggacatgtgtgggatgaccctctttattaaaactgttaattcctaactcctgtagaatagagttattatgtttttttcttttgatgccctgtttagttggtttggtactttcactggggctgtgtcagtttaaggtccaaaatagatctgactgattctgttttgggggatggaggaaggtatcttaggtctcagtgtgcttctgagaagtctttcaagtagatgacctcccctgttctgcccacacccaaaacccactgaccaagcacttgctgtcatgttaccctgttttgttttccctgtggcacttatcactggttaaaattcttattcacttacgtgttttctttttctgccttgtgatatgagcctcacaagagtggggacctcctctgaccctctttgctgctaaattctcacagttaagaatagtgcctttctgttcttaggaaatgctcaataaatatctgttgaacatttgtaataaatattttgtaataaacaagtcagcagtttgttaaaatacagtgtgtttaaatgctatgtcactggtgcattgcagacacttgttgggtatttatggaatcttgagggagggccgtggtcagtaggagctcaaggagaatgaaagcttgaagccacaaagggtttttctagattaatccagtgaaagacagatgagcaggagagttagggtatgatagatttgttgaaatgttgaactgttagacttcaggctgggaaggagggaagtagagcaaaaagtgatctgatagattgggatagagattcttccaagaccagagaactcccacagggaagtagttaaacatgtatactgcaaggttggagatttggtgttgcagtgtgatcattgaagtcatgattttagatgtgccaggttatgggtatgacaaggttctgggattaagagaatggatggctcaggtagttgaaggaccttgggggaatggggaataaatatctgttctttgagagaatgcagtaggacagctgatgggagaaagtccttaacagccaaggtactgaggtaatgctttgaaaagaggttgagggtatagaggagtttgctaattatggagcaccatttccataggtagttaaatttgtaagatagaaggtggactgtagactaggtcagggatggaaaaaacaaagccttgtagggttaatgccaggtcagtagatggattgagagaggaattggagataaagttaatttgggcattgagaggtttgctgaatttagtttcagtagactcctagagaaaggtgaccctgggacttacagaggccgtgactcatttggccaagagtggtggtcagcccaggaatttgtgggttctgcctgtgctccttaaagggtatttgggtaggtagattgtgaactcttaatagcttacatactaagcagatacatagtcattagcagcttccatattttcactatggtttttcagaatattttaagtatttttttattagaaatgacattttccaaatgtaaactctttagagatggaaaacattaatgatatatgcaaatactaaaggacagtgatttaatttaagtaatactgttgtcaagtgtaaaattcaaagatctaagcctggaacctggacttaaaaaaaaaattcaaggatcaagattttcaggttagcattttctattttttggtcatacttttttttttttttttttttgagacagggtcttgcactgtcacccaggctggagtgtagtgacacgatctcggctcactgcaagctccacctccagagttcatgccattctcctgcctcagcctcccgagtagctgggactacaggcgcctgccaccacgcccggctaattttttgtacttttagtagagacagggtttcagcatgttagccaggatggtctcgatctcctgacgtcgtgatccaccctccttggcctcccaaagtgctgggattacaggcgtgagccaccgcgcccggccacattttttttacattggtattagcagtagatattttaatgtaaatatttaatcttttttgctgttagtcattttgaaagttcaaactgtgtgatgaaccagaccaaaacttcataatctttaaaccacaaagttgcctaataggcaacaaagtaagcaggacaacagtggaagattttacaaattctcagaaacacctggaaataatttaggaaaagcttttgactctaggctcatagatagagactgtacatgaagaataattaatagcaattactttcttgtctttagtctttcgtcagatttgtttctttgaaaagagcaaggcaggttaaaataatctgtataatataaattgcccatgcaatgcaggtcagtttgttttatgcaggtagcagtagtacgaacttggggtccaatgatattttttatatactacttatatatgatggtaataattaaaatctttgagtatgttttatttctttaattatgacaatttaattaaatgccaaatgaatataacatttgtcagacataagggaaaataagatgaataagcactgcacatgatactcagcttaaaataagaacattttttttatgtcaaagagcttctctaggatctgtaaataggagtgtaattgaagttgtaaagtacatgcatttgattttgggaatttctttattataatcttttatccataatatgtgtggcaaatttactctcctacattgtagcttaccttcacattccaagagatcttttgacgaacagagttcttaattttaataaaattatgtcagtcttctgtaaattaacacaggttttttgtttttttttttgttgtttttaattcctttccagtactttaatctttttccattccagtccttacatttctttatattgctggctagtattgccagtacagtgatagaagcaactacagctctgatgtaaaaatgaaggattctaatttttaccactaagaatgatatctgatgaagatttttggaaggtatcatttccaggtgaaggaaattctctatttctactttagtaagaacttttattatgagtttaagtattgaattttatcaactatttgttctgcattcattaagattttttttcttttagtttgcttattcagtgaattccatgaattgcattaatactcttgttaatgctaaaccattaatggtaaatcttacattgttgggatcaacccaacttggtcatgaagtactcttttttccaagttaataaagtttgtattttttagagcacttttaggttcatggcaaaatttagtagaaaatgtataaagttctctgttacgcgtacacacacacaaacctttaccccctcccccactgtggacatcttgcaccacagtgatacagttgttacaattgtacctacattgtcacatcattatcacccaaagttcatagtttaccttaggattcactcttggtgttgtgtgttcattgagttttgacaaatgtaaatgacatgtatccaccatcacagtatcatacagaatagtttcacccccctaaaatcatctgtacattgttctgttgggtttgttgatacttcatttaagactttgatatttatgataacaaagtgaaattgccctgtaattttcttctcttgtactgtcattgtctggctttgatagcaaggttggtctagcctcagaaaatgagttggaaggtgttccacttttttgtactctggaagagtttgtatgaggttagaatcagtcatggagaaagggatattatagttttcaaatgttgcagtgacttcttgttttctctgtgtactctgtccttttattttgagtttatattatcagatgcatttaagtatagaattgttatgttctgttaagtgtagaatatgccatcagaatgaagccaacatttttatcatgaggggacctccacctccggtagtacttgtgcctttatctgttttgtctgattttgatatataaactttcttttatttagcattacctactctaattttttttcacccttttaaaatatctgtttatccgtatatttgggtgtatctttttaaaatagtatataatgaatctttttccagttttataaacttttttttaacttatagtcaacttatgattgttggtatatttaggtttatttataccttattttgttctttcttctcttccttgttttcttgttggttatttaaaaggtatatagttttaaaattgtgtacaaccaagatactcagcaatggataatcaattttcctctcaatctttgactttcaagaaactggaatagatttcagtatgtactacaaattgagtgagaaattattcgggaaaatgcccaataaaaggccttcataattttggaagaagtaattggaataaaggtgactcatctcttattagtgagaatggttaaatatgctaattaaatgcctttcactttt

SEQ ID NO: 1091 - DNA, 481 bp, Homo sapiens
cagctaccctatagttggctgcctggcttcagagctttttttgaacttggaagacttcaagccccaactgaggaatccttgatgctctgttgttttgtcttgctaaaatgtacaagaaacttgcacagctctgtccttcaggcttaaaatcatcccagggaggtcactctaattccttttaatgtgtgctgaagaaagggcagcacagctgaagcctgatttaaaatctgatcttctccctaatgtcacaaggacatcctgagacaatggctgaggagctatgcaccagtacccagctggatccctgatacttacattggcagatgcattatcaacagagacatcgatttagagtgaattaaaggaattacaaagatcaagatgaattcagtgaagcttcccataggactgttcaaagatctccaggcctgccattcatgcattcatgtgagagagacactttgggcctaagaaatgaagg

SEQ ID NO: 1092 - DNA, 398 bp, Homo sapiens
cagccgggttcaatgcgccatattgaagaggacgggtctaatagatcgctggagacacaatttaactgaaccccgcccgttgtggactgactttgatgctctgagtccctccctccttcacgccgctagcaggccctgatgtagattgcctttgtcttacttgggacgtttacctgagcgcttggtgctggtgtcgggaccgggagataggagtgtctcaggagagacctggccgaaaaccgcgagaaagaaaagtgaagcctagtgaaactgcctttgcagtgactcaagaaaaactcatcacctggagtccgtgtaagctcggcgacagccctagcagcgaggccaaaacagtttgggaagaaagaaaacctaaagtatttgccgttggtgattca

SEQ ID NO: 1093 - DNA, 1529 bp, Homo sapiens
agctctgtgcctggaggggactcgccgccatctcaggtctcttggctttgccagggcccaccggagaaaactgacgacccgtttctgtaatccttatgggagaccaaccttgtgcctccgggagatccactctcccacctggaaacgcacgggaagccaagcctccaaaaaagcgctgcctcctcgctccgcgttgggattatccggaaggaactcccaacggaggtagtaccactctaccctccgcacctcctcctgcatcagccggcctgaagtcgcaccctcctcctccggagaagtagagaaataaatttctcccaccctaaaccagtctttgagtgattgcagtatgactccatttccctggtgcattcatataatagttcacctggtgaaaacaatgaagattatttacaatgctaccctgctttttctggtgtcctgaacctggaagttgtgctttttaagtcttatgatgtaatcagcgcgatttcacttcctgaatttcgatgaattctaagacatgggcaagatcgggttgtaagacctctgagatttaaggccatgccctggatcatggtgaacttaccaaagcaaacaatgcctgtgagatggtcctgcagcagccaaccagtgaactcttttggtgacatcctgttcttgttgtataactttatattcctataaatccattaaggccccaataaagtttgtctctaagcgctgtgttagatctatatgactacatctagtaaattgtgaattttaagtaaatattttataagaactcctatgtaaagcattactaaaattagtgttgaaatatgaccttcttcctacatttattcatttatttatgtctatttattcatttattttagtgaaaaatataaggaaagtagaggaaggttaaatccaaaaaagaattgtttccagtacactttctttaatttgctgtcagtttttgcatggaatctacatctttttatgctaatcctcatcctagtattttacatcttaactatttttttctgactgaaatggttgatgtgcttgttttttgtaattttctactttccttctaaaatgcttagtattgaacaaatagaatatcctaattaaaaacagtaataaatattatggtgaaaaaatacaagtaaaatgggaaaacattagatagcagctttcaatatttcatatagttcataaatgtttcaggaattacaaggttatagaaaaaaatttatagactataataatttccagggatataaaaaaataaagcttctacctttgaattgtaataataaaagataaacagacttgaaagcatatattatatctgaaaatgtcagataaacttggcttataaattaaaatataaaataataatacaatttgttcaaataagtaattaaagcttacattgtaaaatgaatatttagagagattgtgaaacctgagtattttacccaatcctctgaaattagtccctagcatcagaattaaagaatctgaaaaatcacaaa

SEQ ID NO: 1094 - DNA, 812 bp, Homo sapiens
aaaagcagagttgcatagatcaaggtatgtgagattctgaaagaggtatattaaagtctcagcatgaaagcataaaggccataatgaatgcatttcaagaatgtgatctctttcagcatgtccacaccctgccttccacatgtcactacaggagaggaggatgaggaaactgaggcatggagcagtccacgtgaatgagtctcgtagtaagtgatggaactaggatgcaactctctggtgtgagtgccccactctgagagatggaatctcgctctgtcaccaggctggagtgcagtggcatgatctcggctcactgcaacctctgcttccagggttcaagcgattctgctgcctcagcctcccaagcagctgggactacaggcttggtcaggatttgtgtagaaagtgcacagcagaactgagcctatgcattcaaagtcctgagtacccctacaaaggaagaggacacaaatgaaaaatattccctcataccaaggattgtcctgaaatccaagaccatattttatgagaagacatacatcagagagagagagattacagtatgcaatctctcagctgccaacagaacacagatgggcttgggaacagagaatgatccagatctgcaggactggagcaatccgtgggaagtttggacagaagatctgatgcataagacagtaaaggactattgaatgttccatgatagatatgcttgttcttttgcctgcatgcccttgaataaagacattttgatctccaggaccaacctgagaaacatataatttaatctagttttgaaagaagagccc

SEQ ID NO: 1095 - DNA, 525 bp, Homo sapiens
ccctcagtaatatccaaagggcgtccagagggtggggaaaatccctacagcacagcttttctccaaaaagaaggtatgcactgcccctattttattttctaacttgattcatagcacgctattattttctttcatcagtgaactacgcagaggggattccaccctccccaagacggccccatgcaaggtcaagggtttaccttgtcataatagtatcgcagggctctgctcagcttatcatagttcatatttgttttgttttttcggagtccccacagcttggccacttcttctgctttgaggagcttgaattcaccatcgttcgaggtccagcagatcaaatgctcatgtttctgatccagcagcaactgcaacaggaactgccacagcgtgattgcactctccatacctgcagggagaggaggccaggtttcctgaggcctccccagaaacccagcagatgccagcatcatgcttcctgtacagcctgcagaactgtgagcccattaaaccgcttttctttat

SEQ ID NO: 1096 - DNA, 807 bp, Homo sapiens
tatggtgtgccgggggccgcgcgggccgggagttgggtgggctgggggacaggcgcgcccgcgccgcccgctccagctgggctagtgctgcacattccggccagcccctcctcaagaccccattcccaagccccttctcagctccctcgggccggcagagcggctctgatcagtaaaatgctgttgaaggcccacgggcatgactgcacccctcactaattggtcattggtttggggaggacaccactgtcccagtggaaccttgagcacaccttggagccctcctcttcctctccggacctgtgccaaactgtgagtggcacagagcaaggactgtatgtgttctcttctttgttgcatactcagttccttgaccacagtgccaagcacacagcgagcactccctgtgtatctgctgagtaaataaacgaatgaacaaacccaacacatttcagccaagtcctgctgatgtttctcctccgatctagctcctcctttccagccttacttctgccactccagatttcacccccatcagcttcagactggataaaaggaaaccatttctctaaaggatcacttgctctctcatttcaggccatcctgcagccaccagaaccttccacatgaaatgaaaggctcaccacttcataggctttaaggaaattcttggccaggtgtggtgcctcactcatgtaatcccagtgctttaagaggccaagatgggaggattgtttgagccagctgtttgagaccagcctgggcaacgtcatgagaccccatctccacaaaaaaaaaaaaaaagaa

SEQ ID NO: 1097 - DNA, 1932 bp, Homo sapiens
gagatggagtcttgctctgttgcccaggctggagtgcagtggcatgatctcagctcactgcagcctccacctcttgggttcaagcaattctcctgcctcagcctcccaagtagctgggattacaagtgcccgccaccacgcctggctaatttttgtgtttttggtagagttggggtttcaccatgttggccaggctggtctcgacctcctgacctgaggtgatccgcctgcctcggccttccaaagtgctgggattacaggtgtgagccaccgcgcccggccccatgattagcttttaatcaccattttcagaaggaggttggtggcatgcgggggccgggctggggtggcttcctcagcatgacgtctgtgcagatgaggctttgcatcgtgctccaaaaatacttaccatgttttgccagaagagaggccaccttctgtcctccgctgaggatttgagtccttttgcccttggtgagaacaccaaagaggaccgccggaatgcgagttcaaaagcagatttcaatcctaaatctcttaaacagtcagcattggcttgtctcactagaataccctgtttctcttctagaattcttcccctgcctgcccccaaaatgtgaagcttgctgaaatcaacttgaaaggagatagcacatgccttttgtttctccgctctccccctatttctcttccttcctgctccctgcataatctgaattctctgaaggcaggaggaagccaaggtcagattcaggcaaggtaaatttctgatgtgtgtggacacggaagagaagatgtctaaaaggcaactagatgtgaggcctaggccctgcagagtctgcagagtagatctgagcttggaagtcagcatgggatggaggctgaccccaggggaaaggaactgtgcaagtgcaaggtttgcataagtgggtgcttctcagggtgaccaagacccttccggagacttcagttcctctgactatatgagacccaagagaaaaacagcacaaagtgctccttgagttcaagggaatacataaattctgaacatttccatgtctactagcatacaacctaaacagggataaaaagacacctttcaagtcagaaatagggaagatgccacttctctgcatttgctgctacctctttattcctttctttaggtcaccaaatatctattgagtgcttgctctgtgatctggcagacaactcaaaggcacagagatgaagatgaaacacaccatggagccagggaagggcctggatgctgtgggaaacactacaacaggtagagctctgtaaaaatgagatttcaatgaagtttaccatctagtggagaagagatccaaggacacccgtgactgagaaataaaacagaatcaattgggtgcaataggagaagttgctgacaaagggctttggagactgagaagagagagaaacaccaccaagttccttgcagagaaaggcatttgataaaatgtgtgttgaataaaaggaccagcggtttgtggaggatgaggaaatgatggctgtgagatgggcctgagaggaggggcagggttttgaactgggaggaaaggtgccatcccattcaggaggaggatgaaatcagggataaaatgaggtggctgatatgaaaggagtggggcatccttggcttgggcttgtgaggagtgtgggccacagtgctatgggcagtcaggagccaggctttcagttctaacggggcttagagaaaaggccgattcaagtctctttgctgatggcaagaggaggaaagggggctcttggtaaccgaggacctgcttcttaagcgctggagacttcgcattcattacctcacttaacactaagaactctgtgaggtagctcctcagtcccagcacttttcaggcgtggaaactaaggcttagagaaggagtgtac

SEQ ID NO: 1098 - DNA, 548 bp, Homo sapiens
gctgcgggcggcctgacggtggcggcagatggcggggttgctgtcgctgctgtggcctttcttccagcgcttcaacttagctgagacaccagaaggcaactttcccgagcgacccatgttgactaagccgtggcgaggaatgagcttaaatgaccggcttccagggacgtagaaacacgctcagaacccacgtggataccctgtagccttcacttcctcttcttctggcgtcacttccggattcgtgtgcattactatgaacctgagtcttgaggcatcatctgggctcatgccctctctgaaacataaatcctgtactccacagacaccagctgagccgggagatctgaacatcaggcaatgagtttgcaagatggtttaacaactatgaacatgtggtgtcctcacaggaatcctgtgggctgaacagcagccgcccctccttccacccagcacaaaacttggtttgccccgctcactctaaatctgggccttcaatgaatgttcagtggagttcttctgtggaaaaaaataaatgggaaaggaag

SEQ ID NO: 1099 - DNA, 6585 bp, Homo sapiens
atttggcccagatgaaaaccgggcgggatggcagccccggggccagggatgcgggagccgccgggaagacccgcgcgccgctcgactcagagggactcacaccttcccccgacaaaggtcattaagttaggcggccccactgtcgaccaagtgcccaaggcattgtgggagtcatgattccaagatgcccgcgacggaaaatggaacttgtcagctccttgtcatgggagcattgtgggcgccacaactcattcagctgcagtgaaaagactgttgcatgtcgctgtgcagcctcttatcgccgaggtctggcttccgctgctgctgcgcggcccctcccccgcccgcccagccccaccaggaagcccagggcggactcgtcgagctcctaatgcacgcggcggcgagaaaaacgctcttcaactttccgccggcgccctcccgcgcttccccgggccacagggtcgcctgtcaaccggacagagcccgcaagagcgggtcatgggcggtcgcccagcggcgccgagagcaggaggaagccggagcccgcgcgggcgccgtggatcccctcggcctcccgttggtatcttccatctcatgcgttcagcattgtaacctcgcggcgggcgtgcagaccggacgccctcccgcttcttctaccgactgctaggcacaccagtgggttcattttgaaagaggcccttgcaccgggctttgcaaggaagccggcaaggttagattgaaggttagaagccaattagactagaatcctgcgatctggtgagactgccgccttaaaatgcaccaaacagtttttgaacctggagggctaacaggcgggaaaaacatctgcaagactgccaccgtgtatttttctcaagtaacaggctatccacagttttggaattccttagtgaaactgtcacacaggcacaaacacatgtcagctttccttctagtttgtaaataatatttgtaatttacaggccactgtattcccaactttgcaccatgtgatttagagaaagcaaagctccctctttaaaaataatatgttacttctgaaataccgggatattccacggcaagtaagccatattgtcgccagagcaaataaaccgcagccccatatcataattcactgggtgctataagatgtaacttggctttgctttgaatggaaagaatcctgaacgtctgtgatgtgatgaagttttggagactgggggcaggatttcctttgaatgtaaggaattcggataacttgttcaaggatgattctagtgaaaaacgtttgtcccatgtttgttgggacaaaaatgctggatatggtacaacattcttcctgcaggttcggttttgttgaagagagtgaggccagctcgaggtgaaggaaaaacatcagaaaggtgctaaagtgcagaaatatcttccagaggcactaatagccgactttagttcttgacctttagctagatccacaaagcactgagttaaaattgtacactgatcccttccagaacaaattaattaattaaatggtgcctcttcccagcgttaatcgtttaaaaggactcaagtacccacacagtttaagcaaactaaaagaacactgacactttctcagagaacagggatgggaactttctatctgcccattagtatctaccccaagctacgaagacttccattcctcttattaagcattcagcaactacatttagtgcctactatgccagtgatgcaagaatggataagacagtccctacactcaaggataacgcctctagtaggtgagagacaaaccgattaattctgcataagggataagtgctgtatgtgggaagcaatccaatgagggctctgaggatggcaaaggaagggttcctggaggatttacatttaactggtgccttgaaaggtgtgtagaagttggcaagatcaaaagggagtagagtccaggtggagaagagaaaagagcagggcaggctggatggcatggctcacacctgtaatcccagcactttgggaggccatggagggaggattgaggccaggagtttgagaccagcctgggtgacattaaaagaccctgtctcaaagaaaacgaaaggagcagggtatatacaaggggtctgccagccttctcagcctttctgtgagaagcgagggtagggtagtacaggagagtggcaggagatgacactaaaagtaggtctgtgttgatctaacgagtctcaactttactgccaaaactaatgaactaggaaagtttaggcagcaagggccagagatggagtctggacttgtattgcagaaagttcctgtgacggcagcttggagggtgaatgagagtgtgggatggaggggtgaatgggtgtggacagactggaaaaatgactcatgcagggaatgaggaagggaggagccttgggagactctcaaatccctggcttagcctactgaattgcttgctacttgcctttttatgtcttcattttgcctcccattgtctgtgatattaaaggcctaacttcttagtagagcaaactttgcatctgctagcaggttggtgccctagctagcttccatgcccctctgcttagaatgcctgcgaaccactaaggactaatcctagtggtagaaatttattttcaattgttctcaaacccttgtagaattccaagttagaactgtagtgttcttttttcatgtgggttagaaaatttgctgtttggagcaacatggtgaaacacaggacttttgaacctgcttatggtgcaaaaggggaaattatatttctacttcaacactggaggaggggggacttctgggagcaaaagagaaatggaaactgagatgagacatgttttttactccatgacagaatacaaagaaatacaaggatgatcctttaatgttagaaacagtagaataaccatcctggtaaataaaaaaggagaaaaaatgttattttacattagatacagaaaaacagaatggctaagaaaactcacaaagcaatggtcaatctataactcgagtccaaataaattgtgatataacactaaattaccactgatttggcctaattgactatcactggataacattataacatgaatgataatatttaaaattttaaagcactgtaacaaacaccagatcatgttaaaactattcaatcatgttgtcagctttcaactgccagtagcatcctaaccacatttcaaactatggaaattactaaaaaatcattattgtaataaaaagttaatagttcctcatttagaataccattgatattccctcagtgccaggagaacattatggtttctcctatttctgtgaagtgtatagtctacaggttcataagtgagtatatccatgagtataaaaagaaggtcatttatgggtggagagggaaattatagaaaacaatttcagatgaaataaactacattttcagataaaggaaagagtgttcactgcaggttcctgaaatatttcagtccattcaagttttaattataccaatgaatctcaataaaaatacagttaaggaatatggtttttatagataatgtcagctccttgtttaccaataataaagataaagataatggcagcatttatctttttcagtccaatggggatatttaaggtacctatgtaagtgtgtgagtgcctgtgtgaattgtgacttacttcttctgcataccacattcatagctcaataagctctcactgcctctgcaatataacttgtctttcctgacacacacacacacacacacacacacacacacacactctcacacaaacaaatcacctaaataaaaatatctcaaggaggtatactcttttaaaatgctatttttattataccaggataaaaataattgattgaaagatggtgtcaaaaccagaacctagtctcatgtcctgtgcttcctaatcaatatttaaatatagatggtcaagagaagatgactctaaaaggcaatcaaaagttgcaaacattcttgtatggagaatcaagtttaagtagatgcattaaatttatcacattaaacttcacaacagggttgaggagagaggtgagaccttcttttgtagaattcaaacttgttcagatatttgaatacatatacttgagagaaagaattacatgaatttagtttatcttcaaggacctttatatatttcatacacaacacaatttctttgtgctcattatttaaaaataaaaatatgtattctaatagatactatgtatatatttgatatataatacaatatattgtatgtataacacgtatattgcacatgaatgtgaaaatatataaaatcaatatatttgctactaaatgtttatgaaatttaaagcagttaaatattatgcatttctcaattaagttattttacctaaaagttgaatctgtatcttcaatatcattattttaggatctggcaatagagagacagtaagcaaatacattttgaaattaaaagttcaaaatcatagaattttagcattgaatggaatgttagagagcatctggccttgttcccttgttaaaccagaggagtgcattatttaaggaacttggcaccatggcagagcagaactgacatcagtgtcttctgactctctcaggccattcattttcattgtctttttttttttcttaaagacaataaggacaagaagaagctctaaaataggcctaacagtttccccagtttaatgtaaggaggtgctacatgagatttccaagagtatagttcttccttcctctgtttcttccttctttcattttttccttcttttattctttctattttttcatcctttctttcttctttccatacagaaaacacttttcacacaatgactctattcatttcacaaacatttattgagcatcagccatggctaactcctattctaggtactgtggttacagaaatgaacagcacagataaatcacttccctcaaaggggttgcattctactagggggagacaagcaacaaaaaataagtcaaaaataaaaaataaaagataaacatatgaggtaatttcagatggagataagcgctatgaaataaagcaggttggggggatttgggagagaaggttgtgtgaaacaggatggaggactgagctggtcatatgcaggcaaggttctcggtgaagtgagaaataactggggaaagagcattcaaagcagtggggactgcatggcaagagccctaaggccagggttcatggtagggctagagagccaatggtgaacaaaaactacctaacctcaaggagcttacagtcaaggaagagggaaaaaatgaatctccatcaaattaatcacactcaaaatgcaaagctacaaccatgatacttttcctcactgggaaccattgaagtgtttgattatgttagaggcaggggtggggtggggtgatggaacattatctaaattttgttttcacaaagataactagataactcttgactgctgtgtaaaggctgatagtctaatctcagaagagactgcatgaagtccaccactgctgagaatgacagcaaaccaaaagtgggctctgtctaggaggcaacagacagcaaatggctggggacccagcagcggaatgtgatttggttgaagaccctcggcaatggggtacaacaaaccttagaaccttacatctcagagttgaagagaagccataagactcatgatcctcgagataacataacttgagggaagggagatgtggtatgcctgtttgtgtgtgacttatttattatttggagtcaacacaatgtagaaaattcgaaattagtgaaggtagaatattttgatatcagcagtgtttccagttcccagagatagggaactgtttgtattacagtttatttccttctaggcttttccaatgcatttttaaaagcatagttaatattgtactatatatgcaatttcttttccaaatttaatcttttaagacaatcttataaaacaaaggccacctcccccatgtcatttatatataatcttcatttttcatgaggtaatggaagctggagagttggcccttgaccaaagccttgcagctaacaagaggacaagcctcctgccccacagtgtttcacagccagtaccccaagctcctgaattcatctgtctaatgtgtaatatatttataaacactctacctgggatgtatgcgtaccttctactatggactgttgttaaagacaagtaaatatgcaatcgtggtctttcaataaactaaacggatataaaaataaatatagaatacagccagaagatcaaaattgacatattatctatttatgcttataatatgtaattacatgtaatattgtaaaacactttctaccatttcataaaattctgtgttgttatttagcccagaattcccttgcaatcttttaaaaatagtatctaatagggcttttaatataaatgtcgtagtgaaactgttttatgtactgtaacccaaacatttctacgtagtaacactgttccatatagaaaacaaatatgaaaaaata

SEQ ID NO: 1100 - DNA, 742 bp, Homo sapiens
agacatgccagcagaactctaaaggcagaatgtccttccacctgttttatgctgtaagacaaacttccaagtgcgaggcagtgtggagggctgttgccttgaatggcagctgaatgcaccagcgggatccttggcagcaatgcccaggcactgaagtcgggcattcaggagagctaaatggagaaaagaaacttgagcaaactgcttcctggaacactgagaacctgaatgggaaattaagaagaaccagattctttctattcttccaccagccaaggtgatgagcacaaaaggatccatcttatacagtgcttgccagcttccataatactactcaccacgatgttgaaatcacctgttccagaaccagtcctgtcctttgacaagaaggatttaattatcagtagtggtggggactggctggagagaggaaaaacacttcaaggactctgccacctttcgtagatggagagtgcaaagtttgtaccatggaactccttctctaacagttactctgtggcagtgcctatttcaaacctcccttaacttctgattgtatagatgtttgtttcatttgttcatctgtttgttcacttagtcagagatgttttaagccttaagagaaatagtggactagaaaatgccttggaaaagtacaaagttcaatccaagtaaactgtttttaaactaggaatttatgaagcctaaaatataaaatgtatatacatggatatgctctgaa

SEQ ID NO: 1101 - DNA, 387 bp, Homo sapiens
gcagtacatacagcttcgctgaggtctgtgtgtcaaacttactgagaggaggacatcgtggagacttatcgttaattagcaatgcttatgcatgcaaaccttggtcagatgatgttgtgtttggagaaaagagagaagagaattgaataagtacatgaccccttggaagctgttttcagttgaggattttgttgtgttgatgttcctttcagctggtcctatagtacccctcctcaggaatgtctccccagtgcaaggacaaagactgaagagactgctatattgatggactctcaagccaactatgaagttgaaacaaagaaagtgatcacctgaagacacctcctctgctaagaaacacccccaaattgtgcagcttctgccact

SEQ ID NO: 1102 - DNA, 541 bp, Homo sapiens
gggttgcggagggtgggcctgggaggggtggtggccattttttgtctaaccctaactgagaagggcgtaggcgccgtgcttttgctccccgcgcgctgtttttctcgctgactttcagcgggcggaaaagcctcggcctgccgccttccaccgttcattctagagcaaacaaaaaatgtcagctgctggcccgttcgcccctcccggggacctgcggcgggtcgcctgcccagcccccgaaccccgcctggaggccgcggtcggcccggggcttctccggaggcacccactgccaccgcgaagagttgggctctgtcagccgcgggtctctcgggggcgagggcgaggttcaggcctttcaggccgcaggaagaggaacggagcgagtccccgcgcgcggcgcgattccctgagctgtgggacgtgcacccaggactcggctcacacatgcagttcgctttcctgttggtggggggaacgccgatcgtgcgcatccgtcacccctcgccggcaatgggggcttgtgaacccccaaacctga

SEQ ID NO: 1103 - DNA, 528 bp, Homo sapiens
agtcgaagaggctaattccgggcctcttataaaaataagaaagaaaagcctcgtttcctctagatcagagagatggcttctggattcatctttccctgcaatccagcttctcttcctggggccctcataatggagactgggatcatcatccaggcttttgcactgggttaggaatttgggagtcatcctggatccatctgcccctgtcaacctttctctgtcaacagatatttactgggcatctccaacagccaggccctgttcatggtgctgaagaacagcatgtataaaacaaccctgccctcacagggcgatcaccagtgacctgtggtgtggagtctccttttacctctgtctcctccttcccactgtcaccatccttggtcctcctctgtcacctggaatactccacttggtaaccagcatgatcttctaacactagttttacccttgtcagcactttgccgaaaacctcaaataaagacttttttaaaaatgtgcgatggaaaactaaagttataaattata

SEQ ID NO: 1104 - DNA, 1771 bp, Homo sapiens
aaatctatgctgcttgctgaggaatgagattccacatttgccaagattggggtttctcatggactattcctaaaacatctggcagacgagatgagtccacgttgtttctgactaaatgtaacagtaggctgtgcttggctctctttggtttggggctcaacttggatgaataatcatctaacagcagactggaatctgaaaagaaaaccaagatccaaatatgtatataacagagggaaggccacgtggagacacagggagaagacagccatccatgagccgagaagagacctgagaagaaaccacccagctgacaccttgatcttggacttccagcctccagagttgtaaggccatggagatacatctatgaacaaagaagacagaaaatcctaccagaattgactgaaaagttgagtgaggggcaggaaagaaaaagaggtggcaaaggtagcaacaactatgttctgctccggaaagcataagccacagcccccaccacagtgcttggcaatgcggttgctgtttaatacctgctgactgagtggaaggaagacaaaacaattacctgactcaaagagaagcaaaagaatgctgccttcaagctgaggggaagactgaactgtccgtttctttctgctctaaagtgtcctctggagaggacgctggcggagctggtgctctcgtggtggcaggccaccaccctgtggaggtgtccatgcattgcaagtgctcgcaagctccaggaacaaacgcatccgcgcagccgtctggggtttgtcccgtcgctgccagccctctcgctgagtccccgccctcgccgataagagcccacttaggacccccattacatggatggcttcccaggacctgcccttaaagactccgatttagtaggttggaaatgacgcaattatttttatttttaattagtaccccaagtcattctttaccatcaaggaagtttgggaaacagatcacttttgtttcaatcacctgtggaactggagcagttatttttttccccagcgactttaccacgaagttaactttggaatacgttagtggttaatacacggaacgttcccgagatccctcaagaaagaagctacgaatacttagaagatactattccgcggcgtttacagcaacactgtccgttccagaaggattcaagtggcggcctgctttgaaggcgaagaccacagggcaacccaaacttcagaagggttctggccacgggagccacactggtcactgtcccctagtgctgggatgacggctcgagtgttagaggatcccactctctcctctggtaggtgaggtcagagagctgagggggccagaacaagtcttccttatcggattctgggcggaaaaagataaagtcggggaggactttctctttttaataagattcatcgttacgaattgttctaggcaagcagacctcaggagaaataggcccaagttttgattcctgttttcaccaagtcgcaagtcctaatcgtagcaagaggtgcggggaagagtcgccttccttcctgcatagtgggatccaagtcaggctgtccttgttagccagggtcaaaggggctctgccagggaaaaacgacggcaaatgtttttcaagaggaagtctccagccacttgtgacctgggaaatccgtctgggccaaaaagatagtggaggcttggctgagggccccagggacacacgtttcctcccgtatggagggggcgggactcttaataaaattacactgcacac

SEQ ID NO: 1105 - DNA, 1537 bp, Homo sapiens
atcaatatcaagatatataatgatcccctcattccagaatagtctcttgtgttctttccagccaatgccccacccctggattctggcaacaattgatctgctttttattaccatggattatatttgtctttcctagagatacaaataaatgaaataatgtagtgtgtcctctttaactttggcttatttctctcggcacactatttctgaaatttgtccatactgttgatatggcagacagaattttaagatggttcctaaaattcttgcctcctggtatgtataattttctctcggttttccgctgaacactaacctaggtgctattgtaaagggatttctcaagtgtaattaaagtccctaataagtttattttaagttagaaaaattttcccaggtgagcttgagctaagtgagtgacctaagcaggtgagttgttagaaaaaaattaagagatatttgaagcgtagacaaaattctgttggcttttaaaagaaaacttccatgtgatagagaaagccagatgatagggaacacaaggttacctctaaattgacaaccagcaaaaaagctgagacttcagtcttatcatcataaggaattgaattctgtcaacagccacgtgaccttagaggaggcccctgagccgcagatgagatcatggccctggccaataccttaaattcatcctggtgagatatgagcagagaactcagctatgccatgctcagatttctcacctgtagagcagtaaattaataagtgagcattatttgaagctgctaagtttgtggtgatttgttacacatcaagagaaaacatatgctgtatatattattagatttttcctttatattggtgggtgtatttgttatctattacttcctaacaaatcgacaataattaagtgtcttaagacaacacatatttattacctcatagtttctgtgggtcagaaatctgggcatggtttatgtgagttctttgatttaaagttgttggcaaatctgtaaacaaggaagcagtcaggaccgaggtctcatctgaaagtcaacttgggatgggtctgcttccagcctcacttaacataacagctggcaggattcagttgctcttgggtagttggattgatggcctcagataactaggtagctattagctagatttcaccctcagtttgttgccgtgtgggcctccctaaggtggcaatttacttcatcaaaaccagcaagggagagagttggctacaatctctagtaatgtagctacagaaatgacatccccttagcaatgagatattttattaattagaaagaaattactcaacaggaggggattacacaatgtagtgaataccaggaggctgagatcagaaggagctagtgtagaagctgcctaccacagtgagtagtattctattacatgaatataccagaatgtctgaatccacccaactgggcatagacgtttgtgttcattcaagatacagactattattattttaaaaataaaagttactatgaacatttaagtataa

SEQ ID NO: 1106 - DNA, 557 bp, Homo sapiens
ggtggtagcgcgaatgggaggtggagcggagctactgcgccgagggacgcttcagaaactctgtttcagtccttcgcggatcctaggatgtgacaggtgttcgagttaaaaggtcttaaggcgatcggttgatccaaaagcagctgaatctttaggaggcccaggcaggaggatcgcttgagtccaggagttcgagaccagcctgggccacagagcaaggtcaccatctctacaaaagaaattttacaaatcagccggacatgatggcgggcacctgtggtcccaactaccagggaggctgaggtgggaggatcgcttgatagcccaggaagttgacggtgcagagatccctccactgaactccaggccgggtgacagcagagcgagatcctgtctcaaaaaaaacataaccgacatccagaagtgaaataaattagccagtgtcacaaagtattaatggttgagtcacaaattgaatcctgtttacctgattctttacgtgattcccatgtaaggaatgttaaaaacagtaaatactaattcctctgcgtcctgaa

SEQ ID NO: 1107 - DNA, 1006 bp, Homo sapiens
tctccttatactagggttcgagacatgaggctgtctttttgggccttttgcgttgtcacagtcccagaccacggaacattctctcttccccaggacaggacattctctcttccccagcctccttcctgtcctggcgttgagtcttccaaatggaaaattccagccatatcaattggtgatgcacccatttcttcctgtggaacgacagtctgatggaattgcttctggagtaaatgcccagcttcttaccacttcagtgtcagcctgaatgtttggaaagttctagcacctcaaaccatttgcatctatgaaagcagaactctattttttccctttggtttagcttgtgagttctctgtgggaggaagatctgatatggccggctctctttcaaccctagttccagcagagagagagagagaatgttctgggtgacggaccctcccagcaaaggggcttgctttatttgcttctctccccaaccctccactcttagcctttgtcttttgaataatccttcctcattccacttttgtggtgggggataattagtcacaactcagtagtaagccgtgcctgctgtagagaggaagcattcagggggttggaagtgtggagaccccagtctgattgctggaatcagtgctcctcggttcagtgttttgagaccaggtctttagcttctagctgggcatatttttctgctttgtaatttaacctgtatcttttttttcccatgttcctgcctcatcagggaattgtaagatttagggggaggtgtgggaaatcttactctttgccctaaagtattcagcgatcagaattctggataccctgcaaaacacctccaacctccctgcctttgaaccctgtgttaacaatgagaagcttgtttatttgaaggctgggttctcattggcccacaggggtaggttgtaattgtgtgtctaaaaaattgccttttgcattccccaatagcatgacaactggaatagtaatttgactt

SEQ ID NO: 1108 - DNA, 448 bp, Homo sapiens
tctcgggcttctcatcagcttattggcccatttagccagggcaaaggtgcatgacaactctgagcaagtcaaaacaaccgtcagcagcgggaaacctcgatgaacaaacaccgggagagtgcattcccaggggagttccaggaggcccatggcccctcctgtacagccctccaccgcccagagccttccagcgccgtgtcttccccttggagcatctggaggccccagacagcacccgcctgacgttcagcagagggggagaccgaggcctgcagcagagtgttttgtcagatgctgctccctgaccgggagtgagagggaacccacctagagtttctgcagatcctgctttgtgacttcgagtgaagtgtggaagcgctggaagcacttagaccctgcctgtgagttgtcatgtatcatgtctgcaaacattaaaaatctcaccaga

SEQ ID NO: 1109 - DNA, 1740 bp, Homo sapiens
acacgagagctgggggactgggcacccagacagtggctgtttccacattggcaaaacaggagttggtaacccagaagccatgctgcggggttaacatcagggaaccgattcgtcccaacccagaaggaagagaaaggtcaggctacatacccaaaaataccttttgccacaggcttgggactactatcctgtgaatgtcagcaagcctgtcctctacagggatccgtggagaagataaactctacaagaaacagaaaaatgtctacctgtctccagaaccatgcagactccctccccttcaggatctcctagcccctgatgaatgaacagcacttccaagatgcttgagacaccgggcacagctactatcagtcatggcgctcccaacctgcagacattatcagtctgctggactggaaagatacacgaactgcacgcccttaagcggagcttcacctcataatattgggaaaagtaagagaatcctctgaccttccataaacccagaatcacctgcacagaacttccctccatcattactcagattcccaggccagcgttttccttccatacccaaaccttctcacaaggaaggtcggcagaaacagaatacaaactccatattgcaaaggtacaatgggttctcccccacccccgctccttttgtgccacccacttatgccatccttttcccacacacaaccacatggaagggttttcactttactctgtaaccagccttcatcataacccagtctccgtgctcagaactagaaagacagccttcttaattctcagcggaatatgggcctaacagtggtaggacaccccccagctattcaaagaaaaaccaccagaggaaataatttcaaatctggctttacaagcatgtaatataaaaataactctgcctttgtctgctatagatgactttccctaaagggatggctgtccttaaagcaatcgctcaattctcatggcaaacagattcttctttttccagtacccagcacatattcgtccctccaggagagcacccccacatcccacctctgacagtatctaaaatgcaaacattgaagtcatcagaatgactcctgtcatctctgctggcctaggaacattcaggacactgcaccttggatgaccgaggagcccctgcagttagctctggcctccaagaaccactactcttcccttcattaagatgtcagcccagaaagcttggtgatcccacaatagccacaacaggttttaatgaatccctggattgtttcttgaaagaaaactggatttcttcagatatttgattcattctttgatcagacagttagaggaatagggatggggtgctcaagataagaaaggggttggggcagtcatggtaaatagtatgagaattcacaaaaatgggccaggttgtggtggctcacgcctgtaatcccagcactttgggaggccgagggggtgcggatcacttgaggtcaagagtttgagaccagcctggccaacatggtgaaaccccgtctctactaaaaatacaaaaattagccgggcatggtggtgaatgcctgtaatcccagctactagagaggctgaagcaggaaaatagcttggaccccggaggtggaggttgcagcgagccaagattgtgtcactgcactccagcctgggtgatggagctagactccatctcaaaaataaataaacaaataagtaaataaataaataaatattcac

SEQ ID NO: 1110 - DNA, 827 bp, Homo sapiens
ttcgcccgaggcgggctgcgggctgctggggtctggtgcggagggccaacttctgggaataacctggctgtgggcttaaaaatcgtagtcattcattatcacgggcttctctctctcgaatacctttaacatttatcgccttgttagtctccacatccacctccgtgaaagagatggagtctcgctatatttcccagtctggcctcaaactcctgatcttaagggatccccagctcaacctctcccagcagctgggactaccgggctgtcaaatttacattaactatgagaattaagcagaatccgaaagtcatctgagttggctatctgcacgttctctctgtaccagtgaacttgaactgtggctgtggcctggattccgcattcaaacatgaccaactgacctctggttgtagggatgtcttgaagatgctgaagaacaaacacagagttcagaggatggaagaaactgttataccatctacaatgatttgaaatgccatttgcaactgcagttgaccgtgggttattgaaaccacagaaagtgaaactggataacgaagggaaacactatcccagcctcaacaaggagcttgatttgggcacagaaacaggagaaagagacctgccttgcctcccttatccaaccggaagtattcttcttcttctgtcttcaatttattgcatgatcacatttattgcatgggtggcttcaggaaggattttagggattcctggaaataatcagtcttgaaatactcccctcttcttccttcatctaggatgcttcctcttctctcaatatattctcacttatgggtataaag

SEQ ID NO: 1111 - DNA, 877 bp, Homo sapiens
aataaaccaagtgcataggtgtgccagtggcccccaactcatagacatcattattcagattaacaaacgccaagaacaaaaataagtcacaatatttaccagaaattatgaagtcatctttaccccaatactttcactcatagggttaaggcatttaatacagactgaacacctgaacattagtatgtgcatggagaaaaaataattaaagaatgtgcacctaaatctaaccaatattttctctggagagtggcttttgagtagaaagttgcattctatgctacctatctgtaacatttatttgtttgcaatatttacattatgttaataattaaaaatatatatactaggtcccatgtccagtgagaatattcacatattcagtagttggggaacagtacactgtttctgttttacttatccccatgagtgattataattctaacagtcccaattggggaagttaaatgtccactgagtgttcagaattctcaggtaaaaaagccactgcaagtgaacacccaggacttacagagcttgatagtttctaattcaagacgtagacagaacaagaatgctgctctggatgtccaatttggagatttctaaaaggaaaaagacgcagattaaaaattatgctggagaataaaagtgattaaaaggtatcattcaaaagaaattgtttttccttgaatcacagacattgtatttatctaaggataaactaggttcaaagcctgtttctaattcagctgctccaggaaactaaaactgattccaaaaggaaacaaaaatcaaagtatgaggccaacttcatgtattcaatggaaaacaaactaaatgagagcctgtgtatttccatgagcctggggaaccc

SEQ ID NO: 1112 - DNA, 448 bp, Homo sapiens
cagtaattagcagaattcaagggtatcttgaattttccctctaagtttgattttcttgtggttttattaaacagatacagatggaggcagtagcatggtaacacctcaaaatcaagcatccagcagctgaatccgaaaaacacaaggaacaaggtggtctcaaaaatttggagtgaagccagaggtgaagtgagactttctgaagctgcaacaatacctctactctacttaaagcaatttctggtgtcatcaccatgagaaggacataccaccccagaataaggagaggcaaatggattagacttgaaatgaacccagagcctggattcaagcacagccaaacccagcttggatctcataattcccagtcctgtgcagaagaaccgtgagacctacaatatatttccataccttctttcaagaaataaatgctcaattttgtaagaca

SEQ ID NO: 1113 - DNA, 1655 bp, Homo sapiens
agagacccatcaggcggggagggcctgggcggtggcggcgcccccttggtggggccgcagagcggaggagcagcagctgccaccggccggaagcctgctggctcggccgagaacaatggccgcctgtcactgtggacagctgtctcccaggctaaggcaaggctgcgctcccagggaatgcgggcagggagccagggcggagggcagaggacgagagcgaggaggagagcgcgggcacccactgatgctggcggcctcgggtattcgctttctctctcttctcccaccttgttccttttccccggatgcacgcatgcactagtaatgccgaatttagaacaacagggaaaggaaaggaaatggcaaaggaagggaaaggaaatggccgacaggaaatggcaaggaagggaaaatccactgcaactctgctgcctgctggcctgtccagggacaactattcagctgggtgggacgttgctacccccttgtggcacccctgctgcagcctgcgattcttacgccctgtatttctggtctaacatcaaccaacactttggcgaaatataataaaatgaaattactaggagaatgaaagaaagtcacatgaaataaaagccctgctttttaatgattatatcctctgtgaaatggatctgcagccctctccatttctgggttcccctggccacaccatgcttatggctgtcccaggagcaggctgacagacaagcttccaccagcatctaaccatggggctcatggacaccgtagagcgtctccacccaacagaatcctgacttgggggcagctgaggcagggggcccgagcgttgaggggaccacgctgctgccccgagacctgctggcatgccacctggccaaccctgacttcgcctgcccgggcgcatgttaactgagttacaacactgagggcacttgaacctggctgcatgaccagagatcgatcacctgtgagatcctctgtgaaacgggataagcatctttaatttcctgggctgttctggaacttcagtcagacaggacacaggagggtgtctgcaccacccacccctgcctcgtgggctgactgggaactatatgacctgtggagggctgtgaccgccaccctccacctcactggggccgcaagccttctctgctccttgattctgctgccgttgtgagcgagggccccagcacccttagggaccccaatcaatgggcttcccacaatgtcgtcaccctttgttgcctgctaagcagccctggggccacctcagaagaaacagaactcacaggtcacaggggccttttcctcctcgtcatcgtcctcctcctcttcttcttcctccctgggcaacttcctgaattcggaaaggtctgtctgtagcagctgtgaaactgcttcgtgggccagagcagcagcaagtggtggcggggccttcctagggatgaggagggggaagtgaggggcagcccccagcaggagaccacacctagccccccttccccaactgtcagcccacatgctgaggggtcacggccagcagggcggcccctgtcctcagggagctgggacaggaaggtcacaggacagcaaaggcagacgcacaaccatctggtggggagctggaccatacttgagcctgcggctag

SEQ ID NO: 1114 - DNA, 571 bp, Homo sapiens
acaagtgtaggctacggtctacttacacctctccttgttatggttcatgatgtgcagaaaaacctttaggccgaacttaaaatatgtaaggaggcagctttaggctaaacttgatttagcaccctcaagatacccgagtctcttgcagatttgagtcaggatggcttcagcctaaggaagagcttgctgggctcctgccaatataaattaccctcagcaagacgacaccagggagaaatgctcccaccaggcacagaaatggttccgggggctagagattgagatggtccccagccactgtgcagttctaagcacttcagggcccacagaacaaaggggctaatagggggcccaggtgaccatgagagaatggagttgctgctgcccgagggaagagaggactgtctcccatgcccagaggccccgtgggagtggtcctagcatgcctgtccaggataaaagccaatagaggcccacacaagccccaggcaggagggacccccaagggagcagccgctgaggatggagagtccgagagctgcggggctgatggggagcccaggggaagcgt

SEQ ID NO: 1115 - DNA, 491 bp, Homo sapiens
gacacagccaacacagaaagaaagggaaaagattccagagacgttccagcataaggccatgcagggccggctggagctcgtgggcaggggctgccgacctctgagctgggtgtgctgggagccagggatcactgggtgccggccacagaggaaggtccctgaggacacagtaccgaagtctgatcccagaggaggaaggaaggtgggccggggagaaggtctgagtgcagggatggtccaggaggaggactggaagctgcaggatggctgcagggggccgtggaccctcctggcctgaagctcactccttccccgcctcctacaggggcaggggagccagggctgcgagttctgtctgtggactctcaatggctttcactccttccctaggtaactatggctaagagacagaataatttgaaaatacgttctttttcctctttagctggatgtcccacagagaaaatggaataaatgtcatttggactgag

SEQ ID NO: 1116 - DNA, 1594 bp, Homo sapiens
ggcacatagtctggcacgcgagggccccggcggggctgttagaggctcgtggtcatcctgaccatgtggtccagggcgccccggtcctctgggccccgcatggagcgcggcgtcagcgcggacagctcgcagtccctgagcctctgcaggcagttcttggagccctcgggcttttgcggcctctcggggagcggcggcagctcaagctggtactttttccccaacagctcccggcaggggcgctccaggagcctctgcatgaggcggacgtataagtggccactcctctggcgacatcccacggcgggggccctcgcgtggacacccgcccctgctagctcagggctccgatgcgatccgttcgaccctgcatggcggctttcaacccgaacgcgtccctccttcaagatcaagaccctgaacgtagttcaacaagtagttggtgatgatagcgtgccctgactgggccaggatagcctctttagtaaaacagccacgaaagtcatgaaacagatgctcagctcctttcttcattttcactttaattcggtgatgcctctgtgtctgtctgacgacatctctcctggggtctgtgattctgctgatggtcttcagtgcctactgagaagggttcctggacatcatcaggtatgaaaacctcaaagctctcggtcctcaacgtgagaaccctgggccagcggcatcagcctcaccaggaaacctgttcttctgctcattcttgggccccaccccaggcctattcaaagaaagactccaggggcagggcctggcagcctgtgtttccaccagatctgtgttaaagctcaaatgaaccagcccacgtgatgctgaccaggaagcacaaggctgagagccagtgtccaaggcaacggtgcccatggggccagaggcagctcctgcctgtgcagctgtatttagggctgcgttcccctccctgtcctgccagttgacgtcagtgtggggttactcagctaaggccaccacggtatatccacaaagccgtggtagcaggcgacattaaggctggtccagccattgtggtcagtctcctgcgccttctcaacgctcacccctcgccgcaccagcgtccgcagcagccccatgcctcctggacgccctcctccgggacgctctccaagccctcgacgccgtgctcctcctcgtcctggaaagggtacagagtcgtcccaggctatgctgcaggtgtggggccctggaactctttgtagtcagcgcggtcctcctcgacctgtgcgcctaggagtggggacggcggtggcggggtcatgcagcgctcccagccaccctgcggccgggtcccagccagcagcaccatgccagcggccggaggcgtgggctgggggccggggcaccgtcccggaaaaccgggcgcgccccaaggtccctgcttctcgcttccgcgtccccagagaagccgtagctcccgcccccagcccggcagaaacctcctttctttacattattaagtttgttttcattttaattttcttaggacattgataaaatcactttcggatttttgagattaaaaattaaataattttcatcttta

SEQ ID NO: 1117 - DNA, 2680 bp, Homo sapiens
agccaccctcgcccccgccaaaacaaacagacaaaaaactgtcattctcatatgaccacggactctgcgccccggccgcaggcggaggacagggaggagcgcacacgagaaagctcccacgcgcccgcgcctcgcctccgacgggaaggcgcctcttccgaccgtcctggatgcaaattaaatacttccctccgcagaagacttatctcggggtagggccgcagccggatttccaaatcgcgggtttgattttcgctgcgtcctctccgcgacgcgcgcagggagcgcgcccggccacctgcagcctctggctgcggccatctttccgcctggggccacctggcctgcgccctttgtgcccggcccgctccgtgactgttcttcttgccgctacttacagaactcagccgccttagcgtcttagagaagaggacggcatgcatgcggaccccgtccaccacacctggagagcagggagcccttagtccctggacacttaccagggccgccacccctggtccacgcacgtgatgacatctcaccaggggcagcacaccgcccgagtccgcgacactgataacacctcctgcgggcaggagggcgccacagccacccctggtcccctagattgtgtgaggctagcatttctgcccgcctcttggcgtggacagcacgctggaccgagatggaaccacagctttctcttcccaatccctggcctcaccgttttgtttcatacctcaccgtttgtttcaaacctcgtggtgttgaaatgattaaatgagattaaggggtgtgtggtagtgttgggcaaaccacaagaaaacggtctgggtggggtctggccctaaaatcttcctcccccacctcccaggcttccttgccttgctgcttcctctcagcctttaaacaggttggcctctccaagtcctaaaaacaaaattatcaagccaacctcctcctgaagtgctccctccaactagcttccaagtgtttcatgcggacctcaaacaatggtcttccctggctgcctctgcttcctcatttctcaacacttggcattctggcttctcctccccaactctaacccttcaccttgctcaggcaagagcaactcatgactttcattttgccaaaccttgcaggcattcctcaggccttatctctctggttctttctgctacatttgacaccttgggatgactctcaccttctggaatctctctactaccttggtttcagaagagtgaaccctctggattatcacatgaagctacttcctgtgagcagcccagggatggccagtcacttgtgacctactttcagagctggcagttctgacttctagaacaaactcggaacaagcccatctacagctggttgactgagtttcctttgggctcctggcaccagaaagaattgctcactggaaggatcataggtggcactcatgtctcactgccccactcaggcaacatcatgcacgcggatgatcaacagtcagttcctggtcaacataagtaaacaagcctgtttaagataaattcccccacactcccttgtacctactccttgccctctgccccagggttatagaacagctgctttctgctattctccccccaggctctgcagaaccttctgacctttcagaaggtttgcatcctttccctatagtttttccaccgctctgaccagtcccccacaatatatagccttgtatgcaaagccaggcctgtccatgcagggtgaccatccaaggtagacagtggcaaaatctggtggaggcatcagagatagtgccatcagtttgctggaacaagcatatcaaggagcctggcagatctacacttcaccagacggtgcctgtagccaacagggcaggcccttgctccagggaaacactcagaaatcaaaactccttgctctgctgccagggaactctccaggagatcctcagtgtcatcagaagctgaaaaaaacagtgctgagaaacgtggcctgccgtctttccagctaagggagatggcccattcgaccctgggttgtcctctgcaaacgcgctgctgcaggttgcatggcaccatctcctgattgcaatttgctttcctgagggagtgaactgactgaaattggatggtaataagttgctaggttattttccactttttagtttatgaggcttattcattttgctttaacattaaccactgccttccttttaaggagctggtgaggcagcgcatggcaacaggttcagggtgaggagtggcaccacctcctttcagtgaggatttgggaagggtgaaaagcaccctaatcttctcagccgcatgtgaacaaaccacctgtcaaggtgggtccttcctatagggaggttgatgtcagcccttcagggaggtctcagttttcttcctccacttcctaatcccttcattataattccttccacaacagaataagtttcttgagcaatgcagcaatatccagcaattttagatagacatttaccttttgacctagaaatctcacttctacgaatccatcctaaagacacactttcagctggatgtggtcgctcatgcctgcgatcctaacactctgggaggctaaagtggaagaatctcttgggctcaggagctcaagaccagcctgggcaacataggaagaccctatctct

SEQ ID NO: 1118 - DNA, 432 bp, Homo sapiens
caaaaagccgagggggaggagcggcgcggccgtgagcgagggcagccaagtttggctacagcacgcgcggcttcgctcctgcctctggggaggagagaggggacagtcccctcccgagctaggctcggaccttggcccccagagccgccgcagacctccaggggtgacttcgtcgctccctagtctggactcgctaggtcccgggtgcaccggagtcgcgcagcgaacgcgccatgcaggagggcgacatcggcctggaggggctgccccccagggaagtccccacagtcgggcactgtgccgagtggtcggagatcacctcctcggctcctggctcatcactgggaaagatgggagcacccagggactgcagcagctgtggtccccaggtcctcggatacgtcatcctgcagccccacaagggacccagaa

SEQ ID NO: 1119 - DNA, 3662 bp, Homo sapiens
gcggcgttttgcccccgccgccacggctttttgccgctgtcgccgccgctttttgcccccgccgccgcggctttttgctgccgcgactttttgccccggtcgccgccgctttttgtcaccgcgactttttgcccccgccaccgaggatttttgtccccgccgccacggctctgagggcaggagcggcagactcggctgccagctctactggcgtcctggcaagggcagcgccgaggggtgctcctggtccagctctcctggctcagggattctttgcctaggcgccggcgccccgggctccttgcctaggcccctgtggcctgcatagagtggcgctgcctgtggaggcggtgggagagaagaaggagggcggtggtgggggtgatgcggcggccacggagggtggcacaggggctgcggccagccgggcgctgcagcagtgcgggcagctccagaagctcatcgtcatcttcattggcagcctgtgcgggctgtgcaccaagtgcgctgtgtctaacgacctcacccagcaggagatacagaccctggagctaggtgatgatattctgatctatgagatgcaagaagatgtgatgtgtgggacatccatgaaaactgattaatgagacctgacacaaattagagatcaagcccactacgaccaccaccatttttctcttctatcctatttttttgtgacctctagcatgaccatgatgccaagatctctagcagccacatagtgacctgaggtaaatctgagtatgaaaatcatgtgccaggatggtgtagaaagagggttttggatcctattgacaatggaaagttggtcttcctacctctgaacctctttatgtaagagaagtaacctgagttttaaaagccattattatttccattttctctgctgatgcagacaaacacaagtcctaattttatagagacctaatacgttctggacctcagaaagagattcctggaggaaatgttgttttcaaccactaactctgctaatttcaggccaagtgaggcattatatagacagtctgaccactgccacagttgcatacgttctaaatttgaaataaatcccttactctgtatcacttatagtggatctgcttctctgataaaaccctcactaagacaattatcatccactgtttgtttttcctgtggtaagtatatcattgctgtataaaaataaccttttaattattaactcagttggcccagtttagcatcttttccatcttccattctcaatttgataattaccatctttcataataattatccttcaggtttcacaatacatgtatgttgaatgttaaggctattcttcattgatatttacactttgactccatggtgagagaagctgcagtatctgagaaataaataatttgtatgtgggaggtgtgattttacagctagattatagctcagtttctagttctttcttttagagagatttctcttggtcatctttatagaggtatgaagatatttagttttactgttattatattaacattttaaaaagcagctttctacaaggtatggcatcaggtggaattattcttgctgtgctctcaaataatctccatgctaagtttttgggcctcactgcagcccctgaacacgtatgtctctctgtacctcctctgtatgatgtagtgaattttttggacctttgaatcacacacaggctttcttggctgttttataccaaaggactttcactaaattcctaagaaaaatttagcacagccgatgctgttttccaatgccaaccttggagtttgcaatttgcccagacaaaaataccatagctgatggtgatgatgatgtcaatatttttttaaaatacaatttaaaaaatggttcaacataaattatctcatttagtcccctgaacaaccttgtgatgtgattttgaacaggaatatcaagacctcaggatctggcatcaaattctggggtttgaatattatttctatcacaaactatttatattactgcttatatgtaagtgacaacctttctattccttattttttccacttgtaaaatcagaaaaatgacaatgatgagagcaccaaacttatgagcttgcgaagattaaatgtgtgtatgggtttttatcagtttgagagacattatatttccatttgttgtcattctgtcccttccatcagggtaggacctttcttcagtgcattactttgtcccctgaacctagaatggtacctggaatatcattggtgcccaataagtacttgctgaataaatgactgaataaataaatgtaatctgtcaatattttcatctgaagatatgatatctgttttttaccttattttttcaatcatccgaaaggtagtatgcacatttgaaaggtagtcattgttattttcttacaccagtacttgcacttttacaatatgtagcaataatcataagcaaagtatcatgacagagtgagaataaacttaaatctgtaattgcaatttttcttcaccgtggcctccattgtttgtcatgtgtcttggctacgtcaggatggaaagcattgcttttttctatttacaggaccagaattaaatccatgtttcttggctgaccatttggttagtttttgtttgttcatttgttttttcatgaaatgttcatggtggttgggctggaataggtatagcattttatttatttatactcagctgaaactaagagaaatatttcagaccaagaagtggggacaagagcaatacttgtgtaataatacgatgtaccattttacattatttggaagtgctgatgcctgcatctatagcatcagtcaagaaagagaggtaatgaaagagatttcaaatgaatatcagataggctttagtattacataggataagacagacaggattggtcagggtatgctggaaaagattttttatcttattttattggctttatttaaatttttttttttttcccagctggaaatctatttatttatttttcttcagtgttacaatgaaacaacattgctttatttaaattttataaaaattcaaaccatacagtactttataataaaattgactgcctttggctactctatctctatttccagtgcaactgtggaagtggcactgacagatatggttttagctacttagaaatttttctagacacacacacacacacacacacacacacacacaatttatatgcaaaatgctcatatgcatgtcatattttttctttattcagcaagttatagtggatattcttttatagcatacgtagcaatggacttctctttttaaagactgcctagaattctgtagttataatacagtcattcatgtaactaattctctaaaaacaagccagatgatatttactaagaacttactatgggtcaggcacagctctaatagtctaatctcatctaatctcaatacgttcatgagttaggaatggttgttattcccatatgttcccaatgaggaaactgaagcagagagtttaaataatgtgccctaatttacagaattattaaactggtactggaattatgcaaagataatcaggcatcagagtttgtgatgtcaactgttatgtgatactgcaataaacgttgtataaacctctgtaaa

SEQ ID NO: 1120 - DNA, 571 bp, Homo sapiens
gtgcttacaatgtaacttttggtgggggggcctttggacatgtggtaccactcaagctccagaggggttagagactaagggtagtcacatgggtgaacagaatgtccgaatggccaactcccagtaaaaactctggacaacaaagcttggaaggagaggaaaaggcccaacacctgcctgtcagggctcctggatcacgccctgctgcctgctgacctatattggactcgagcccttcttctggcatgctcacctgttaacccacctatcagcccacacctctgactgctggctgctccccattgagcctgaaatactgtgctatctgcctgtacccttttgcataagctggggttgggttatctcagatttctatttgggtcaagattgccacatacctcacctcttctgttctggtcctcatcctgtgttcctggacaaaaataacatttgagtagaaagcttttctacttgttgacatagttgaacagattttgctttattgagatgaaatggagcctaaatttatctggaaatgtgtggaatcagtagagagaagtaaacacaactc

SEQ ID NO: 1121 - DNA, 399 bp, Homo sapiens
cagtgagccgagatcgcgccactgcactccagcctgggcggcagagagagactttgtctcaaaaaaaaaaaaaaagaaaaaaacagtttaccattctatcagaaaatgttgaccaccctcatatttttggtaaactgcagtaatttttccttaatactttttgcaagcttttgcatgcataagctccagtatcacacttaattttgcttgcttgctctctgaagggagttcggatgaccattacagcaaagtggattttgcgttcaaagtgataagccaaatatcaggattttcccagtttctccgtaggactgatgtttagaggaaagccttccctgactcaaatatgtttctccatataaaaaggggaaagtaaaatgggttttctttctggtggta

SEQ ID NO: 1122 - DNA, 4443 bp, Homo sapiens
actttgaattgctaaaagtggcatttttcctatgtgcagtcactcctctcatttctaaaatagggacgtggccaggcacggtggctcatgcctgtaatcccagcactttgggaggccgaggcaggcggctcacgaggtcaggagatcgagactatcctggctaacacggtaaaaccctgtctctactaaaagtacaaaaaattagctgggcgtggtggtgggcacctgtagtcccagctactcgggaggctgaggcaggagaaaggcatgaatccaagaggcagagcttgcagtgagctgagatcacgccattgcactccagcctgggcaacagtgttaagactctgtctcaaatataaataaataaataaataaataaataaataaataaaaataaagcgagatgttgccctcaaacttcacctggccccggtcctggtttgctaatggctgtgggtgggggttgctgtgggtgatgactgactggatacaaaatcctaagtggcttcatgaaattttgcctaggactggactgtctttcttttaactgtgaaatgatggttctccctaacgtctcctcaaaggatacaagaaagttgttgttgctagtagaccgaggggtgggaatcactgaaatggaaaatctagatgacagtgctggggaagagaaaactagaacagctcagttgaagacaacctttactgcatgttgacgctgatttaggcaatagcttcctaaaaatcatgtataaagttagttagttagacatgaaatctcttccccaatgttgatacctgcccacaaaatattctcaccttcagagtataagaatcattcttaaagccaaatattcagttcaaggcacatacgtcatctgcagttgtaaatttgcatttaatatttcacaattcctgtaagagaggctagtcaggagggaaaccctcaagtttaaatccccacacttacttacttactgctcatccgtcactttcgctaagtgagattaataattcagtagctggtccagaacgcacagcttgggaacgcagaggcccaggcctcatgtaatttcccactcccgtaactgaacgtgctgacccatgttgatgtctgccttcatccaggtggcaaatcagacatgctacgctgcccccttcaaacgagttcctcgtgttaggggcaaaggtcacagccaaactctgccactgacagccagtgccttggcctggatcctctctgtggatgcaggcctacccctcctcagtccagcctcatctactagaccagcttggccattcacttttcagatgtctgtgagcagaggactgcagactgaactctcactcaagttcttccatttgccaagcccgaggccttttccggctaaccagccctctctgcgctgtcttgtctcctgactcccaccctcaccattcacagaccatcacgacacagaggatgccatgttcttttagtaattcaccagctccatgcagggacatcacagggctgccctccatgagcagaggaggagggctgcctggcagagcgtttcacactccaggttagccagaaagagcatcttcatttttgtttccacacaacacttctctgtgagcctgttggccaacaaagtggcggccgattgttggaggagccagccaaccatcttgtctaacttcagattcttcagggctagaatatgttcaccccagaggcttagatgaagcacatttgcggctactcgggcagatggtctctgcaacaggaagggaagctgtagctagaacatctgttaacacagtctcaacccaaagcctgctttgttagtgagggtcttcccttctctggtcccaacccaattcttcctctaccctatctcctactgatgcccttcactcaggtgacaaatactgcctgtcccctgcccgtgctccaagcttttccatgtgtacacctctgcatggggcagcatgcattgttgaaatagcctttccccctgggtggaaagcctagtgcctcttgtgcacagctatctggtcccttgaaccaggtaagtagtctcctctatcatttcataactggttgcagctgttgttctaaccttcactgcgcaccaagatagcaggccacgtacagagagcagttaacggagtggcagaacagtgctggggtgcaggtatggctcagctctttgcactaagcctgcccctgagccagctgccactccaattatggcttcggataggtctgcctttgcattcctttatattaatttcacaatgtccagatctgctctcaggagatgttttccatctctctctgatcagttctcagctgcttccatgagctacatctccattaaacatttctcaaaaatgcctccttttctctctctgaatagccttttttttttttttttttttttgagacaaagacttgcactgtcacctaggccagagtgcagtggcgcgatcttggctcactgcaacctctgcctccagggttcaaacgattctcctgcttcagcctcccgagtacctggaattacaggcgtgtgccacgacactcagctaatttttgtatttttagtacagacggggttttaccatgttggccaggctggactggaactcctggtcccaagtgatccacccgcctcagcctcccaaagtgctgtgattataggtgtaagccaccgtgtctggcctctgaacaactttttcagcaactaaaaaagccacaggagttgaactgctaggattctgactatgctgtggtggctagtgctcctactcctacctacattaaaatctgttttttgttctcttgtaactagcctttaccttcctaacacagaggatctgtcactgtggctctggcccaaacctgaccttcactctggaacgagaacagaggtttctacccacaccgtcccctcgaagccggggacagcctcaccttgctggcctctcgctggagcagtgccctcaccaactgtctcacgtctggaggcactgactcgggcagtgcaggtagctgagcctcttggtagctgcggctttcaaggtgggccttgccctggccgtagaagggattgacaagcccgaagatttcataggcgatggctcccactgcccaggcatcagccttgctgtagtcaatcactgccctggggccaggacgggccgtggacacctgctcagaagcagtgggtgagacatcacgctgcccgcccatctaaccttttcatgtcctgcacatcacctgatccatgggctaatctgaactctgtcccaaggaacccagagcttgagtgagctgtggctcagacccagaaggggtctgcttagaccacctggtttatgtgacaggacttgcattctcctggaacatgagggaacgccggaggaaagcaaagtggcagggaaggaacttgtgccaaattatgggtcagaaaagatggaggtgttgggttatcacaaggcatcgagtctcctgcattcagtggacatgtgggggaagggctgccgatggcgcatgacacactcgggactcacctctggggccatcagacagccgtttccgccccgatccacgtaccagctgctgaagggcaactgcaggccgatgctctcatcagccaggcagcagccaaaatctgcgatcaccagccaggggcagccgtctgggaaggagcaagcaaagtgaccatttctcctcccctccttccctctgagaggccctcctatgtccctactaaagccaccagcaagacatagctgacaggggctaatggctcagtgttggcccaggaggtcagcaaggcctgagagctgatcagaagggcctgctgtgcgaacacggaaatgcctccagtctctgtgcgcgatgccctgttgaaccagatggtccacgccttccagcagctgcagcagcatcatggcggcgaggcgggggctgggtgtgttcacacaaagtctgcagtggagaggaagccacgatacttcactggggccatgaggagccagaggtgagcaggccaaagggaagcaggaacaggagatgcgaggaaagaacagcatgtggacagtggaaccacgttcctacaagttcaagaatcagtaactgatggaaattcccgtggctcactcctgtaatcccagcaatttgggaggctgaggcaggcaattgcttgagcccaggagttcgaggccagcccgggcaacatggagaaactctgtctctacaaaaactacaaaaattagctgggcatggtggcatgtgcctgcagacccagctacttgggaggctgaggtgggaggatcacttgagcccagggaggttgaggctgcagtgagccaagatcacgccactgctctccagcctgggcaacagagtaagaccctgtctcagaaaaataaaagaaaatttgagtttgc

SEQ ID NO: 1123 - DNA, 8829 bp, Homo sapiens
gagaagctgcgaagatggcggagtaaggcgtgccgctgcaaactggcctctgggccgggggcgagcagcccccgggaggccgagtgcatctgttggaccgtgcgaggagaagaaaaaaaatatcggccagaggagaggaactaaccgaacattcttcctccctaccttatagaggggagtggtcatctacactaaagcaaagtgttaggcgcgtccgtgcgaagagaccaccaaacaggctttgtgttccttatcacaggaagaaaattttccttgacctttaggtgcttttatattcatctcaaaaacaaaattctgaactcaggacttggcaagtgtctctatgttgtctcctagagtgggtagtcctgcttcttttacccagttactttcccgtttttgaaatgtggctatcacttctctacacattacctccatgatttggaatggaaaaggccacttttctttttgttctgcctctcaaattcaacacagaggagctcctaggattccagttatcctgctaacatctccaggaagaaagaagcaactcacatgggtcttttgctgtttgcttaattataaagacatcattttgcaagcagaaggctgagtttcatttgaaacaggtgcttaggtggtggtatttgtgaatacttttcattccaagcaagaagactaaagaagtagcaagtatgaatgacttcagggtttaaaaaaaatgtcttccagtttcagccactaccatgataagcacagttgagactgcagcagtaaattccaaatatgtgtttctaatttgacgtgaaagatactaaaaatttatatttgtatatttaaatcctggctcatcctgtgacatagatttactgaataggaacaaaggcccaattttaaacaaaaacctaggccgggtgtggtggctcacacctgtaatcccaacactttgggaggccaaggcaggcaaatcacctgaggttgggagtttgagaccagcctgaccaacatggagaaaccccatctctactaaaaatagaaaattagccaggtgtggtggtagatacgtgtaatcccagctactcgtgaggctgaggcaggagaattgcttgaatccgggaggcggaggttgcagtgaactgagattgcaccactgcactccagcctgggcgacagagtgagactccgtctcagaaaaataaaaaacaactttggacatagaggagttgggggcagaggggggaggatgagagaattttccatgtaactccttttccttaagaaaaagaagcaaaaatccctcatgcagtgccatctgactttatggtgtttcacattatatagttactttttttaataaacgcataagattaactcttcctgcaacccaaggtggatacttggatgtttgatttttatttatttatttatttattttttgaggcagtctctctctgttgcccaggctggagtgatgcgtgatttctgctcactgcagtctctcccacccgggttcaagcgattctcctgcctcagcctcccaagtagctaggattacaggcgcgcaccaccacgctcagcctgatttctaggctgaaaaggctgggactcaggtactttccccagttgggactgaactttctcatcagagaatgggcctcagaagcaatgttcccaaacttgtggttgggtcatcgtggaaaagaaacctcaaataagaaaaataattacaataagaaatggattttcttttttcccacaacagttatacattataaagaacagactgtcgtagaaaactgtctttgcttccaaatcagcagaggaccattgtatgtattgtcaggtctttatataagagtgaaacctttatttatgcttcttgtgagtagagaataaattttaaaactaattagatgaaattaagaacagagtattggaacatctctgtgttttccggaatgtttactcaggtccatgaatgctgtgatgctgggaacttagggaagattcaccaaaatttgagagtgataaaaatggcctaaaatgggaaatggtgagcactcttattattagtgagattggtcaatcagcccatttgaaatgggtaaaaaatactttcagtaaaataattacatattatatataaaatatttctttttttgagggcagctactgagtgataaaagcatagtagaaatcactttggttaaaagtaactcaaatttttctcttaagtaatctaccaacttcctgatgtttttctttaatattttggaactgttcaagacagaatggagcctacatatatggtgttccactagtatgttgaaaatgtcatatcatggagaatggagacaccttccaggtgtctgttaaacccatcttctctgtgtacttctggcatcttttttggtaggatcatttggcagggggtagagtacctgtacttttggcaccattgaaaccagctctggcccacttgtttgaatagctatcagactcagcgtctctatatgctttatatacagttgagagaaccagtgtttaatgctcttgaaattgtatcttccatgcttcagaccagatgcatttaacaaaatggatatattccagctgtagttgcccagtgtttacttaacacatctacatttttttcttgtctattttggtccccttgataggaaaagctataattttaggcaggactatacgtcgatttgtagccatgcttccttcctttcccttgctcatccatgttagctggcagtttttcttttgaaaagttaaaaccgggatatgtgcaatagaaatatatatatatatatgtatattttaatacttgtggacaaatgttacaagttgtttaagaacaacaaaatcaccaatgtcttccattttgagatgtgtatagttttgtaagcattagtgcttggtagcatattgtagtgccatgttaggggttagtgcatgagtctagtgattttaaacttcaggatgaattattgataataacaaatagtgtaaaaagagtggaaaatctaaaccttttctttttccataatgtctaaatctgttatattcttcctggggaaaagagattaaggcccaaaagactcatttatgaatagaaatgtggggtcaaaatctgagatactatatttgaggacatttcagctttccataaggtatctggaaaccagctgtctttgtgtcttatgaaacctcaagtcaaaatgagaccgcatttaattattctgctttgctctttttttggggtgggggggagatagagtttcactctgtcacccaggctggagtgcagtggcacaatctttgctcactgtaacctctgcctcttgggttcaagtgattctcgtgccccagcctcccgagtagctgggactacaggcacgtgccaccacgcccagctaatttttatatttttagtagagacggggttttgctgtgttggccaggctggtctcaaactcctgacctcaagtaatccacctggcctgctcttttcatgtcttaacatggcatgtcttttagtttcattattttcctactccttgtatgtcaagaaattacattttgcatgtcttatggagatgctgttaattgcttcagtgagtgcttttctaatctgcagaccatttacatttcctgtttgcagcatgctgtgtgcaaacactcagtaatttggagtattcaattatttgttagggctcttcctatttccaaatgtgctgaattgtctattgatgggattttcagatcttttcatgagaactggaaatgtagctgggtggcacctacctaggttgctacgtagtgagtagactttctcttgggtatagtaagcctcagacagctttcacttttatctactttacttgtggaaataaaacagtcattttgttctgaaagaataagatagctttctgtagagaaggaattcctacctctaaaagctgccttgagaactcagaactggcagttttctgaggtgatttttaaatttcagtattagggagagtccagcatttgctgacacagattctacataactaatgtatgatagcaaatgcaaaactattataatgtggtgtatcttgcgcatacacaggttagaacaagtagactctggcagcagatctccagagacccaagtttaggttctcatagtgtatttgaagtagttatactcctggcttaagtagtttagtgcctgggagaatccattactgaaaagcatttaacttaaaaaaaaaaaaaaaaaaaaaaaaaaaaactgaaaaggtagtgaatacagaatagcacaatatataggaaaggatatttcctgttgaaaaaaaaagccataaaattaatagtaattttcaagaggtagaattttagtagcaataagtttgtgcatgtatagtaatttgcattagcaaggttgtacaatagaataagtgatactactggagtttgtggggctctgcaaccaagagttgcacaagggccaggtgcggtggcttacacctataatcccagcactttgggaggccaaggtgggcggatcacaaggtcaagagatcaggaccatcctggccaacatggtgaaatgccatctctactaaaaatacaaaacttagctgggcatggtggcacatgcctgtaatcccagctactcaggaggctgaggcagtagaatcacttaaacctgagaggcggaggttgcagtgagctgagatcacaccactgtactccagcctggtgacagtaagactccacctcaaacaaacaaaaaatgcacaaaaggaaaaaatgttctggataaagagcatatgaaaggtactttcttttagaacagtatgaatgtatatgaatttatctttatgtgagaaataatcttttttgtaagttaaaggttaaagaccctgcttgtttcctaaatcagagggttagagctgttgaaattaaacctttatagtgcttaacctggaaacaaatgtactacagccccactgaagccgctctatgggttttttgcttacgatgttttagcaacaggcatttattttgtagaatggtatactttctgctttgtctcctcatctttctccactggtttcctgggtacattttttttaaagggagagaagtttgtgagtttaatgttttaaaaaaactcccaagaacatggataagccggatttctctcatgcttatgattagggagttaggatttaaagatgcaaagcagaaggactgaaaggaatagccagtgaatatgtttcagtgggtgaggtgtgaaaccttgtctaatatagatgtgtcctatggcctgtgactgcttattctttatcaatgagaactcagcaaactagtttctttcttgatctgaggaaccacacagctcacatcagaatataatagtggaactagggtgacttcactccctttcacctgatgtctatcttggccttttagcaccttgactatccctgaaaagactgggtctttgttttcccagggaaaaaacgaagtgatgtagatctaagaaatagtgcctctttaatatttaattcttacatgacaactaacacacagggaaaaggctatgttaagttgattatagctcctcttaaaatgtcctatgctgtcagttggtcttagagacatgggaataaccaagcaatattcagacatctgcactatctggggacagcgctacatagtacaatgatgtcagcagttcagttacttggaacaattaaagattacccttaacagccatgttaatacatctaaatgctaaaatatactacgagtttttcatagtcttgaaagtatacagttaattacttttcaaagttactgtggtctcatgtttactcttcttgtatctgtgatatgcaaaaagatgaagactcttggcctccaggagtttacattctcatggtgctgttggttcaagcagattgctttagtttattaatgaacattgcttggctattaattatatcctatttggaaggatcccttggtgaacagttttaaaaagcagagggctgtgctaaatttcagggtattgatagcttgagtttacattgtattagccctgctcgttatcatttttttccccagggagctatgcaggtaatgctcattagcatgaatcagaaaagaaaccattctgcctaagagcatcttaaccatccccctaaaccacctatgctctcctgttatagttgtcagtaaatcacgaagaaaattaacagctccttaagactctacatccctcaattctctttcttttcccagagtttgtacatcattctctactcagatggaccaggatttgcatataagccttttaaaactgactagtggtcctaattttaacatttttgtgtatgactcctatcccttttctgaagcagcattgtgatagatgtggagcttctacctgcatttctaagcaattattaacccaacttttgagttgaaacttgcatggatccttgttatgtcccgtaattcctctgaatcaaggaatttattttgcatgcttattaaactcaaactgggtctgattgaaagtgcaagcaatagtgacaggaccttaactctggttttagagtacgaacattctaatgcatgactcaaaatgtccagtgttgtggttactagttattttatatatgcatttgttaataatgaagcaatagagactaagaccaatagcttgaatatattcagattattttcatgttttaataaaggatttttcttacttccattgaaaatgggaagtagaagataaacaggggcaaccacaagacattcaaactgtcaggactagggcgtagcagtgcccaccctctaaccacttgcctggttccattagtccccaagcatgtttgaaaacaaaagacacaaactaagcatgctgaataaaactagctgctatggctgtaataatcagaaaggtgcagagtttcagaaagagtaggaaagtagggaatgccagtatggagtatgtaaaataactagatatggatatggggtttgtttatgatatgctttatgtagacaaagtttgaggtcttttaaaactgggatttgagttgaaaagagtcaggatgcacatatttccactatttcaggattttcagatgactaggcacatgttgtggatgatactggtaccaactaccaatgaccaactataaagtacccctgcaataagggagacttcctttttgtagaatagtcctgaaaatactgacagatctgtggttagtttgttattttattgcataaaaaacagtttaaacaaattttatagccaaagttttatccttgatgggtttggccagactgcaatttcttgactaaagcttttaatgccaggttaaacaggagaaactttttccactagaagaaaatccttgctatctattttttccaatagaagaaaatccttgctatttattttatttgatgaataaacaaatttattgcagtagcttaaaaaaattttttttttaaacagtctcactctgtcgcccaggctggagtgaagcaatgtgatctcagctcactgcaacctccacctcccgagtagctgggattacagacatgcaccaccaccctcagctaatttttgtatttttagtagagacggggtttcgccatgttggccaggctggtctttaactcctggccttacgtgatccgcccccccttagccttccaaagtgctgggattacaggtgtgagccactgcacctggcctgtagtagcttaaaattttccttgagaaaattcctgactttaaaaataacccttatataagtacaagtgattgtgacaaatgacgtaaaaatggcattcatgatgtctgaaacaagcctaaatagaattcaagattagactaaatgattttcacaaagcacattcaaggttttacattctatgattgaaaaaaattttttgaaaactttttatttcattctttcctgtaggattttgctacaaataactttgggaatgaataaagtggaatggtaactttccagtggttcagaattgaattagacttcttgtgactgtgatgtttggtttccattgaaatatatgaagtgagatgtcatatcctgaatatagtttgtcttccccaattacttgatagcatgtctgtcagccagtaaagattaagaacagagtttctctaaattcctccgattattccactaaggcacattaaaatacttaattttgggaaaccagacatcacagatttctccatgaagtcctaaatcttctttaaagtcagaataggtatcttagttactgacagtattcaggtttttttctcccttggtgatatgtcattccatcagtgaaaaaatattttctcccagggataagaaaggtattctggtaatacattatcatcaatccttaaacagtaacagtcttggcacttatcacaaaaccgacccatttcttataaccagaaagattatcttagactgtccttcacattatactttacctactgccttgtaagaataagagttgctcactgtgtttacttgctgtcctccatattctccattgcaccattggtgtataacgttaagagtttcattgaatattattttaagtattacaaaaggcagcttgcttcttaatctatgcatctttggggtttttgaagaaatttaattctttgatgtaaaaaggaactgttaaaaaagttggaagctctgcacctgtgtatatatatattttagcaataaagcagcatgggctgagaatgcactgaaa

SEQ ID NO: 1124 - DNA, 630 bp, Homo sapiens
tttttttttttttttttgtcagccgggttcaatgcgccatattgaagaggacgggtctaatagatcgctggagacacaatttaactgaaccccgcccgttgtggactgactttgatgctctgagtccctccctccttcacgccgctagcaggccctgatgtagattgcctttgtcttacttgggacgtttacctgagcgcttggtgctggtgtcgggaccgggagataggagtgtctcaggagagacctggccgaaaaccgcgagaaagaaaagtgaagcctagtgaaactgcctttgcagtgactcaagaaaaactcatcacctggagtccgtgtaagctcggcgacagccctagcagcgaggccaaaacagtttgggaagaaagaaaacctaaagtatttgccgttggtgattcaagggaatcaaacttgacgtatggagccaagaaagcccttggaaaaactggcctcatattttgtgtacacagtccctgtacagggtttctgacctgtgttcagtctttacagaagctgacgagagatttccttgtattttatggtggtatgattggccttagagcacttcagttttgagatctctgctgtatttgtatacaagtattttggaag

SEQ ID NO: 1125 - DNA, 2908 bp, Homo sapiens
gagctgtcagcaagctccaaaccgcggctgccgcccggagggaagcagacggggagtcggtggcggccgccgagtccgcatgcgcaggctgcaaaggcccttttgggccggtcccgccgcgctaggttggcgagtgggactatttgatcctttccaggttcgccagcgtggtgttacgagaggaaagcgcagccgcagcgtacgaatgggaaggccaaacacggtcccggggagtctgagggaagctgcagggcgcctggaattggggtctcgagtgagccggtaaaaaccgcctcccgctgagcgtcccggaacaaatactgtctgaactgagccgtaagcaagaaacggtcaggagaagctggggcgatctgatgattagaacatttcagggactaccagagagaagtgcgtaattgctctaaggcaggtaggtaattggcctggaaacttgggaacgccccgccccccaccccgactttcagcaaaccaccgtgcccaggaaaaagagcgattgtggaagaccctgtgaagaagagaccaggaaggcactgtggcttaagagagcaaggcgttcctgaatgcagccaacatcaactggtaaacaaaaaactgtgagaacggatcctgaatcttgcgcttaccaggggaaattcaggagagatatgaacctgagcaagatgaggttgaagttactcaatgcggcattaagcctgttcacggccacttcctccggcgtcaccaacacacacactgtacaccagcagtatttttacacggggtatgtgtgttaagtactatcaggtggataattattacttcacctgtatttgctgccttgataccattagagaaactcatgaattataaatagcatagtgaatttgtgattccctgaagatatactaaggtggacttttaaaaaggcttctattccaaagggaactaatatggaggaaatggtttcgagaaagaaaaaagaaaaaacggagtccttgattagttgtggggaaggcaacataatgtaatgtgaagaataaaggagtcagatccaggaaaccccataactattatgaaacatttctaggctgggcgcagtggctcacacctgtaatgctagcgctttgggaagccaagatgggaggattatttgaggccgggagtttgcgaccagcctgagcaacatagcaggatcctgtctctgcaaaaaaatttaaaactagccaggtgcggtggctcgtgcctgttgccctagctactcagggagactgaggcagaggattgcttcaacccaggagtttgaggttgcagtgagctaagatcatgtcactgcactccagactgagcaacagagtgacactttataaaaaaaaaaaaaaaaaaaactaggtttttgaacttgcttaatcaaagaatttgtttaaacttttaagatgcgttgtcagattatctttccctaaaggaataatttctattcctatcagctgtttatattcctgcctagtcaccatcactagatataattgattttcagtttttgccaatctgaggaacaaaaaatgacccttatatgtcaaatttacagtttattttcaaggattttgggattctgatcaaattttggtaccttcatataaaatttggcttttatatcacatcttgtcttctctgctttccaccctcttttatgttgttttttggcttctggccgcatgactataatctccgcttttgtattcacatcaccttctgtcatttttgaccttgcctccgtcttacaaggatccttgtaattaattatattgggcctgctgagataatccaggatattcttcctactcaagttcctcaatttaatcacatctgcaaaaactgccttttgctatagaacaatgacaggagattagaatgtaaacatatttgggggaccgttattcagcttaacacaatacgtcccccttcatcaggtggagcttattttccctccttccttgagtgtgggctggacttagtgactaacttccaaagaacagagtatggaaagggaggaggagagtaacttcatagtacagaaacctggaaacactgtcttggccaggtggtcaaagttaatatcatcaagtcatgttgatagcatatactcccaatatactgtgatgagaagggcaattcacctctgtggtattctcaaaacctataacccaatctagtctaaacatgaaaaaaaaaaaatcaaactaaaattgaaggacattctataaaacacctgatcagtattcctcaaaactatcaacgtcgtggggaacaaggaaagattgaaatactgtaacagaccagaggaaactaaggaaacttaattgatgactgaatgcagtgtgctgtgttgaactggatcctagagaaaatagacattagtggaaaaactactgaaatatgaatagtctcaagtttaatagtagtgtaccattattactttcttagttttgacaaatgtaccatggttatgcaagatgctaacaatacagaaaaataaggggtatttgggacctccctgtattatccttatgcccttacttgaaagttgtttcagcaatagaagtttatttaaaatattgtgaagggcctgagtatttttaaatcaactgcagtgactctcttttgtgtatttgtgtacagatgagtttttctgcatcgaattttatctcctttccttgcagaagaaagagaattagccctttacagagataacagttgcctaagccagctcttttctcctctttttgatgttcttctttttctctcagtttgaaaattgtaggttatttgagtttttaaaatgtctattgctacatacacattctagttatattctagtccaaacaatctagtaaaatatctaaaagaaaaa

SEQ ID NO: 1126 - DNA, 2790 bp, Homo sapiens
tgtttagtgctaaggttgatactaagcagaattaaagatgtgaaatttaataaataccctgttttaagagctttgctaaagatgtgtatggaatgttctgaatgaaacagacttagtaagacatgagtgttgaaaagttttctcagttaatttagcagcactcaggactgctttgtccatgcagatacggctgacttactggggacttttgtttctaacattagccaagcttactgtcaactctgaagagatgttggagttgtcctagaacacttaaacttggaagttaaattgtctttcaatgtgtttggcagagttataaaagtagacatgagccatattgatagcggcacggcatatgaagagcttcagaatacttatgacacttctttgacgttctgtgaaaggctatagataagtacctccaaacatcatgcctccagcctcactcttgcttaaggaaatactctgaaagtagattttctttcttttttgagacagtctctctgtctcccaggctggagtgcagtggcatgatcttggttcactgcagcctccacctcctgggttcaaccgattctccttcttcagcctcccgagtagctgggattacaggtgcccaccaccacgcctggctaatttttgttcttttagtagagacggggatttggttgtgccatgttggccaggctggtctcaaactcctgaccgcaagtgatccgcccacctcggcctcccaaagtgctgggattacgggcatgagttactgcgcccagccaaatatctgttcttttagctctttgatagttcctttgtagtgacaaattattttttaaaagcttataaattggtgtttctgtggaagatgttatttctcatcgaatgcgtattgatagtgttttaagtttagaccacaaagtatttgtcttccatgtgcctgatatttacatagtactctaagctgcactgttgagtactgtagcatctagcttatatggctatttaaatttatattaggctaaaaattcaccagtgcagccatatttcaagttttcagtggctgtgagtggccaatggctctgttgtattggacagtacagatataggacatatgcagaaattatcattggacaaccctgctgtagaatgtcaccagtgtttctggaatcactgttttcgtgcttgaagtattttgtgctccactttgaaatgctaggaaatcgtgtcttcccttcacattgtaaactcttggtgattattgtggtctttggaggtgaagcccttgggcagaattgggatgggagtggaaagtaaactgctttgctgtggactagaagtagaattgggatgaggtgttcccgttctcatgagtcccttccctgtctgcactgttccctttccttgtgaacctttatttcccaaaccccttcttcaccttttccacctccagcctgtgcagaggcagatagatactggggacctgttgtactttgttctgcatcttcactagtggaaataagagttctcttaggctcactgctcgggggtggcctgtaagatgttcttgagtctagtgctttctcttttaatttgggtgccttgtgtcattggatgtgtaatgtggtctcgagctaaatgtgcagacagcagcatctgagacatatccagagagcagaggcagcatttctttgaattcagcaaaaccataattattgtgttttcttttcagaactgtgttttacgcaaataatcttcggcaaagtcttactcttattgtagatactcattttaattctgtgtgttaacttgcaccacagttttgcataatttactatcctcctccagaaagctctacagtgttccattggtcaacgcttttgccagtaatgtcagaaataatgggttgggtgatcttactttctatatttaaacaaaattttgtcaattttcagttagttgcttgttttccctgaccactgggctatctcgtatttctggtcttcagtcatgttgttccttttgtgtggtgtaacctttagcatttacgtgccttggccacctctcgttgcttagaacagacccaatctccagaaggttttctgggtgttcttcttttccctcgggttcccctttgctgccccgagcaccattgtgtacctcttgccacagtgtgcttttgttactccatttcacagtaggttcctctatcagcatcttgcacagttgcctagcaacatagtttaatgtgttggaggcaagaagggaggaaattcacaccatgttcatcctactcagtgtgaactgagtctatagttgatatcctctttgtgtcactcaatgttgtcctgcctgagttcaggcttggttcttacgttgcggcagctcttttgcctttatttaggcaacagaccagaaatagaaacccttgaatttttttttttttattcctttattttccttgccagcaccttggttagatttcttaactacttttttcttgagtctttgtaaagtataattacactttactgtgcttacgatctaaagaatacttaatcagtgttattttttatttttatgttttatttttgtattgattaggtcttgccatgttgcccagactggtctcggactcctggactcaagcagtcctcccaccttggcctcccaaagtgctgggattacaggcatgggccaccacacttggcctcacttttatttcttaaagtcactgcccaataaacattccaagtttccactagtttttgtttttggacatttgttccatcc

SEQ ID NO: 1127 - DNA, 701 bp, Homo sapiens
ctggttcctgagtcaattccatccaggtaggaggaatcctatcagaaagtatgtgagtgcgtttgcagagtgcattcctgtggagcccccttatctctggctgcatctgcttctgcagggagaaagtatccctgctgtgagaggtctgggatctggagtacagaggatggtgaagccaaggcctgaagacctttcctgcaaggtcgcagaggaagaggcagaagaaggaccagaacccagctcccctgactccctatccagtgctcttctcatagattacattgcttcagcatccacctggctattgctccatccaggggttacaggagtcactgactgttttggttgcttcttggttggaggatgttgtgcctcaccgatgagagccggaagcaaaggtaccagttcttagaggaagcataggaatgtgtcccttcctgctcgggtctctcaactgaactcaacccttccttgattgattgacaagcatgttatctctcataatccctgcccggtaagggctgatgtccccattttacagatgaggatattggagctcagagaagtgaaatgattgctgaaggtcacacagcctggcttcaagcctctcgggctccaaaaggcatcttctgttctctccgtcaggaagcctcttttggatgattaactgagattaaaaatgaaaagacacatgaaagaaa

SEQ ID NO: 1128 - DNA, 594 bp, Homo sapiens
ataaagacatgatcatctggaaacatctgcaagaaaatctaccaaaatgaagacacactcacaaaatgaccttcctcctacatcccagctcttgtcatcttaaaggcattcactccatggaggccccaggaggcgaatggcttctctcatcttgggctgcagctttgctgatgacttctggctcctcatggaaaacagaagtgcagggcatgcttttccattaagctctttctgctaaagcagattcgaagttaagagaagcaggcactgctcattcttgtccaacattcatggacaaagaactctgggcttcagtcttgtcaaccctcgtgcagggctctgctcattagcaggaatcttcagatgactcatattcctgggcatttgatcttttgtgataagaagaaccagcctggctcactgactgagtgaacacttcagtggtctgtagtccctcagttgcactggacacagttgaggccctcaggagccacgcggggtcagcggtggtggcattgggcagagcagctcaccgagttccagaagctgcatgccacccattccgagtctgtgaccctccacagcctggcccac

SEQ ID NO: 1129 - DNA, 465 bp, Homo sapiens
ctaaagggttaagcattcttaacacactcaagtgttttttttttctgcatgagacaaacaaacaaaatccttaagagtgtttttcttgggttacaaagttatgttaaataaaaataaaaatggagggaaaacctttgcttctgagccaatggcccacaccagctcaagaaaacttataaagaccgattctggaaatgtcagaaatgaagcttgagctttatttccttgtaagcatgactcagcacatgcagacaatcatctattacctacgtaacctgctctgatcatcctaaaaggaaagatactgtaaaataaccaatgagaatcaagatgtatgaacttctttttttccgttttttaaaccttaactataacctttaggagatgagcttcttgccattttctattttggagtctctgttctggaatagtgtgttctcaataaaatattcatgtcaagtaaaa

SEQ ID NO: 1130 - DNA, 539 bp, Homo sapiens
acatctgggctgctagctgcatgaaggagctacccgctgtgggtctcctctttgctgacagctggacacttgacagaatgacctgcctgaactcgggacctgcagaatgatgggactgaagaagctgtaacacaaacagggctaaaacacgcactctcctccccctgctccccaccgccccacccacttgccacattggaggtgatgagaaggagagaagagctgtggcctttcagggagcatagtcccaggggctccctgagccagggctgtgaaaccctcttccgggcactgcagttcctggcatctccaaacttctgagtgccaccgcattccccgcgtccggatgcagaaattgccacaaccatctccagctttagcaatgaccatcctgatcagacagtggccatccacagtgaggcaagaccctctaccagcaaaatgaatgcaacatgctaaaggctcaggtcaatgcacagaaagaaatctctctcctgactttagtacaatggcacgattggtggccacagtccaaggat

SEQ ID NO: 1131 - DNA, 682 bp, Homo sapiens
ggcgcctgtgtcttcttacacttctcccttttcctcccgccttgcttccctcctggcttcgctccggtctcccccagtggcctgtggcattgtaaaagcacggcaaggagcgcagcggccagaaacgtgggggcgcgtggaagggcagtgagcggcccgcgtgccctgtgctccgcactttcttcagggtttccgcgcagttgaaacattggcaacaatggataagccgctcctcgctaggtaatttccggccctctgggcaggtaggggcggaaacgaccgccacgggagccgggcatgaggcacctgctgagccacacgcgggcctcccgctttaaatttgaatccgagctaatccccgcccccggctctgctagtgcaggagacccggccccggcaaacgcgagggggagtgtcgtgtgattgttttaattagccctaaatctcttctgctctacttgcttctaacgccaggctggcttcctcgggagctaggcgtcttattaagtcgctaatttccgccctacccttcctttctgccttcacgcccctctaacgccgctccccccaatcgaaacagaccccatattctgaggcttccccccgcgccttcttcccgccttggaacaccttttaaaacctagcagtaagctgatgactaataaaaatgtcgaaatcgtaa

SEQ ID NO: 1132 - DNA, 268 bp, Homo sapiens
cccagaggcgcacaggagacctcaggcccagactccactccccagctgtgaaaggactgctggccagacccccaagctagcccgccaggcctccatagagctgcccagcatggctgcatccagtaccaagagttggtgggagacgggtgaggtacaggctcagtctgcggccaagactccgtcctgcaaggatattgtggctggagacatgagcaagaaaagcctctgggagcagaagggaggctccaagacctcatcaacaattaag

SEQ ID NO: 1133 - DNA, 614 bp, Homo sapiens
cccttcgtcgccgcggctctcgtccgggacacggctttccggagtagagcccttggaggtgttaagtgtgatgcttccataatacatttggatgctgtcagctaagttcacttctgaactaaggggttcctccaaatgttggctgaaattcatcccaaggctggtctgcaaagtctgcaattcataatggagctactgtactggctattggaaggaggagattctgaagataaggaggatgccactggaaatgttgaaatgaaaaatattcagccgttggtctttgaaatttcctgtgatgtgtttcaatctagatgcaaagaacatggaaaaatcaaagtgctcgagtggtttaaatatgttttgggtattcctgtttatagactataatacttttccaattaaaatcctcagttgtcacgcagaagaaggttaagctgtatttgattgccagttttactgaaaatgcttagtattttacagtatcaccaaatatattttgtttagccaaggtataggaaaaataaaataaattgtataggttgacttttttctaaaatgtctttattggattgaatgaatgtttatacctgaaaaaaaaaggttcaaaaaaa

SEQ ID NO: 1134 - DNA, 233 bp, Homo sapiens
aagagaagctttactggtgttccagccctaagaaacctttgttcaagaaaacggcagatgctctgttgaatccactggagattgttctgatactaaggacaagtatcaaccatctttcctgtgaaaaattccctctcgtactttagttctgtggatccaaaatttatagcattcttctaccaccacaggggctcatatgacattaacagacaagacacttttcagaaagacag

SEQ ID NO: 1135 - DNA, 498 bp, Homo sapiens
cagtggacatcattgtccagtgtgggaagcctggccccactcagaccctgctcaccctgctaccgacccagctgccatcttcctcagactccagcaggccctccactcctagcacacaggccggattgaatcttcaggaaagaagagcacacccagggtgggacctgaccttcccaaggtcacacaactgcggagcagcagatctgggtcctggatccccaaactctgatgagatgcaggccgcttcttgcccacacagcagcgtgagctgctgtcctgcggtttgaaggaccatctaggtggcctcgcagactgacctccaggaagaccagatggcatcctgctccacacgtttactcttggtgactttggatcacttggttaatttctttaggctttatttcccttatctgtgcaatgagattggtgatgttgtgtttaatggagatggtgatgataacagtagtaaaacacattaaagagcctggccacgataaa

SEQ ID NO: 1136 - DNA, 2380 bp, Homo sapiens
aattcagattctttccttagcttctatttccccatttgtaaaattgggatgatgaggacatcttccttgggtagctgtgacaatgaaaatgggatcatcatgcatcagccttagccccacgagtgccacagtaaactctcaaagaatgaagtggggtttagaccctaaatgcttcagtgtgagctgtgaagccccacagcttggctggatcaatctggacttcgggcagatgcgcactaagggctgcttacctagaggagccacgtttctcctgggcagtcaagataactgccagaggagccacatgctgggtaaatcctgaacccaaagtggaattttgccctagtataatgggttcatattcgattggctgcacttagctataaatcctgaggaggagaagaagaaagacatcagaaagtaattggactagaagaaccttagtttggaagcaaaacacagaatccagaaactatgaagaaatttacatgcacacatatgtatacaagccatgagagggaaatgggaatgtacctgagagtgtcgtcaaagcgtacagtggctgcacagtgaaatattatgtttgtacaggagagaagctcctgcatgtcctctttgctgatggcaaagtcattctgattgagatctgcataaatagctctgatcttctcatgcacatttggacaaacttctttgactttctcaaatagctgaaacataaatatagatcaatatacaaaaaatagcaccatcattatcacattgttcttgtttataacaacctgcttaattatactcaaaaactggttttagttgtaataacattacttaaagaagacatctggctgggcatggtggcatatgcctgtaatctcagcactttgggaagccaaagcagggagatcacttgagcccaggagttcgacaccagcctgcgcaacatgggttctgtggactctttcactttggcctgtgaagacttctgactactggaaagcaagaagtaggagatggtttcagcatccacccttctcacgatggggttccttacatatgataatctgatgcctaccagaagaaactctgacccagacaggatcattgcataagaggttggttttagaagtagagttggctgaaattaaagtctcgagtgacatgaagacagtgttaaagataaatccaaactcttctttattgcttgacacttttccaatcagcattgacttcattcctggcaagctgatgtaacatgaatgagttatgaagccaaagatcgcaagaagagcacacttcttaacagccacttcagaggtgacagccagggaataagaaataaggaagaactttccagaggatggagccaccacaaataataatggaaaagaaggttcctcccagagattagatttagaggctatttaaggaatttccccactcccagtgtaggaagcttctcaatactcgctaatcaggatttccttatggttatattctagggactgctgcttgcctgcctgtcttctcttttttgaatagaaggtgtctttgtttgtttgattttattttttcttcaacttcgctgttctacaatgacaagagatagaacagagacattttctacctcaacattgggaggcagaaaattcacctttttatccaagaataccaaaccagaagctgaaatatctggatctgatagagaggatagtctattcccccttggactttggactggatgcaataatggtatgagaccctggggtaggaatgagtgtcttctatgtgtgggaaagagaggaaagcagatatttggcgacctaaaaagaaggccatggcagaacctcattagttgttcaacaatcctattttccttttctcctggacacacagctatgcattttccagccatccttgtggttagatgcccagtgacagttctgagaatggaatatggacagatgtgataggcacttctgggcctgggccacaaaaaccttccacatgatgtccagtgcctcttttaccccactgacagttttttattgtcatccagagagaccttggatggtttagaagccatgtgtagaagatggcaaccttcccttagcatggatccttgaatgactgtggagtgcaatgccttctaccaattacacctactgtgtttgagaatcaaatttcatttgtattaagctactgatttggggggtttatctccttcagcacccacattagtacaactcatgcagaatggagagttaatgtgaacacatatggcacagactggtgaaacctaggactttaagatgatagatgaatttctgattatactttcctttcccgcaaaaagtttttttcaaattaaatgttgtaatat

SEQ ID NO: 1137 - DNA, 2054 bp, Homo sapiens
aacgctcatctggctgtggcagcctgtgactgaatgagagaaaagtgccctagaagctattcattacgaattcactggaagctctcaaacgaggctggcagaagctgaaattgaagtggtctctgacctaattttcttctgcatgaaacatctgcatcaaggctctctttgatgtattccacttggctctgtctacgggattgtatcacatggactcggtgttgcctccttattgaaagacatttccagcctttgcaagatggccggtttgacacaaattagaacaaccttgatagctgtcaactggagactatctgagaacaaaaggacattattgcaaaccagcactggagcaactctgaaagaagataaaagtacatgaagaaatcatttgcaggcactggacaaaaaagagtgcaaaactataatcttgagagcaggacacacacagtttgcagcatcacagaaaatgatgctctctcctgccaagtcccattttttgggaggaggaaatggattaggtcctggaggttgtcataaatgcatcaagtgactttctcagcatcatctgaaacaattgaagatcctaaaaaaatgatagcagcttttaagaaggactatagtggaacaagcaatattctaagtgacaagagacacagattctagaataaacttagccaaatatgtatgaactcgaacaatctcctttgcctctccaggttttaatttccccatctttacaatggaagcaatgacaacagcagcatgcagctagtttggagattttgaagtcagattggctatttagcattaacccaccatggtgctggttgatcttgctagatacaaatctgtcataagtgaaagcatcttgacggtgtcttggaagctgactggaaaaatactgcttttagcagtacctttaaagcaacaggagcttttctgcattgcatagagacagaatgagctttgtgtaaactgtgctgtagccacgttattctgaaagcccattgggaagatgccaatagtaattcagctcaaataatctctattagccataacccttttggttgcaagagacaaaaacatgactgaaattattttcggctagaaggatcgaggagacttgcagcatagctttgagaacagctgaaattaaagacatgaatgctgcaagtgtctctgccactctttgtgtattaactttatgtgctcagcctggcttcctccacactgcaagggatatggctgttgcttatattttcatctccatctttgccaccagagagggactgccttttgtcttgttccaatttgggaattcctggggaaggactactctggcttgggtcacatgtccacaccctgaatcaaacatctgaggtcatggagaagtacactgattggaagatcctactaatattaaaaagtttgaggaagagaagcaattgcctctataaagggatgctactcctagaaaaatgatgggtgctgagaaggccaaatgatcagtgcctactgaactgtcccataggtatttaggtagatatgggtaataaagttcttgtgaactagcccactacatggaatgcaatgtaaggaaacacagcttggttctgacaccaactagctgtgtgaccttggacctcatcattcatctctctgaattttgattacttatataaacaactgtcttccccctcaccccgccttgagtagggctctttgagattggacagaagtgcagccatccagcccagaacacaacaagaatagagttgatgagccctcttctcctcaacaaacacctgtgatgagaacattgaggcaagggaacaggtggccaaaaataccctcatagccttgagaaagtccatcttgatgttatccagtgaaacttaatggcaacgcaggagccagggagcctgctttattttggaaatgaaaaagtcagtacagttgatgagaatttgaagagaaaagacacaacaaagtagaaggctaacaccaattccaaacaatagtaaagaatcataataaagttactatgaatc

SEQ ID NO: 1138 - DNA, 565 bp, Homo sapiens
actcttgtctgcttacgagggctcctcccttcagctttggtccctcggggcgtctgggcagcctacgctttccggtgagttttccagttggttctttggaagccgttttgcggtgactggttttctgctctctctcactgctccgagtcagggcccacctccttgaccgacacctcacctccatagtccacataaaagactcctgacaggttctggaggcagccgacgccagcttctgttcccctccccagcccttggcagctcaggttccgcgggaggacgttcacctgcttcgcggtctcgtggaggtccaccgcggcggagaatcctaaacctcacctgtgactcggcaggatgagcggccagcactcccgacggaggccctctgggagaaaagaggcccttggcctcgagacccaggaaagcgggctgttcaggagttggttcgcgcagttacaccgaaagcgccgtgggcctcaaagccgcagcccggaggataaaaatggcagaatgaaagaattatgagtggaactagagaataggaaagacatgaaccaacgcccaa

SEQ ID NO: 1139 - DNA, 3142 bp, Homo sapiens
tatagaatttcaaaatgaaattatttgcccgacaagaaggcatcattagttagacttgtttcctctgtagcccgattgaaattctcagtgttaagtttaggacccaaacaccagctgggacgtaagagcaggaccgaatcaaccttgaataaactgtatatagaaaacaattgttagttgattaagtagacattggatgtttgttagaaaggaatgttagttgtaagtgacatgttaagatttatacaattgtcaaaaacttttaggaaagattccagaatgcttttgataaaatttatcgattgtggattcacagtgtgataattaagtagggatgttgaagtcttgccaagttttcctggttcccttctcaaactttatcttcccatttctagccctgtctctctatcttacaggcatctacacctcagcaagtcagaaactaaacatcatctgtctctccctgtcttcagaaccccaaccctcataatctccttccagcttccttatttcccttaccaggactggcattttctgggcttggaatttctcggtcatcctctttttttttgttcctcgtgctgttgtcctcgtctcccaacccctaaagcctagtaggtccagtgtcaatgcattaaccacttctgttctgatttccaccacccaagtggaggccttcataacctctcagacgtcacggccatgatgccagttacattatgcctagttaatcttcattcagactggaaggacctgcccccagttgtttctttctgaatagattctactctccttcaacacttccaaagtctcctgccccaaagaggcttagttagtcctgtggctggatgtgactccaacttccttttttgtaccatcacatctttcatatctttctggcatctgccatacatcataagaggctttgaccactgtcctccactgaatagcccattacagctagcacctaatagttactcaggaaataaatacatgtttaacaggccaggtcgtagagattatttttctttctctgccttttcatgtgctgctttcagaacagagggctggattggatagattagtatgatctatcctggagattcatttcttgcattaagagcttattttgtgtgatattatttataatccctgactatgtcaattataaacttttaaattatgtcttatatttgaagttcttacctacatatcagaggaaaatataatgtttatttctaggtggtaaaacaatcttctggattcttttttctttacttgtaaattatcatttaacaagtctatattgaatgccgataattttctggaacaaaacagactacattcccttggtaaagccagacattaaacagatactttcaagcaacagcatgccatgctcagatttaagtttgaaaaatattctagctgcaatggatagcctagcaattttcaaagtttagagaagttattaatattagccctttgtagtactcctgataaatgaataacaccctggactttcaaatagtggcactgggaaaaaagtaagtagaattgagagatggtgaagagataaagtgagcaggacttaacaattgctggactatgggatgagggagcgtagagtcaaggatggctctcagtccctaggtctccaggtctaggaagatggtgttacctttcactaagggagagaactgtaagaactgctgtgagaggaccacaggagtccagttttagcgctgaatctcaggtgactgaaaagcatccaaataggaatgtcagcaaggtaatggaatatatagttctcagagaagtaacacactgtacttgagatgtacacaagttaaaggcaaacattgtatatgaaaagtgatcaaaactacatgcttcaagaaattaaaccttgaagaactcaacagttaatgtcatatatagaaaggcaagtcagttaagagtgtaaatagaaacgggtaaatacagaggagaaaaacagtaagcatggactgtcctagaattcagtggcagagcatactgcaagaaagctgatgtggtcaataatatcaaatgccgctgagatcacataagtacagaatcatgaccttaatggtttgacagtttggaagcaccctggcaacaagccatttcagtggaatggtagaaatggaaaccacgctgggttgagaagtgagtggatgtgaaaatatggggcctctgaatggaggtaacccttgaaaaattccactgtggagaagaaaggagagagagagggctggaatttggaatgaaaggagatatttgggattattttagtaagaaaacagaggtgtcatgacctcagtgtaaccctattagctgcaaaaaattcttcatgggcttgagatggagttagccatattcattattgaaaactatgttctgcacttatacattgttggttggagtgtaaattagttcaaccgctgtggaagacagggtgggtgtttcctcaaaaacctaaagacagaaataccatttgacccagcaatcccataactgggtatgtacccaaaggaatataaattgttctactataaaaacacatgcacacacatgttcactgcaacactatttacaatagcaaagacactggatcagtctaaatgcccatcattgatagaatggataaagaaaatgtggtagaggtacaccatggaatactatgcagccataaaaaagaatgagatcatgtccttttgcaggaacttggatacagctggaggccattatccttagcaaactaatgcagcaacagaaaaccaaataccacatgttctcatttataggtaggagttaaatgatgagaacacatggacatgtagaagggaacaaaatacactgggggctattggagggtgaagggtgaaaggaggaagaggatcaggaaaaataatgagtaccaggcttaatacatgggcgatgaaataatctgtatgacaagcctctctgacacagtttacctatgtaacaaacctgcacagttacccctgaactttaaaaaaaactatgttctatcaaaacctgcctctcatttatgtattaggaatcttgtgacaacggaacagttgaaaaattaaaataaaaattgcctgaaaatgca

SEQ ID NO: 1140 - DNA, 756 bp, Homo sapiens
gcacattcctcgcattctaggattgagatacacagtttggttcttgtgagggcagccagggctggggaggagggcagagaacatcccagagatcaagactgctcttcttgctccctccccgactgacttggcccacactgactggcctgccacccctttacagtgatctccacccagtctctctctgcaaaggcctcccttggctctctgataaagttggagctgtgggtgcagcatttcacttggacctagcagcatcaatgagccagctcctcactggggaacatgcaaacccccagctgctggtgtgcaggaaaagaatccaggagatcacctgatgaagcccagcattttacagataggcagtggagcaggggaatccagttgacactgtggctaaatttcagaaaacctcccatgagatcttgcaaaggagatggagaaaatatggctgaatgccagcaagagcaaagtggtgaaaggaccctggtgagaggcccaaagaacaggaggtgtgagccaagagaaggtcctgccaggcctatgttgcaggctatttggaggctgaacttgaggttgacgcagaattaactgttgcatgagatgtggggtatgagagaaggcctgagtacctagaaggattgggatgccatgaactgacagaggttgtgtaatagtgtgatataataagaaatacatggtgggcatggtggctcaagcctgtaatcccagcaccttggccaccactgcaggacc

SEQ ID NO: 1141 - DNA, 857 bp, Homo sapiens
atcaacttgtaagagagctggggttctcctagatccatgctcgcactgagggaaaacccagtctctctcggcgctgaggagaaaacatggcacagcccttctcagtcctctagcaaccctggactctgcaggagaaaagagagattccctacatttgtttctatgagagaagggaaggctggagcaggggagtgggggaaatctctgcagtcctctcggaaagcaaacccttctacacctgtgatcccatgtgatttagcagagccctgagttaaaactaggccatgatgacacttggtgacacaaacatctgacaaaagagctgtaccctttatattttcaaagactttctacaaattaaggaaggcagaagacccatttaatgggcaatggacttgaagagacactttaccaagaatatccaaatggccacaaacacacacacatacacacaaatgggaatgtgttcaacttcattagtcattatggaaattaaaccacaaggaagcaccagaacactgcagcagaagaactaaaatggaaaagacgaacaaccaactatctgcaagaatatggggcaaatgaagcttcctcacattgctggcaggatggtaaactggtaagctgctttgagaaatggtttgtcagtaactacgaaagcctaaggtacgtataccatcactcagcgattccactgctaggcagacatctgagggaaaaaacttcctgtgtgctccaaaagacatggacagaaatgttcatggtagcttcattcatagtatcccaaaactagaaacataaaatgttcatgaagggagggatgaaacaataagttgtaatacattcatgcgataaat

SEQ ID NO: 1142 - DNA, 264 bp, Homo sapiens
gttcgtgctgaaggcctgtatcctaggctacacactgaggactctgttcctcccctttccgcctaggggaaagtccccggacctcgggcagagagtgccacgtgcatacgcacgtagacattccccgcttcccactccaaagtccgccaagaagcgtatcccgctgagcggcgtggcgcgggggcgtcatccgtcagctccctctagttacgcaggcagtgcgtgtccgcgcaccaaccacacggggctcattctcagcgcggc

SEQ ID NO: 1143 - DNA, 400 bp, Homo sapiens
aaggcttgcgagcagaatgccttcgcgatggacgcccgcattccacccccttgaccgctgggacccctagtggcgggtgggtggagcgcgctccatttacctgctggttacctcgtgaggcgcctcagtgaaatacttccaggccttcgaaaggccatcctttggacacatgtaaaaagctgtcttgttggcctgttattcccactgacccgtctgagtgatcacccaggagcgcggcggcagcaagcagagctcaccggatttgggacaaggattttaaaggcagctacaaagctgagctctatttgctgatgatagtctctgttcagctgtttaaaatgactgtctgactcaccatggtaatttttcacaaattaaagacacattttgggttgtgcaa

SEQ ID NO: 1144 - DNA, 2530 bp, Homo sapiens
agaacctcccctcccccgccggggcctgggcgcgcctgcccttcgctccccgacctcctgctgcagctctgggcccctcggccgctccctcccctcctcccttgctcaccccacggttggccgcggatctccagcacgccgccccagtcctcggcgtcccgcagcgcctgccagggtcgccgagcctcccctgcctcctggccgcctctgcagtgccgtcctcccggggctggctctctccccaggcccccgctttggccacccaggcactttccgccctgagcgtggcagctgctgccgggggtcctgggaccgcgggatgggaactcccacgcagcgtcccacaggctcctggccgccgcgagcccgcgcgactcgcacgagcatgtccacccgcagcgaggggccggtcactgctacggagcccgccagaaggcaaagccccagacagcaaatagggaggcggctggcacccagggaggccgaggcgggaggatcgctggagcccaggagttcgagacctgccttggcaacatactccctccagcgtgccaaatgctgctaatggacagccgctcctgccgctctgatgttgctagacctcctcagcactcagcccaaggcagccaggaagaatgaacgaatggtgattcagagggaaaggaggaagctgcgtggcatttcagagatacttattttaaaactgctggtggccatgtcttcttttcatatcagagctaatgagttttgatatgtgaacatttcttctccttcataggtaatgtgttgatttggcactttaatcttagaataatcatttctaaaaccaacccaactgcttttctttacaattttggccttagcaaacagatgagtccgttgacttgagcattgcttgggcactgtctgtgtgcaggtcaggcaggggatgctggtggctgggaaacatagaggatggaggtgtcttgggtgtacatgaaggggtggggtcaagtccacagggggtcggcccctggcagcagtcctggagggcttcgtggaggaagggagaattgagtgagaaagtggtccccaggtaagagggaagagcatccagggagaggagactgcttctgggaagaccagaggcatcacctcgcaggggctggtatggtggtggctcaggtgggaggaagagagacctcagggaaaataacaggttccattgacaggaggcctgctctggtggggaggcaggctggtggtggagtcatggctgcaggccagggagatgcctgaccaacaggtgtgttggccagggtccctgtagcaaaaacacggagctgaggacctcatggcagggaccccatgcagagggagccgcgggtggcatggggatagtcacctggctctcctgctctcggcctcctgcagctcccctcactccctgccctgccacacaaggtcaaacccaccaggaggcagaaggcgaagggcgaggtcccagggtgaggagcagggaggagatggtggcagcagggaaggtgatgcctgctgcagagtgagacctgggactgccaaacacacagtgacgggagctgaggaggcctgccgggggaggaagacagtggctggcagtgacaggaagggagggtcagcatggggcggcagtcccagagctcagggctccctgccaggccagcctttgtggcctgtggggtggaggtggcaattgctgtcatgtcataaacacgtcaagcttacaatgaaatctccagtgtggcttgggagcaaatacatgtgcaggtgtttgagtatctgtgctcttacctaacctcagggagcaggaaaacgaaagcttatcatgtaaacacatcagcagcagggcttatgtgtgtctccacactggaacccccaagacaagagactggaggcagagttgatttccaagcccagagtgctgggcagcctttgggttttatgtctgcttgcttggagctcagtgatagaaatctaggccccagaagaggaaaggactgtcctgcataaccagcacacccggggaatgcttcaggtgcagctggatccaggcatcctcaaatagtgtgattaggactccactttcctttgtcaccttggcttggctcttccctgctctgtgttgttttcagacgaggtggggccccagcagctctggtcctcctgacatcctagagaagagccagcccttccctcctggggtctacaccgtcccctaagggacctcagactgggctgatggaaggtctcaagcaggccatgtgaagggcactgcacaggaaacacagaaacgggaatcctataaggtcagcagagctctgagccctttgttcttgggcctgtttttatgatcctccctctacatgtagctcacacttccctgcttctgtgcaggcaccaggtgagggggttgtcatggcctcctgccactcttgaggctgtcagatattacctgtgctgtccctgcattctcaagctccaaattgtcaactaagaaatggtcacttaaaaa

SEQ ID NO: 1145 - DNA, 1360 bp, Homo sapiens
cactgtgaagaatctgatagtcgaactgaatgaagccaagtccagtctttacggaaaaatttacacaacacttccagcagtgacctgagaagctacgtattgacacggcgctaccacgggtggaggagcctgcattgctgaatcacaggatgaaggcgaatccctgccagcctccatccatctctggggtgcttagcagaatcctcagctcacaagatgaataaatgcagactaaatgatgcacaaataatcttcacacacaaccatcaacacatggaaagactgcaggacggccagatcccaagctaacaaacaggggaagatgatgtttcaaatgatcatctgaatgctgggtttccaccttccaccaggaagtcatatggtaaaaagaaaaaaaatggcattatgatacaaacagaaaatgtaacagtggagtgcagaaaatacaaaaaaaaggaaaaaataaatagaaaatcttcaaagaggcaatctgtttaaatcttcaagaactggaaacagtaaaagtgaacaggtttttattgagcatgtcaataaaatgtttgcataagactttacaagtgctttatttcatgaggtttttattattgatcaaagcaacgaaaatgaacgggaaattcattctcatcaaatctacaacttgggaggaggtccgatgaaatccctggaagctcacattttttataaatgaagagttaattaccggtgggaacaatgagaacctctgtggttcttcctgatgcttggatcctcccagacctctgtttccagtctccttctccacaacctggcctatgcgatgcaagtggtctaactgatctccgcctagggaaggatccttcggcaacttgccgacaagagaagcagcgatgcccgaggcaggtccaaaggagcactgactgcgtgggattgattacactggaggaacaaaaggtcctgtggctacacaagtttgaaaagcagaaggtacaatcattgtatttctggcagacttttcaaagactttaatatatgaatccctcatatgaatctcctggaggattatataataggcagatctcccagccattttcactgaacagttcttagaattggtatccttgaaaaatttcacctaaccactcaatatggtagccactagtcctgggtggctattgagcacctgaaatttgcctagtctgaattaagacacattctaagaataaagcacactgtatttcaaaggcagtacaaaaataaaaaagaatgtaagctgtctcaataataatttttgtattgaatacgtgttgaaatgatgttatttttgatatattgagtgaaataaattgtattgctaaaatga

SEQ ID NO: 1146 - DNA, 738 bp, Homo sapiens
cggcctgccgcggccctgagctcacctgaggcggaggcgcccgcgactccccgccagctccgccagtctcctccagccccggccctcgggcgcctgatccaggagctcgctgagcctccgcagcagcggctcccgcaggcggttgagggtcgcgccggccggaggggcgagcagcggccccgtgggggcggccgagggcggcagggcctgtagcgggtcccccaacagcgacatggccctcgccggcgaccccggactgccggggctcccgcccgccccgtcacgggcctcggccccggggcaccttccgctcgcctccgagccgcggaggcaggggcggaagaacaaatctggcagcgcggcacggccctcagaggaggaagctccgctccccgccccaattagacagcaggaatcatctggtttacaccgcgtcagactgccgcccgcaatctccgtcatcaaagcaggcaaccctgtagaggatgcctttccctggaatgatccggaatggacgacacctgagctctctctgccaatcttagcaacatccaaggccattatccctttgaaaactatggcttcgtttgggacaaaaaggaagtaacttacgaaatgtgaccagtcaggtagttccctacacgaggcttcctggcccaatttctgttgccattagcttttcatcacccaaggccgcaggattttctgaccagtaatttggatacctatattcttata

SEQ ID NO: 1147 - DNA, 755 bp, Homo sapiens
attggtttgccatggctctttgaaacagttactcttgtcctcattgtagagatggcgatactaaggcagaatatggtaaggctagcctggacttctttttgtggagactggattccaagattgaaagtagaagctacatgttttctccaagcagggctttcagacttcacttctgcaacattttattgatgaaagcaagtcacaagaccagactgattcaaggggtggagaaatagaccctacttcttgatggagggaggagtagagttacattgcaaagggatctggacaaaaaaaggagtgatttattaggaatcatgtttaacaatttaccacaatccccagcgcaactgcctgttagctggatccagaaatgtctacgactactgcaatgccacttggccttaggggtgatgtgacccagtgtaaagagatggtggtcttaaccaatcacagttaagatagtttagttttggaaggtataaaaaatatgtaacaacatgaatgcacttttagggtcagacaagagacttggaaagagcctgcaaaatggaggagccctgaggcctaagtctcatgagtgtcaatgcttacctgtatctagacactggcatcccccttttgataaggccaagattgattgttttccttttctacctaccctatatctaatccatgtacaaacactgttgacacacaaaagaaccctaaattcaacaatctgtgaagaatttttgcactaacatgttagttca

SEQ ID NO: 1148 - DNA, 1077 bp, Homo sapiens
ggagagttaacatctaatctggaggaagaccctggaaggagccagccccttcccccaggctgacctggtttaagcctttcttctgccaaggtcaccagcaccccagatgggtgagagatgtgatcactggtttcgtggcctgaccaaggacctccaaggaggtatctttcccatcttggcccacagaggaggaaatcctagaagggatgactgaagcttgggactaacacattggtggatctgtgctaccccctgctggccgtagacggtatgacagccaagatagggcaaggcttcgaggggcgatggatggattcaccgcagcggcgacatttctggactgttgtcaccttcagtgcagtcactgggaatattcagaacccaggtgattgataaggttttcccagggatctcttctctccccttcaccattactcagtaggagcttccttaaaaacggaaaacgagaggccgggcgcggtggctcacgcctgtaatcccagcactttgggaggcggaggcgggcggatcacgaggtcaggagatcgagaccatcctggctaacacaaccccgtctctacttaaaatacaaaaaattagccgggcgtggtggcacgcgcctgtagttccagctactcaggaggctgaggcaggagaatcgcttgaacccgggaggcagaggaggttgcagtgagctgagatggcgccactgcactccagcctggccgactgagactccatctcaaaaaaaaaaaaaaaaaaaggaaaaaggggccgggcgcggtggctcacgtctataatcctagcactttgggagaccaaggcgggcagatcacgaggtcaggaatttgagactagtgtggccaacatggtgaaaccccatctctactaaaaatacaaaaaattagccgggtgtggtggcgcatgcctgtaatcctagctactcgggaggccgaggcaggagaatcgcttgaacccaggaggccgaggttgcagtgagccgagatcacgccattgcactccagcctgggcgacagagcaagactccgtcttgagggaaaaaaaaaaaaaaaagaa

SEQ ID NO: 1149 - DNA, 645 bp, Homo sapiens
agcagcccagggacctgagaccagcgttctcaaatgaaggtgccagatctgctgttagaggagaattcttctgtcctagctgtgtctctgtgatctgtggatgagggtgggaaagcaccactcagtcaattggggtgtacaaaatggagtttgagaaggtctcacatccaggttgttttgaagcaaagtccaagcattgtatcacttcatctgcaaatatttcaataagtacccaaaagtggttggactgagtcccatgaagccagatcacttctgactgcaaggagcttggaaaagcaagtatctggatcttttaccagctaaatttggagcgatgaggcttcctctttgaagatcacaggtgagaagattaggtgctttctcagaagcccagcaacctgatgggagtgtggagtgagcaagacccaaatcggagcttcatccctgcatggttcattttgcttatttggcaaacttgccctgcagaatctactcaagcttcctcagtttctcaaatcattcttgggcaacaaatgaacaagaaagaggacgtcttattatctggtgtctggcttgctgatttaataacctaggagacagtgtttgaagaacacaaactctaaagtccttcacttaaaaaaaaaa

SEQ ID NO: 1150 - DNA, 1944 bp, Homo sapiens
tgaagaactggtcattttttttgagtgccctcttctcagttttgtttaaacttacactcagtagagtgttgggttgtctgctgacatggagtagaacctggattctggccaaataggccagaatcggaaaggtgaaggtgagtgtgatagtaggtaatctcctcaccccagcacaggccctgggagagaggcaaagcagtttgatgggatctggaggggagggaggtaccctggcccttggtctagcatcagtgagtcctgcccttccaagcccctggaggctagtggcattgcattgtgcccctttttgccacccttctctgatgtgattttgagcgaagaggagtcagtaagcccattgagaccggctgctcccaaagcccgaggactctagctgtgtggggaagggctagcattggtcaggactctgctgacagcactgagtaggcaggaatgtatttgagatttggaagtactgttaatttggtggagtcaggtgaatggataagaggcagatcggcagaaagcatcagtgtggtcccgaggctccctctgttttccttgccatggagtccccagcgccttgtgcctgtttccatttccctctctctttgaaaagtagaaatcagtggtttcttgactcctaaacagcctcctcactatagaaggagcctgagcaggtcagaagaactagaaaagtcctcagatacccccctctgtccagccccctttcccatacacagatatcaatggatgagcaggaaaagaggaggcctggactcactgaagtacttgaagaagcacaagtgtcatagatgtgccgccctttgccctgggtgttctagatcacacagaacacgtttcagctggactaagaatcagactagccaggggttcttctgaacagctcaggccagacctctgggctcctctgggggccctgggacatgatgccttgcagtttccattccattgtccccaggcctcctgacctggtgacagagagtgccctgcagaagtgagtctatttttcccaattcctcttcatgaccagaaaatggcagctggccggttggggtcctgtgggaaagggctaacctgggctgttaggtagacactaggtttaaaggtagacagggagatggcatcatcagggcaggccaggcccacttcctgtgaccccagaccttggcaggcgggtcgtgctgaaaccaggcatctccctcacacctggggaaaggtttagggcaacatgttgcctcttcatcccattaaccctagaaatcttctggttagagtggccccttaccccaaatctggcctaggtctgaagactgcaggatagtcatgatgggcccatcctagagcctggctagctggaagacgcggtatggcagggacaggagggcggcaggaagggctttgtggccctgctggggccaaaggcagttttctgtgctccctttagccccagcctggctggccaggtctcctgtacttcaggggaccatggggccgcccaagccagtcaccttccccttccaagctctccccccatgactgttgatttctggcgcgtggaggcagagttgtgaatccacaaatgctgtagcccatatctcgtaatgtgtctgtgtccacttagagcctcacgacctggctgtgtgtgtgcatgtgtgtgtagtatagtttgtagttgacaatatgtgtatataatagctggtgtatttatatgtgagtgcagaattagtgcccgtggcggttttctgtattttaaacccattgaattggttagttttattttagggaagtgggaaaggcggagtggggggaagtataggaagaaggattcttagcaaaatcattctctaggactattagtcgcgatctcccagtgagccatcacgatgcccttttcaaataaatgttaatgttgtcaccaca

SEQ ID NO: 1151 - DNA, 9771 bp, Homo sapiens
cagagggatgcccaggatgaggtgaagacgatcttggaaatcagcccagatgtgcatgcaccagtccacgtgtggcaggaccaagggaagtgtcttcacaaagatgaggctttgatttgttggagaaactgttaccagaaaaacaggtcccgatcccgaccccaaaagagtattcttggatcttgcacaggaaggaattaaaggtgagtcacagagtgcagtgagaaggagatagtttattgaaagttactcagatacagagtaggtgtcctcagaaagcaaaaggaagaatgcaccatctttgttgtaaactcttctaatgtaggggtttaatctacataaaagctaagttaaatgtctatgtgtgggtgctctgacagcatgacaaaatttaggacctattgatttaaagaaagttatccttggcattttagttagtatatcaaagcatgactataataatcttaaaagcatatattataatgtgacgtcaggacatgtggacattctgttgtctgtcataggcgtttgttcttgcaggcattattaagttgtttaatcagctgtaaacctcttatgaccatgggttgtgactggcaaggaatatgccttgctagttgaaagatggagttgactttaaaatggtgtcaccctggctctcctatgcttctgtttccccaaaaaagccaggttacttgtcctgtagaatgatccacattctgagtttggctaatgacattctcatggtattaacttgtttctttatatgttgttttttctgttacccacaaaataattcttctgatacacatttgtaatcttaccatgccagcatctgctactcttcatgttaccaaatttctgttcaaggaccactaaagccacagtcagtggacattctgagacctctaggggagggtggagatgctgtcctttaatatagtctgacccaagcaacctccccacttggcatggtgaatctagacaagctaaagaatttactacgccccaggcctgcaccagccctctcctaagaccttgggcactctcatttcccttttttttttttctaaaggaagtcatagtttctcataacctttgctagtgatcctggaccttggttgttccctgaggctgtgttctccacactgctgccatcactgctacagcagaggtgcagaaagctcaggagagagaagggaggaaaagctgaagattttgtgttattcatgctttcctgactccggcgaaagtgcttcctccacctgcaaccatttctgtttctatactgctgagtcttgtgttcccaagaccaagggaagcccattttctttaaagccagtcacagtttctgttggctgatggaatatctgttgtccagcagttgtattcctgctcacaaatgcaaaacagtttgatgccacgcacattccagggcttagactggaaatgctgtcccttgcccctttgttaccttctgacagggatcagtccatagtgtagttggtgtcacaacagtcccgaagaagccttccaatagatacccaaatgtgattcaaagtggcacaggcacacaccacggtgccacatggtgcctatgtaaagcaggtatatcaggaatgctaagcagagaagtagcagaacacactgatccccatgttctcattgtacagttgggtgcaattaagctggcacaatggactcttctcatggctactgttccagtagtgtggatgcccccaaatgctgcatatttactaggacagccaggcagagacagctgtgtactatgatacaacagtagtccctcttagaggaagtgaccttgttagaagtgggagtttctgaagctcttcagctgttactggcctgctcttccatagcgttacttcagacctgctggcccagctatccactccgctaacaggtctgtctctgctaacaggtctagctctgtctcctcagcacatgttctaggctctgactgcaagtgctgacttgggctcccagccccacacagaccctctgttccatgaaagggccatctatgcaaagtgccccccaaatgccaaaggagccaataaaccaaggaacaagacagacaaatctagttgtcagtaaagagtgttttattggggaacttacagacagaagcgtggtcttggatggcaggaagacaggtaggtttctgcacttattacccccacacccagggcttatataccacaggggaagagtatacatgctctgtgcaagacaaaggctactactgtccagaacaggtaagaatgctaatgtgtcatagcctagaatttgtataacatcaaggttgacatgttcttacaatagggatggtaaataaagtgggaatcaggagtcagtcctgggactggggctaatcagaagtcagcatagagaattagcatccaagagggagtcacttttctctccacatcccagccctctaatccagctcttacaatctcatggactcacatttcccccatagtccctgagccttcagagagggctgtgggtgacattttgatggtgtgagtgacacattttatcaatttgttttctacttgttaagcaggggccacagcaacaacacaaacaacaggcgatgatatgtatgccaggtgtaagacacagaattaaaaatgccctttaccatgtttattcaggaaccaaaccaagaggtatagagcagaacaacaataggaacagaagactatgggtggaattaaaaatgtttagtaggtatttggtggggcagttcttccccattaaacagaattactggtagctccatctctgttgattaggaacataggattgtgggctgggagtacacaccaaacatgttgcctgaggggcaaaggcgctggtattatgtgtaaggttacaggggcagcaaaggaccatgtcaaatggccagccagggtgcttcttaaaagggactgtgttccagtttattggtatgtggagtgttttggcccagacttcagcaggatcaatggagaccactttagttggtagggaattccttgctgtctggaaagaaatgctctatccaacataggggaagttgctagtccaacccccattcaagtgtctcctccctggctcaagatcttgaggagttctaaataacctttgccattggccttttatctgctcaggtcagagatgcatctggttggactttctttactattatggttaatggatccatctctgtggtggtcctgagtcattggtgtggtgccagcaccatatttgtctcaactaaattaaggtttctaatggcttgaggcaaaatctttgtctaactatgaaagatattggattttgagagtgctcaaaactgtgccttcaaaataccatttttcctttcaatcaaccctgttgcttgggggagtatacagtaagtgaaatacccagtctatgtccctttcatgcatccagtcttggacaccgtgtctggtgaaatgcatgcctcgattgctatcaatatgtggagggtatccttacatgacactgagttgctccaagcccctgatggtggctgtttggtttgctcttacaagggaaagcttgcaacaatcccatggcagtgtatacacatgttagtgcatactttcgtctcaagattactggcaagggtctgatgtagtctatctaccagtctgtcacaggggtggctgtcttatgtatatgtccaggtgtatgtgggatgtggcagaggtacagacgggaacaaattaagcagtttgctaccgccaccactaaatctgcatagcagagagccaatcctgctccctttgctatttggcagcccattcatgcactgaaatccccactgtgatatgtacctaatcaactagctcagtattctaatttttgctaggatgtctgcctccatgtttctgggaggtgaatctgaccagtgtgctgaagcaattaggtccacagtgggttcctgtagacttttccaaatgtctttccacatatcagctccccataaggatttttaaattatataccaatcatctcaggccctttgggcaagccaaattgtaagacccttaagtactgccagactgtctgtacagagaactataggtggtggctcacgggtacaaaccaaccatgtagcttggagttctgcccattgactgctctgttgcattcccatctcaaaccagatactgtctgtggttgtgcagctactactgtccatacacagggttaccttggctcaatgcatctaagtaccaagcattatcaggaatgagggccatgccttcatgtaccattggagacatctcctgtgagggctccacaataggggcagcactggactcataatgtactggccctaagatagcatgcagttcatctcttaagggatgcatggagaaggcactatgttgttgcatgtatgcatggcacttttgtaaagtggaaacttgggcaatagctgatacaggcctggcaaacactcctacccagtccttgataggaaacctgttctccctggtaccaggaaagcagcagttatggattcaacttgtggcaagaccttctatatccccaggacctgttattcaactgggaaatagcaggtttcagtacccttccattaattgtgactaaaattctaaaggaactgcttccctatgctggactttatattttcatcatccaaaattatagtttagttttacctttaaaaatatgttttttgttctcatttgttccataggtttctccttgaaatttatattgtatggtaaggtttcctattgtttgcattttgtggattgcacgccaaggtgtggtttaatgtatttctattacctgtattttctgtaaattggtagtttggtatagaggtttgtgtacattcagggtttttttttttctgtaagtattgatggttctgtaaaaggaaaataaaatcttggggccccaaaattactaagctaaagggaaaagtcaagctgggaactgcttagggtaaacctgcctcccatctgttcagagtcgcccctctgctcactgagataaacacatgtctgattccctcatttggaaaggctaatcggaaactcaaaagaatgcaaccatttgtctctcatctatctgtgacctggaagccccctccttgcttcgagttgtcccgcctttccagacggaatcaatctttagcttacatatgttgatcactgtctcatgtccccttaaaatgtataaaaccaagttgtgctctgaccaccaaagttgtgctgagaagtgacaccaaagaacatggtggcataagaactccaaggacccctcccctccacagcggcaatgtgcttgttgaaacaccagtataaaaaaactcgatgagagctgtgattggatttagtgttgatatattttttgtaaattgtggtaaaacatgcatactatataatttaccttctaaccattttttcagtgtacaatttggtggcagtaagcacatttacaatgttgtgtaaccaccgccaatatccatttccagaacattttcatcatcccaaacagaaactgtacccattaaaccataactgcccattctccctacccccagcccctggtaatctctattctattttctgtttctatgaatttgcttattctagctactttatataagtaaaatatcatatttgtttttatttctggcttatttcacttatagtgttttcaaggctcatccaattagaatttcattcacttttaaggctgaataatattccatgcttatgtgcaccgtgggttgtttatccagtcatcctctgatggacactcggttgcttccaccttttggatattgggtatagtgctgctatgggcctgagtgtacacatatctgggtgagttcctgctttcagtgcttttgggtatgcccaaaagtggaattgttggctcatatagtaattctatttttactttcttgaggaatcactattctgttttccatggtggctgcaccactgtatactctcaccagcagtgtacaagtgttccagtttctccatatcttcaccaacacttggcctagtgaagtttaccatatttttatgtccttattggcattccttttttttttttttttgtgaaacagagtcttgctctgttgccaggctggagtgcagtggcacaatctcggctcgctgtaacctccacttcccaggttcaagtgattctcctacctcagcctcctgagtagctgggactacaggtacctgccaccatgcccaactaatatttgtatttttttggtacagacggggtttcaccatgttggccgggatggtcttgatctcttgacctcgtgatccgcccacctcggcctcccaaagtactgggattacaggcatgagccaccatgcctgaccagcattccttatttttatgtccttattgtatatcttctttggagaattgtctattcatgtcttttacttatttttgaatgagattgttttgctattgttgaattgtagttctttacatattctggatattaattctttatcagatatgtgattggcaaatatttcctcctggtctgtgcattttcttttgattctcttaatagtgtcctttgatgcaaaaaagtttttaaattttgatgcattctaatttgtcatttttcttatattacttgtactattggtcaccagccaagaaaccactaccaattctaatgtccataagattttcctcagtattttcttgagggttttacaggttcaattcttaagattagttctttgagtcattctgacttaatttttgaaaagggtgtaatggaaggacatgaattttttccagcatcattcttttgcatgttgatatccaggtttccagcaccatttgttgatgcaccatctgttgcagtggggctgacacatttgtaagatgcagtgagcattaatacatgggagcaccatgcatttatttacctgtctttacttcacagttgttttgagaaggctttcactgacagactcaacagaaatgaatatatatgacttcttataaaatcatattcaagtaaaattataaattttaaaatgttaagactggagcaagactggaacatcactagacaagctgaaacataggctgaaatgaagggttatgtttaccttgctacaaattctgttggcccacaatctcttatgcttattgcttaagagagccacagagtggggtgatagctcacataaccagtccctggttttctgcttcagaaagaagtttaaatattctgcttagacagagtaaggaaattaactgaaagatgtctaatgtgaagttggcatctacaaagtgaaggagtgagtagtaagtgtaaacatcaggaatcccaggagattctatctttttgcacggaaatggcctcactatgcactgctgaagggagaaggtcccttcaggggaccttcatgatgaagaagaacacaatatgatataggaattttctgctgcagccctaaactgaattgtccttctctctaactacaggtctcacaaagttttatagcttcaatgatttcacctgggccaagattttggttttttttgatgttatttgtttgaactgctgcctggggcttagaaaagtgacttggatattttgtcaaaatggattttctttgatggaatgtgaaatccgtaaacactctgctttcctgctgtatccccagagcaggttgagtaccttgcacttcttctcagcacttcgctagaagtggtagaagatttggagttagggcctccctcaatccctaccctttctttaattcagaggatcacaaactgttgggagaagagtggtatcttgggcctctagctgatctgatgaatattaatatccaatgtcctgtagtgaagtcatgtgtgcgtgtaacatcacttcttcacgcagtgtcataggaaagtgggttcctggaccccaggttaagagcctaagcactaaaggcacagagctagagctctaggaggggagggatggctggggtggaacctcgtcttgtcatttagtcctggggccttttcactccttacatggtgggtggtgggcgtctggcaggtgccgatgttgatggagtcaagggagggaactagccgggacagggaaaaacagggttggagagataattaaggtggacgttattttttctgagcgtaagtcgtggctggaaatctggagagcctgaaagagtatccccctacccaaacctgttttttccttttccctcaagcctcatttggccacaggcccagtgtcaacaccagggggcgccacagaccatgaaggcaccgtgcagctgggattgtttgtggtcggctactgggtccctgacttaaccaggggagccaagaccctgtagccaagtggcctggattcaacctgcagctcaggtcttactgacacttctccccctggtgcctcagtttcttaatctgtgaaatggtgaggacattacagcatttacctctggggcgggtttctcaacagcagcactattaacaatttgggacagagaatcttgtggagtggtctgtcctgtgcattgtgggaggtttgccagcaacaccccactcaccccctcccaccaatccccatgtgacaaccgaaaatgtcccaggatttttaggtctcccttgggtctagaagctgcacttaggcattttcccacctgacacttgagttcatctctgctttggtccacataaggccactttaaaaaaatgttgtttctttaaagattctaaccatcttttaaacaaatccattttcttcctctatttctgcattcagttaatccttccaaaccctttgtttagtatatcttgaaatgtatcaattcctgttctagtaattaacatatgtgacttgcatgatatctgctatgacccttagtagagctctgattcctttagcacagggaatgtgttctcgattctgctctggatgatgtaaatcaatttattttactttacttgtctgggatgttgctcctcatctgtaagatgtaaatgtggatatggcttggattactaagtggttttatttcttaattcacctgacatttgttgtgtgcctgctgcaagtcaaatacatggcatggtattgtttccttgttcacaccacagcaaatgagaaaatgagacattatagccaggtgtggcggcacaggcttgtggtcctagctactcggaaggctgaggcaggagaattgctccagcccaggagtttgaggttacagtaaggtatgatatcaccattgcatttcaacctgggcaacagaccctgtctctgaaaaaagggaaaaagaccttgtgagctgtctacgtgtactctatgtctcaggagactcatatcctgtaatttttctaaatggcgtctccatgtggtctttcatgaatgtttgtctggtattctctatccttttactttcaacttttctttaccttctactgaaattatgtcttttgtaaacagcccatgattatttatttagttatttatttttacccccctgcactatttgtcttgtaattggagtgtctgagtccattatgtttaatgtaattattgacctcattgggtttaagtctgtccattgtcatttgctgccttctaatattatctctttcttgctcaactatttttcttatgttaccttctttagatgaataaaaacctttgcattattg

SEQ ID NO: 1152 - DNA, 443 bp, Homo sapiens
ctcactctgacccttaggctgtattcacagtagaccctggtttcacttttcatggttttagttatctatagacaaccaccacctgaaaataggaaaaaaaattatgtataggatttggtactacctgaggtttcaggcatccactgggggtcttggaatgtatcccctatggttaagggagaatgactacaaaccaacgaactgctacttagcaagaggaaggcatcagggcagtagctcctctgggaatagtaaagcacttctttctcctgctgccctgtgaagaaggacgtgtttgcatccccttccaccatgattgtgagtttcctgaggccttcccagccatgtggaactgccagctgccctttcccttcagccatgagtggcagcagcccgaggccctcaccacatgcctaatcttgaagactccagccagcagaact

SEQ ID NO: 1153 - DNA, 547 bp, Homo sapiens
aatccccgcaggcgctgggtctgcagatggcgtccaggtacacagtggcgagtgtgattccgcagtcttgggctgtttggccaagcgcccgccggacatggtacgccgaagggtcatcggcgtggagtcctcgctttcagcgtccgcggctgggaaatcggccatcgctacggcgggaactgggactcgggctgcgtcccggcccttccacatcggtccaccgcactcgtgggcgcccgcattggtgctgacataatttcctgacctctgacccgtattgtctcgcgattaaagagctgcgcctggatccctcagcagtgaggagacctgaagaccagaggaaacacagcaaacggagccttgctctgttgcccaggctggtgtgtagtgatctcagctcactgcaagctccaccttccgggttcacaccattctcccacctcaacccccggagtagctggaactacagcctcctgccaccacgcctggctaattttttttttgtatttttagtagagacggggtttcaccatgttagctaggatgg

SEQ ID NO: 1154 - DNA, 575 bp, Homo sapiens
cccagctcttctaatttaaaagttgctgcatttgtgatgattttcatcttgactggggatggtttttccagcatcatttgttagactattcttacctccatggtgattcttggcgccattgtcaaaggccagctgactgtatatgttaaccctgggacttctgtaatattggatcatactgataaacctaatttctgacaaattcttcctcatccaattcatgctccccattctgaacaccagcatcatgcatcctttgctctgttctaggcacaacaatcaaaagtgcttattcccaaactggacctgacttcagccagagcattgctgggacatatataaatctacgtttaatatttgaagacttgccagactgtttcctaaaacacctgcagcattttacattcccaccagcaaagtacgaaaagcttccaatttctctacatcctcaccgacaatcagttttttattttaaatgctatagttacaaagaaaagttttagaatgaattaatgctgtgattttaatcacaaagattaattttgcaataaaaatccctgataattatgattata

SEQ ID NO: 1155 - DNA, 551 bp, Homo sapiens
gaaatgttttgttagccatcaggcaaactgaaaatagatttagaaagtatttaagattcattttttcaatgcacagtaattgagaaacctgtatgtgccaggcactgtgttagcactggagctctaaagggcagaaggctgaatgtgatagatggatctctaccttcagggtgcagtctagtaacacatagaaggactgagaccaatagccatgttgaagaggagacgatggttctcccatcaccttcattactccacctgctgctcatgaaggttgctgcgggatgtgctgattaacttgtgttttggtcgaaatctgaagtgatgctgaatcttcgtcctttaatgttgtctgttttattgttgaacaattttatcatgcatcgtgtgaacttttatgcttatggtgtgtatcatcacagcactggacaataatgactcacacagtagaataacataactgtatacttgcatcaagggtagttaaaacatggtaaggttttctcatgtctttattaataatgattaaaaaattaattattcacctctga

SEQ ID NO: 1156 - DNA, 2973 bp, Homo sapiens
ccgcccgttcgcgctgccagcagcttccgcctgctacggtcctggcaagcacctcgggatcccattccttcacagggaccctagccagttaaagctgatacattcctgtgggtcaactatgcaactaactcagattttgagcaaacaaagctctcaagttggtgatcctcaggagtctctgcattagttggacagctcttctggaattatcttctaagtcaactgtgggttgggtaggtggctctgctgatttttcgctggacttccacatttgggacgagttggctgtcatcagctctagaaagggtgtggccgttttacattggctgttttcctcacattcctcaagcaggtactgtaataaagaactggagaaatacagtcagatgggaagtagcccttgctgtcaaggagcttgccatctaatgggggagacaggcaagtaaaccaaagactacacagtgcagtatggtaagtgccatgattttgatgtgacagggcacagtggacgaccttccaaatcaaagcaagtaactaggggttgacaatggtaagtatcatagttgaagtatccttgaacaaggtttcaggaagaagaagaagggaatttcatgcagggaaacagccaaagctcagtgagtcaaaatatcacagcattcttggtaagcccaattgttttttctgttttgctattttggtggagagaaaggaacacataaaggaataacatgagagaaggctatttggggaagtgtagtagttaaggttctggctcaaacaacaactgcagctcataaagttgactttagtggaaggatactggggtatctcatggaatcttgggaactgttgaataaccagggaaactctgggaaactcactggtaggaatccataaactgtcctcctggtgggctgtaaacaactcaccctctatgcatctcacatcaaaattccagtttcttgggaaaacaagtctgtttgcccaatttgggtcatatttccacgtccatgttactcaggcatgattcatctgcaagttatgtgtatagatattttgctactgttccacccttacgctgtgctggggagggaggtgtcactgtgagctgtgtcggtgccttaagagatatctgttgtgtcttattacttggttgcttttccccacatgtacaatgacaaaaatgccttcaacctatttgatccagccgttccagtacaactcctatacttgccatctttccaagcccaaaggtacatccagctgatggaaggagcatcttggtgttaatattcttttagtcatggtctctgaaagtaaaatgtctattcttctaattctggcacaatcttatctagctatagttcctcatggtcctgcactccatggactaaattgtaagtataattactaccaatgtactctataaataacttttggggccagggtggcaatagttgctagagagaaaaaaaaaaaaaaggaaggagaagaaaacagtgatagttcttattttaaaaggaaaaaaagaggcaggaggctctcttgaggccaggagtttaagaccagcctaggcagcatttcaagaccctgtctctactaaaaagtaaaaaaaaaatttagtcaggcatggtggcatgcacctgtagtcgtagctactcaggagactgaggtgggaggattgattgagctcaggagtttgaggctgcagtgagcaatcatcatgccattgcactccagcctgggcatcagagcaagaccttgtcttttaggaaaaaaaggcagggaagaggaataggtaatttttcagtgttcagacattccagcaatatgtgtggagtactcattctcactacagtttatgaggccatagctagtatgtatgactacccatccaagtttccctgcttacagttactattccaactgattggggggcttttcctaatagagtgatttaagccttcatttttagacatctaagcccttggtgatcatcagcataaaatgtgacaaattaaacaaaagcaagacagcacatcagagaacaactctgaggtggaatgattgggaaccaatgaatagttgttcagtaaatggtttatattttacagatgatgaaactgaaacacaaaaaatttagattaactcttaggtgacaaagccaggattgaagctcatgcggtctggctccagaacaactcttcttcatagttacgttatactgcccctgcattgttggtattgaaaaatttcctttcatctctggtaaaagtcagctctctaactactgcatctcacagctgaacagataactgataccgtgcttccagaagatttttctaacagtgtttgcaagctataaaatagtgctttcacttagaaaaggctagacgtggtggttcatgcctgtaatcccagcactttgagaggccgaggcaccatgctgggagataaggatccaacataagacaaacagtgctgatgcttttggaaagctcatattcaagctggggagacaaacaacatacaagtggctgtagctaccttctgcatatggatatccagttttcccagcaccacttattaaagagactgtcttttctgcagtgtatattcttggcaccgttgttgaaaatgaattcattgtaggtgtgtgggtttgtttctgggttctctattctgttcaacttgtctatgtgtctgtttttatgccagtaccgtgtcattttagttaccagagctctgcagtataatttgaaaccaggtcatgtgattcctccagttttgtggtattaggataggtttggctattctgagtcttttgtggttccatataaattttagaattttttttttctatttctgtgaagaatgtcattggtattttgatagggattgcgttgaatctgtagattgctttgggtagtatggacattttaacaatattcattcttctaatccatgaacatg

SEQ ID NO: 1157 - DNA, 786 bp, Homo sapiens
aggttctggggcgccaccgcagtcattctgttcagcgggtatagggttcttggataaacaagctctgacgatcattcccaaacaagagttcaaaaatgttttccgcaatagcaatgatatggacggaaaggatgccctcctgcactgatgcctctggaggaccacactttccattcagagacacgctcagcactcaactcatgctgcacacccggccgaccccagtaccgacactcacagaatgcaggttggagagagatgccgacttccgaggaggtgtcttcttcggactgaacgtattcccaaagaaaggcatctttggcctgatgaaagcaaagccagtgctcccttctcctagggtcagaaaaagtcaggggtacaagcagctggatcactgaccttatgccattgtcttcaaatcttgaagacatacattttatcatgtggctactaacgatcctggtgctatggtttgaatgtccccaccaaaactcatgttgaaattgaattgccattgtttaacagtataaggggtgactgggccatgtgagctctgctctcatgaatggattaatgccattgtcatggagtaggttagttttctctggcgtgggctcctggcaaaaggatgagttctgctgccatgctgtctgtctcatgcacttgctcaccatgtgagccttctgcctcacacaggatgaccctcaccagatacttgcaccatgctcttggacttcccagtctccagaactgtgagccaaataaacttcttttctttataaatta

SEQ ID NO: 1158 - DNA, 415 bp, Homo sapiens
cccttccctcccctcctcctctttcctctcctctcccctcccctcccctcctttctcccccttcctcctcttcctcctcctcctcttgctcctcccgggcggggaaacccagccccgcgctcgtctttggggccaccggtcgcccccgcctccgggacctgcggggagggcccgcgagagatggagacgagagatctggacttctgaacatctaccggaaaagataaaatgtgcaagcccttcagaacgctggggaggttgggctgaactgcagtgggagaggagaagagatgctggcgtgaagggctggggcagaagatcaggggaaaattgcggatgatctgaatgatagcagtgaccaccagcaacctacagagctgcccaaccaggaaattgtcagatggaagcaacgctt

SEQ ID NO: 1159 - DNA, 295 bp, Homo sapiens
acaatgtctcttctccattaagaaaacctacttcaacatctccattggttctcaacatagaggaggaaaataatcatatttcatcacagtatttaagtaaggatcaaagactctaagataactgaaagcactaaattaattttcttcaccaagatcacaggaaaaacagaaactacaaggagaaatggaaaaagctggaccttccctatggacatggggaaaagtggctatctggaagtcaagggaaaagagagatttttctttataaaataaaagaaatgcctgaaccaccaaa

SEQ ID NO: 1160 - DNA, 476 bp, Homo sapiens
acttgcaaactaaggggaatgagcttccttctgaatgtttatgaaggagaggccactgtgaggatagacagtgaagtgcaactacagcccgcaaatgaaaatgaataatattaatccagcccctcaaggcagtcatctgtcttagagctattggaatcctggatcattgtgggaaatgaaagatacttcgatggaatcagcagccattgatccaatgccaactccaagactggaacgtcgcaatgatagttccaaggcggaaatttgacgtaattcttttcgacacagttttacaggtctggatgcccattttaattcttctgaaagcatgcctcctccttctggcttcaggactccatctccagcctcttgatctaaaaataatccccaaaccaaaaaattagatactatttcctcaaaattaggtattttaatcaaaacatcttaacataaatacattattatcacccaatatg

SEQ ID NO: 1161 - DNA, 612 bp, Homo sapiens
ttggaaaatggcatggaaataatccagcttgaacatcgtcctcctcacctcctggactagggcgagggccccttatatttcttcatggcaattgtgtcacagttcaaacgctcgtaccctgactccatctgggatttggaatgcactcagggaagtggctgtgcatggagactagaaatggaagaggcttccaaggtcatgcctttcaggctcccttcaaattctacagctactgtgaagagagttgcattcccacagagaacatgtcagactggaggaaaattgtgacaaaaggtctccccaaagatcgaggaaaggaggtttgcctgaaaaggagccagagtggttccgcccagactgacgtgcttctggcagccggtgtgtactgcttggtgactgctctttcatttcaggtggtgatttaccaaatgccgctttttttctgtatgacacaggcgtggccaaacatagtcaccactcagaatgttggggaagtttctcgtccccatcaaacagagggagcaacccttggtggttcaacaatgaagcctccattagctgagaagtctaactgtgatttatcattccctacctataaagattgtaaacaaa

SEQ ID NO: 1162 - DNA, 537 bp, Homo sapiens
acggggcagagggactatgttgtgagcctgcgaaagaagtttgtgtggggactgtgggcagtgaacgcgttgggaacaatatggaaaactgggagccgccttggaatctacagggccgggctgaagaaaagaagaatggtattcacgcagttcccattttacagatgaaaacaagaggactttttctgtgaagtcaagaaagtggttacaatggtactttcagcctgtccgaattatgtattgcccctcccctttttattaataacattgaagtgtgatgggacaaccactgaagccgtcagttgaaacctgctgggactttttagccattctcttcaacataaagaatgggtgtttttggagggggtgagaggaatggggaaatgttgtcaaagagtacaatgttttagttgagacaggaagaatatattttgttgagatctacagcacagcatggtgactgtagttaacaatgaagtattgtgtatttccaaattgctaagacaataaatttcaaatgttctcaccacaaaaaag

SEQ ID NO: 1163 - DNA, 323 bp, Homo sapiens
agttgtctcccaggtggatggaaagaggacattttgctttgcaagggtctctcttcaaaaggttcaaatttcgtgcagcttctggaaattctccatcttgatcatcgtaccgtggagctgtgccaccatctccgtgatctctgccaaagcggctgtgaaggaaagacatacacagtctgcagcgggaaaggcaggcaggggtcttcccctagcagctgtcagctcaacgctgcagggaaatcactccagtccctgcacagtattcaaaggtgtcttttgagcaaaaacagtgctatttctctataataaaaattgatggtgta

SEQ ID NO: 1164 - DNA, 1492 bp, Homo sapiens
acacagctgtgtgggccaagggggctggtgtatctccacatgcaagcacgtagataccgaggaacctggccagccctgcagcctgactcgggatggctgcctctatgccctctgcgtctgactttctcctttgagataaaggtgttttggcccaagctgagtgcattgctgggcagcggccatgccgaaggtggtagctgaagggacccttgatcgaaagacgctctgccatgctttctgagtcctgtctcctccaagcttgtctcctagactgtttcccctgtctgttttcctgcgcccttgtgtttggccatttttgcattaggctgtgtctctgtacccaaggccacgtgacaaggtagttggaacccccactcaagtggtgagtgaagagcgtcgtggtaataataatagtagtaacacaacttccaaatttctcagtggagagtgtcacgtcctgggggtatcaagatctgtgaggcctttccaagccctcaccattccctctttggtcccacgttgggtgggcagctgggaaggtcctagttgattttaatctccggtgctttccccagaactgctgctctgaataaaccaaagctgtgaaagagtgttctgcgcaggctgcgggcccagcctctgggtgcaggccctgggcacttgagctgagcagctcagctggctctgctgtgagggaaagccgtgaacttaactgtgctgagagctgggtgagggcaaaatggggaagactgaagaagaaggagcaggtgggagagaccagccgctaacatggtgtctacttctccgtggatcagagaagggatgagtagcaaatgcagaggcagggtggtctcccagcaacaaggatgtccagagttctcctgaccctgtctgcacccacttccatgcaaggcagaggcatcacagttttccatcccaggccacccttcactcttccaagtgtcaggcctctttaaatctgcatccctttgggttagaagcaagagaggtggcaaagtctccctggcactgagagcctgtcccaccatgccactcggcatgagatggtggaggaagaagccaagagcagggatgccttcctgtccccgtggcctctcaggactccacaagatgctgtggaccaagatgagagatttcaggatggggccactggccttcctaggttgggctctgggtcctttcaataaactgttcctttcctgattcttactcccttctggtccttccactcccttccctctgccaggtatggaaaaggtggctgggctcggtgtgcgctccaaccccggtagcattagctgagtcacgcggcgagcacacaacagatttgtagcagctcatctgccatataaaccgcttggctgatggagtcctcattgagttttttcattatcgtgtaaagtggaatcatgtcattcacctttactataaacaaggctgtgagaacataataaacagaacctgaacaagc

SEQ ID NO: 1165 - DNA, 318 bp, Homo sapiens
aagccagacgagctgtaaaacatgaacggaagagtggattatttggtcactgaggaagagatcaatcttaccagagggccctcagttgctgattgttggaggttcttttggtcttcgtgagttttctcaaatccgatatgatgctgtgaagagtaaaatggatcctgagcttgaaaaaaaactgaaagagaataaaatatctttagagtcggaatatgagaaaatcaaagactccaagtttgatgactggaagaatattcgaggacccaggccttgggaagatcctgacctcctccaaggaagaaatccagaaagcct

SEQ ID NO: 1166 - DNA, 1101 bp, Homo sapiens
gcatgatgtcacctgcctgtgataccaactgtattttgggcacggttgggtagatgagctgtgtcctcggccctgaccagcgctgactcagtgtttctgttgctcctcattgtatgaaaggagaggaagaggccagcagtgcccttgaacccactgctggtttgccagtcatggtgggttgggatgcacacctgtgattccggtctccactttgaccctgtgtttgtgctttctgctttcatcactgtatgatgaagcagctaggagcacaggaatttctcttaacgtctaactttataccacatgctgacagttagtgcctaaagtacagtgcgtgtattatttttaccctcttcacagcccgtcgtgtccccagcaggagagaccgtggagggaccagggacaggcgcttaggcctgtgactgatcctctggattctgaaaccagagcagccaccctttttgctgacattaacctggagagtgatcaaagcacaagaaaggggataacttaaaactattggtatttacttagttggaacattattttacttatttatttttttggcgatagaatcttattctgtttgccaggctggagtacagtggcacaaccatagttcactgcagcctctatcccctggcacaagtgatcctcctgtctcagcctcccaagtagctaggaccacaggcacacaccaccatgcctagctaatttctttttttttttttgtagtcatggcgtcttgctatgctgcttaggctggtcttgaacagcctcaagccctcctcctgcctcagcctcccaaagccgaggattacaggattataggcatgagccagcaagcccagtctagaacattctttatccttcctgttttcctcagatactttcactctttttttaaactttatttattttttatagagacagggtctcactatgttgcccaggctggtctctaactcctgggctcaagtgatcctcccaccttggcctcccaaagtgctggaattacagcgatgatattttcactctaaaaagatagaaagtatattgaccagcctggccaacatggcgaaaccccgtctctactaaaaa

SEQ ID NO: 1167 - DNA, 4226 bp, Homo sapiens
actgaggaagaatataagttagcctcgtagtgaccatgtggaagtcctgacctcgcttgcagacttgacctctggatgtgacaaggtgaggttctgtgttcactgatacatccccttccttcaccgggctcatgaaaagaaatgctgaatcagcaaatagagtgaacgaacaatcaagatgagatggctgctgttgatgtgattctctaggttactacctttcttcctgctgcaaatgctgcatgacactaagcttacaggatctagaagcagactacaaaaaaagaagaaattcactctgaagactgaagaaacactaggctgatcttaagtttccgaaatacactctgtaacactacactgattctttgaatctcttgcaaaaagaatcaaaccaggacaaagttcaacagataactggtcaaatgcttaggaatgtctatgtccaccaagaatatggaaccattaatgccatgcttcaggtaaacttgttacaaaatttagtcttcgataaattagtctctgcaaatgatttaccattgctctacattagtaagctgaatgtttcactaacaaataagaaaataaaatatttcatgtttttacagctaacaacttagtaatacctactcagagtacatacttctttatgtacccatatgaacatacaatgctatggaatgtaaagaagtatgtatttttggtaggcaataaaccaccaagggagaattaaactgagctaaaagaagctcttgcttctttctacgtgaatgaccgtcatatggtaaattaacctagtcatgaacagatgacctttggcaatactaacaccaaaaaaaaaaggttatctactactgatagatagaaactatccctaaggtttttatttcatgaaggaaaagaagatccagtgaagtagatttcaattatcatgaaactccttttaaatcatctaagtttaaaacagacatcttacatttttaaattaggcactctcattattaaaatttgactgcaaaagggaaaatagtattactagcacaaaagaatgaggaatacacatgacctattttctgtctccacaatttaatcttaagtatatctcattagtagggctcactgatttgtacagaaaaataagatactaagagctggcttcattcacataataagctatttcttctcattttgataaatgtataattaatattagaggaatttctgaccaaaagttttgttgttttaaaaaggctttcttttttgacagctacaaacatagtggcccttgtccttccttctcaagtttatcagggtcttaacccaaatctctactttaaatgtgaagttaaaacttaaaattaattaaaatgtaagatttaagcatgaaaaatgacaaaattctggtccacagctgtaagtcagcagggtatattggtaacagactaccaaatatttaaaagaaattaatttatctgtattatcttcgaatttgctttctccaaagagggcatgtaaaatgaaagcactatagtcaagaaccaatttatacagatcgaagaactgtttttattgtactatgcaattacaattcaatttctctaaacttgatcaatccattgtttagaaatatcaaaatacttttatttcacacagtttgtatattatttataaaaaattccaaataatgctcttagcaaaatttataagcagtacctgttttaagctactaatgacaaagttagaaaataagagtaatattcacatattctaaccatttcttactaaaagtattatttcaactgaaatatttacacatgtataaaagcataatattttaaattttttgtatcagaaattgaatggaaatgactaagtttaactatagttcattttctgtttaataagactagttaatacaaagatgattttcattttatcagattataaagaatgagaatgacttacacatggcatcatatgtgttactgcatgtttactggaaattataaaaggcacataattttaaaattctacactttcaaagaaattagttcaaagcttaactcacataagcatagcccttctgatcatccacaaaacagaatggcaatgattcatgttctatttggtaagtttacctgtataggtcctaaataccaagaactcaaaatatatacctcaaaagtagaggttcttctataaaaatactcaaagcttattactctacttgtgttttataataaacagttatattggtcattctataggtatacaagttgtttaataatccttctcaaacatcctagcaactaagactctctttgctataatattaagactatataaataatccttagaaaataaaatgacaggctattcatttttaaaagtaaaattatatgctgattctggtgcttgcgagtttaacttatctaagagtattttcaatcactctaaaatgtcacatctatcacttagatcagctgttcatttttaactgagtacatattaaactctgggcatctgctgacactggtataactcaaacatttcaactgtctccctgacagggataacagatgctgacattatcaaatgctgtactatttttttcccatggcctctccttgccccgatatggccagtatatgaaactgaactgccatccaaaaacacacttgagcaactggatctgctaaacagctcccatataactagtaaaaatagaagccagtattattgctatcttcagcacttaagtttaggcagtttaacacctgtttcacttctactagaaaaaatgatgaaaaagaattgtagttaatttcaccagcagtatgatacttaccaaccaacagacgcagaatatacttagtgtaagagtcatttgcatactgcctgaattagcgttgacctctcagtttaaaatagtaactgtaaagaatatttctctactctatatttctctgagagcacttaactttataggcaaattataatttatcaaacttttattttatgcaagaagacacccctctcaagacattgaaatcaacagtaaaaccacattataacaaaaatttactctgatttttcaagtattatccacacaatagattttaatacttgtatccatggattgtaactaaccaccatgtattactaaggcgataatgagaagtaacttggcaatctgtacccaaaatgacaaagaacttagtcaaggaaatagacctttaaaagggttaaattactaagctatgattagtaacaccacgtaagcaaaaacaaagaaaaactggcatgcatggtagttcctttcgacacaagtccaagcaatacactgaatacacatgtgatctatttataaatcaaagggcagaggtactttcttaaggccactgatattcctacacccatcaacaatttgctattagccctcaactataatgctaaaagaagcagtggcagtagaagggggtgactaactgaactcttccccaaccttttagcttaactatttatctggtttgctgcctagagataaatggaaaacattactctaaaatacatcaaggtctatttgttcctttaaatactattggttttgaaatagcttattgtctacatgtaagaattaagcaaagacttcggctgtggacaagattagaaaaagaaaaagaagcaaagatgttgaaaacaaagacgtacattgatcattccttaatgcagtaatgtgttaaaaggaaaagatttttaaaccattaagcgcaggaaaacagtaggaaagtgacttcaaaatggaaaatttgacattcagtgactgaagcattggtatgataatttctaacacttgtagaaggtccatgactgtaattttaccaatgaaaagcatttaactgttttggattccaaactagcagcactacaatgctttgctagagctggtaaaatggaaccaaatcgcctcttcaatggatttggtccccttcaaccagctgtagctatgcattgattactacgggacaaccaacgttttcatttgtgaatatcaattacttgccaactaatttcaacttatttacattatgcagactgtgattataatcaaataacttgttactgttaattctacctggaaaagctagaatggttaaagatgtttataaaaagctttatgaaaaatgtatggatgacttaaggatttcaaataaaaattttactta

SEQ ID NO: 1168 - DNA, 5334 bp, Homo sapiens
agacaactgagaggaaggaggtaccacgggcactctctcgcgagagggccgcagagccgcctttgacgggggcgtgtacctggagagcaacggtaaggacggagccgacggctccggcgtcgggtcggttccggcatcgacgtatcgtttggtcgccccagagaggagacaggtttcttcagcttgccgctgaggatgtggcatcggctgcgctcaccgccgccgcctctgtgaactgcgggagttgggacagcggccagggctagatgggtgggacgcgagtcctcgccgaaagcttgccctgtgcggggcgcacttggaggcgagctctgggccgtggcgagttttgcagcctaaggtcttggcaggcgcattgctgtgggctgccggagagcaggctggagttcgagaccgcccaccggagagcaggcgagagttcgaggcctaggtacagcgcatttcgctaggcatccccaagaatatccgcgtgatccttgtggccagagtttgttgagctaatatccccagcccaaacagtagagcacatcacatgtcggccacctgggagcgttgaacctggtagttactaggcgcccctggtggaaataaaactcattatgccctagttatgtcttagtgcctgggtgacgatgatgtagcggttaaagattaactgagcgcacttagaggttgtctttgtctacctaaggaaaatatcaatagattaaacccccaaccttaaagaatctccgtgaatttttctgaggaaacgtgcaatattgtcatacaaaaggccccaaatatgcaaacattgctttttgttaaaagtttgttttgttttgcagtgacatctgtttgagcagatgaatatgccattgggaaagtcaaggactgtcggagaggaggacatggcagaccttaactaaagtgagggggacagtagagcactaaaagttctaggaaaggagatgaactgcttattccatcagatgaaaatatagtcagaacagatgagtagtagaacttaaacatgcccggagttgccaggaatttgcaaaagccttgatataattcctgttgctgtagaaagactttctacagtcactaatatatcaagttatgttcactagaaaaaaagtttacttagtttatagaaatgggctgaaaaatcctaattacttatctgtgaggttattttcatgaaggttaatcatccagaaactattagagagcctcggaatatatttcttctaatctgctctacctatcccattcaaaggagggaatctgaagatttaaggacaaagagcagttgaaaactcagagctgtggttaatgggagaatttcaaggatggtgaaaaaaactaacatcattgcatccctgttttttgtattctggactttttagtttagctcttggtaaactacatcagaaattctttatgctaactctaacacacattttggggtattgctaatttaatctttgaatactgtttttgctgtttcatgattatatgttatgtcctaccagctagattgccaactcttgactactgactggaagtttattgtttattcagcaaataatgaattaagtcagtgaagtgagagatttcgtgtgtaaggattgttaacttgaacatttcaccagttacacacagttcagccctacttaaattttaaaaatcattgttggcacttgacattgttatgaggagttttgtattttcaacttgtattttgagagtgtcctcatgtgactgaagtatgtgctactcttcttaattgaataaccccagaatctccagaattgataattggaggaaattctactgttggaaagaatggatggattatacagccctgttttttgactgttcattttgtccttggagtcactaccacttggcctcaaagtgtgaacatgtaaccctttccttaatactttgctacacagctgagcagaaactgtaaatttggatcctttgtcagtacaacttaaaatggaacaatttcaatggcttagggtaagataagtatgtaaagatacttttgtaatagaagaaaaaacattggatattaaaatcacacagtagtacctgggtgtggtggctcatgcctataatcccaacgctttgggaggccaagacaggagcactgctggaggccaggaatttgagaccagcctggccaacatggtgaaacctcgtctctaccaaaaaatacaaaaatcagccaggtgtggtggcacatgcctgtaatcccggatactcgggaggctgaggtgggagaatcgcttgaaccagggaggtggaggttgcagtgagctgaaatcgcaaaactgcactccaacctgggcaacagagtgagacctcctgtctccaaaaaaaaaaaaaaaaaaaaaaaaaagtgggtgtggttgtgtacacctctacttcctgctactcaggaggctgaggctggaggatctcttgagcccaggagttcaagtctgcagtgagctatagttgcactgctgcactccagcctgggtagcacagcgagacccccatctctaaaacataaaagtaaacaggctgggtgcagtggcttacacctgtaatcccagcactttgggaggccgaggagggtggatcatgaggtcaagagttgagaccagcctggccaacgtggcgaaaccccatctgtactaaaaatacaaaaattagccagtcgtggtgccaggtgcctttaatcccagctattcaggaggctgagacaggagaatcgcttgaacctgggagacagaggttgcagtgagccaagatcatgccattgcacttcagcctcggggacaagaacaagactgtgtctcaaaaaaaaaaaaaaaagtagaaaacagaatagcataaggataatcttatatacaaaataagactactcaatttctgaattttttttttaactagatatgccacctcctgatgacagtgcccatttcgtaacttgtcttactcagaaacagctcttagataattttactctttaagttcaggtctgagcacagaggacaaagaattcccttgattgcctatgaaagaaaggattctcaaccttggcactattgacattttaagtcagataattctttgttgtggaaggttatcctgtgcattgtaggatgtttattttatcagcatccctggcttctacccagtaaatcccagtagcaccccaccaccaaccaaaactgtctcaaaatgttgctagatgccccttggggacaaaaatcctctccctccctcctccttgaatgccactggcactccttgagcctacagaagggctcttctcacaagtttgataccctgtacctcccagttgatagtgggaattacttctcctttgaagacacaattccagttaccctgagaagtatggcattggccttgctggcctccaccaaattactatatcactgtgtttggtaaccccagacatcatactagggctttaatttcagtatataaatagtaaattagtatccttgtataggttagcttaatgagtttcagaattcttcaagtcatatcttcataggtaggatcactgtggagttaatggcatttgaactatgtactcagtactatgctagtggttggtgcaaggggaagatacaaaataaggtgtgattttagcccatgaggaatttatactttatctgcagaagcaaattaatatggaaccgttagtgaacacctggataaaacagaatgctaaattttaccctagaggtgcttggcctggacttcaagaattctaagtgaattgaagtatgttcacagtaagaaaggttaaaaatggctctgcccacttgtaggcagatgggaagctaggatggcagacttgccaatatttgatatatgtaaaaagtgcaatcatggcctctgttgtttcctcttttatctcgttctctttattagtccaggttctctagaggaatagaactaataggagatatatatatatatatatatggagtttattaagtagtattaactcacatgatcacaaggtcccagaataggccatatgcaagctgaggagaaaggaaggcagtcgagtttcaaagctgaagaacatggagtccaatgtttgaggacgggaagcatccaacatgggagaaagctgtaggctgggaggctaagccagtctagtcttttcatgtttttctgcctgctttatattctggtcgtgctggcagctgattagatggtgcccgcccagattaagggtgggtctgcctttcccagcccactaactcaaatgttaatctcctttggtaacactctcacagacacattcaggatcgatactttgcatcctttaatccaatcaagttgactgtattaaccatcacaagtccaccacttgtcaacttaaacacatacatatctcctgagatcattcataatcttcaaataaagacaataataatgtcataattacacctaatacaactatcctttgtacagctggaaacacaccagtccccaacccaaatgctattacataaagttaacaatacttaaatgctgatatgaagtaaatcttaatgtcccatgataaaaggaggctgggcgcagtggctcacgcctgtaatcccagcactttgggaggccgagatgagtaatggcttttgacagtaatagagggtctcaacctgatttttcttaagtttgcataaggcttaggagaggataaaataaggcaggatctagagattggtgaggagaaacggaagtcctcattcttgacagctctcagcacatgcagccctccccacacacacagtcacactcacacacactcacaaccagattcacattcctacccatgcacacactaacacacacttgtgcacttaaactcgtgcacttacacattcacattcatatactcacatgcacacattcaaaacacacacatactctacaaacactcatgttgcaaaaggggatttgtaagctgaatgtttagaactcagaacacatattttcacaaaaataatattatggtcgggcgctgtggctcacgcctgtaatcctagcactttgggaggctcagctgggcggatcacttgagatcaggagttcaggaccagcctggccaacatactaaaaatacagaaattagccaggcatggtggtgcatgcctgtaatcccagctactcgggaggctgaggcaggagaatcacttgaacccaggaggcaaaggttgcagtgagccgagatcctgccactgcactccagactgggcaacaagagcaaggctccatctcaaaaaaaaa

SEQ ID NO: 1169 - DNA, 4722 bp, Homo sapiens
ctcatgcttccataatagttctgggataattctaaacacaagccatttttctaaggagagtccacattagagaggtctttgttttgtattcaagatgattaaaattatgaactgggaagttagtccctggggtgtcctggctggcctttggaaatcttcactacatctttctgggttggaattctcaccacagcctgaacgtggggctgtatctgagctgtctctgagtgctgtccatttgatatatcgagtactgggtgtttaccagggctcttcaagccactgggagaaacagctaaagagtaacctactgatttgagatgtggatttgtgccccatccctttctccttgtttcccacaggagttttatctcaaactcctaagccatttttaaggagatcactggaacaaactccaaacctaccctctaatagtcaagtttacctgaattttctcagttctctcgggagaagactaatcacacattgtagtaccaacttggactcttcatgtgcttttcttaactgattagagttaacacctcagctaaagtgtatagaacatacatggggcttcatcaggcttcagaatcagtttcactagatgtgctatgtaggaggccacggaaaaattactgtagtagtaaaagttatcagttctgatgtaaacaatcattttgtcccatattataaataaattggcctgaaaatatcttttcatatgtgaggaataagtatatgatgcctttctcctttaaagtatgaactgctaaaagacagggataacgtgtattctgtattccagcagccacagtgtgtttctggtctttgtaccaggtgctcaggaagtgttttcactggcttgggttgactacttgccatctgctctctgagcattcatttctgaatgaaaggggagaaagtgaaaggagaggtgggaagaaagaggaagctgcagaaatacgaggaaacagctggaggagggaggtgaagttgaggaggtaaggtcagtaaaacaaaaagctagcagagggcagggtcaggcccttggggtagagggctaattaacttctgtcagctagttgaatagagccttgtgtgctttgttagagaccaaaggtacttcaaaggaaaaaaatctagattcttccctgtgtaccttaataattgttcatcaggtcaaaatctatcctgtcctctaggaattctggtcttccctcaggcctagcagagagctttctgccactactcaggcaaccaagggtgaagtgcttcaagtagtatttgtggacagcagcaggtaagcttgatgtgttattcacagcttaaagagtagatgctgagtacagctgttgtccatgtgtagagcttttaataaccagcgcagcaggccccttcacctgcttttatgcctggaccagatgactgaatgtagaactttaggcacttttttttttttttgagacggagtctcggtttgttgcccaggctggagtgcagtggcgcaatctcggctcactgcaagctctgccccccgggttcacgccattctcttgcctcagcctcccaagtagctgggactacagactcccaccaccatgcccggctaatttttatattttttagtagagacagggtttcaccgtgttagccaggatggtctcaatctcctgacctggtgatccacctgccttggcctcccaaagtgctgggattacaggtgtgagccaccagatcggccctttaggcactttctacttctcaaggtcaagaaacatcctttaaaaagttaattcccttttctggagcctaagccagatcttatctaggccttgtgttgccatctgttagcattgatttctggaatggagcagctttctcaaagtttggtcttgctagtcatgaggtcatgtcagtgtcttaggtcactgctgctcaccttccttacccagggagtatactgcataggtttctgaacacctgttttcattattcactgttcctctcactgccaagaatggagggaccctcagttgaagatcaaattgactctgaagaaaaactggagatgtttctcttggagtttggatagagtattcacttgataacatgtttttcccctgccttgctcttcacaagaacatctggccaggcattaacaattagtaaatttttttgcatatgaacagtatttttctggtcatgtagatgggtgcacatgacactaaacagcattgtttagtgttatccctcttaactggtgggttgtatttggggtggaggctgtagccgaggagaagacattcacctctgtactcgagaaactttgtgtaggaatttagtttatttttttattttttttaattttttattttttactacttttactgttagcacaatgctataattgagctaatctttgtagtttggtgcaggaccaccaagtttgtgtgacccattacctactttttccatgctcagccattaccctgtcctggggcatctgagggcagtaaggaacaggtgtccaaaggaggaatgttggtgcctatgagtatgttttccagttgtattgaatttcttacttggtgtatttttgacttgtcttagtttctttccttgtggtctatgctattttacttgcgatttgttggatattctccctgtcattaaagagttgtaaaatggaagttagtttctctatgcaaatgctttaatggatgaagctgataggtttagcattgatttttgctggtgtccttcaacaagcatgaaggtgataaatgtgtttccatggctttagactcatttttgaagtcttggattgtgtgaacattcttagaaacaataaaatgttttaattaaaagccctcgactaccagctgaattcagtgtctactaggaaaatgggtagatttgttacattgtccctttgctctctatgactttgttccagttgtcaaggaacttaaatgggtattcaggaaaaagaattcttgtttccctttcctcaccttgccagttaaataactcctggtgacacttcaggtggtagaattgaaacacaaacctgacttctgaccacatgggtcaaaggcaaaaggcaaatggcttcaaagcccttagtgtgcttatccagttcaggcagtgaggagataacctctgctttcctccctgaggagtttggagtatttaaggggggatggggggggtgtcactttgaaaatatgttgctttttctcctgattgtattgaggctgatatggaagggttatttctttctggccaatactttttggtatttctaaatattgcaatcttgatttttactattaaatttgttaattgtcagttctggcttttttgcataaagagttggtccattaacttgccaatttgaagcttctaactagatattccctactgaaagttttggatttgtttttagtttgtggagcagtcttagctggggacaggtaattgacaacggcagagatactttcttttcctaggattctaagtctgtaatccacatcctcaatgtattcacaggactttaaaattctctccaaatgaggaaggaaatatcctgttgctttctaatgtttactaaaagttgtgtttagaacaacagattttaataggcatcttcctttgttatgtgtcattagccctttgcccgtttaccttagggctctttgaaggagaaatggatgggagaaaacctgtcacttggcgaaagtaaaagggataattaactggctcagagcttatgtgcagagttccaagccccaaagttaatctagaaccactcgataacaccaataaaaatatttatttcacatctgttatatatctggaaaatgttctaagcatcttacacatatttctcattaaatccacaggtgaccattgtgaggtagatattttgttctaattttccagatgaggaagctgagaccctaaaaggctgaccggttccctgatgtgttacctgcttctgctactgatccaaactgcagaacttctcattcatccccaaggcctccaggcagtatccaatggggaatcagctctaaaaggaaccagaccaacgttttccagccccttcattctggtgactgaggggaggaaagaatgggagggggtattcttgtctagtggatggaaaggaaacacactgtcaaattactatatctccttggttttctattacagtagaattctccagccatatttttattgtctatgggggaagttggagatggtgaccttgattagaagtgtctggagggggataaatggaggggataagattcagttggttttggaaaatgttaaagtcttaaaataatgcgtccatctgaagaattttttctaaaaccagagtttataaaaatatcactgatacagcctgccccctcatttccctgccacaggagatgtcttggactagagacacttgtttaataatagcttgtctctgatattcccagtagcttccctctgtgtgaggaaaggatagaaatgttcaggacatcatcatacaggctcctcatctacaaagttccagtagcagtgacgcctacacggaagacttggaactgcaaacaggctggggtcacctcagtgacatctgacgctgtccaaccagaagttcgatttttgttctgggggtgaaggaggaaacagactgtactaaaggactaaaataatttgtct

SEQ ID NO: 1170 - DNA, 2067 bp, Homo sapiens
ccgtaggagcgaagtcgaatggcgcccccagcggcttggggtgggatctcagtgcctcattcctggcggccccgggagggcgatgccaagtttcgctcttgttccctgggctgcagtgcagtggcaccatctcggctcaccgcaacctccgcctcccaagttcaagcgattctcctgcctcagcctccccagtatctgggattacaggtatgcgccaccacgcccggctaattttgtatttttagtagagacggggtttctccatgttggtcaggctggtcttgaactcccgacctcaggtgattctcccgcctcggcctcccaaagtactgggattacaggcgtgagccactgcgcctggcctactaatactaggttttattccgggcccttcacagttaatgttggaggcctctggaggatggccacacctgggctatttgcagaagcctggacagcacagcaggcagagttaaagcagttaaggcagtatcagctgaagggccacccagctgtgcgtgtgcccaggctccaagaataaggaggttggggggcagtcctaagaaaggaagtcattacctatcggcaacccaggagcagacgctggcataacggcgcacacacagtaaaggtcagaggttcttcttagaatagtccttaggtgttagtcaaacccatgccctgccccaaggagttcattcattcattcactcattcattcactcactcactcactggttctgtttattcactcatttctctatcacatatccatttattgtcattcacccacttatttactcatacattcattcatttgctcatcaatttatttggtacctacatggagccaggtacaggtcttgattaaagagatctggggaggagtgctcccaagaagttcagagcctcactggtgaaggaaagccatgtaaagacagatcttgagaacccaagatcatcaaggagtatccatgatcaagcagagcagggaaggctttttgctttgttttgttttgtttttaacatgctgtgtggttcagtaaaattaaaacaggcacaatgatatcctggatgacaagagctggaggctgtcattctaacaatgtagtgagactggctgtcttgtctcatgcccacccctggaaacatgcgcaggaactcaaagcacctagcacagaggaagtgtctggttgttttaaaggaaaaacaaaaccaaaaaaagcacctcctgctctgaccacccctatttccagttttcccttttggcacagcaaagatgaccttgggactgaggtggaaccatgtaattcttcgtaatcccagagtcaggcagacctgggtatgaattccatctttactaactgtgtgactcactgtgtggccatgccaagttacgaggtctctctgtttcctccttcctaaaaaggagataacatccatctcgaaggaagatctggcctgaagagcagtcactcttgcctggcatgcagagaatgccaaatcatattaatgactggccagaatgaagtgcgtgacctcatcactccataactgacaggaaacaactgctagggcaagaaaaaagggtctccagtgagtattcttgtccacacacatccccactcacgttcctggaccactgcatctaactgccgcagcagctaatgaaccttctggaataaaggaccagtttcttaagaagggattgagacctccagtggcctcccacattgtttccggcaagaatttaaaaattatttgtaacatatagtaataaaaactaaccacaggctgggcgcagtggctcacgcctgtaatcccagcactttgggaggctgaggcaggtggatcacctgaggtcaggagttcgagaccagcctgaccaatatggtgaaaccctgtttctcctaaaaatacaaaaattagctgggcatggtggtgggcgcctgtaatctcagctactcaggaggctgaaacaggagaactgcttgaatctgggaggtagatgttgcagtgagccgatatcgcgccattgcactccagcctgggcaatgactccgtctc

SEQ ID NO: 1171 - DNA, 898 bp, Homo sapiens
gggagacatggttcatttcatagcatatgggaaaggctgagggaagagcaggtttaggagatgagtacaagagctcagggcctctgatctggacatgatcttcatcagatcacactccagctatgacagtgattgtccaagctccattccctgtctctcctcccagactaggacatcttcttcttctgggttcccacatcattctaggttccagtggcacttttcttacttgatgcaaggatgtgggatttgggaacatggtttcatctctccaaccacaataccagcaactttcaggcaactgtctgatgccacacagcaaatctgccccagggcagagggggcagtaggtaggcagtaactgggagcacaggcagagaggctggcatgaagaaacctgcccatgggaagcagggccaatgccacctaggctgggttcaaggatgtggccaaaaaagcagaacttccgacaaacttggaaaactagtcaggttactgaaacaggaacttaagcttctcagcaaattagacgtaacatataaactggaaaaatcagtgaacttgaagatagagcaacagaaatgatctaaagaaatataaagagagaaaagaaggctgggggacagaacagagcacccaagcattgtgagacaacataaaatggtctaacatatgtatagttgggatctcattaagaaaagagagcagagtagaactatttgaagagataatgaccaagaacttgttaaagaaaggcaacataccacaagtccaagatactcagagaaccttaatcagaatttttaaaaaaatccacctagatgtgtcatgatcaaactgctaaaaaccaaagataaattctgaagacaaccaaggaaaacagaatgccggtgtcccc

SEQ ID NO: 1172 - DNA, 534 bp, Homo sapiens
atatgccattcaagctaaggggtgctacacttgaccgctgcggtagtatagatgagtctgaagaatggtatgggatggatactttcgaatgcactggagtaggggtctccatccgcagggccacagagccggagaggagcagtggctggatctaccatgaaagacttcagagtccaggaagagagactgactgggcaacatgttattcagttacaaaaagacttggactatgactcaaaaatgatcaaataatagttcatgcatcaaatgcaataggaagtacttctggagggtgagagaagcatccagttaagcaagaagaacttttagtaaatacattccttacaaacaaacagaaggcaaataaacactgttgtacaggaacttcaacacacactgtacaatattcccactttgctgatgtcagttatggaaattcttcatggtttacttgactatcgctatcagtattttgcatctctcatcatttttgtcaacttcctcatctgctaacttctctccaagggtcttgct

SEQ ID NO: 1173 - DNA, 7083 bp, Homo sapiens
gatgaggaggtcggcgcggctgtgctgcgggcaggcagcggagagggctcgcggcgagggctccagcttaccccgccgccgcgtcgcgtgcacggagcgcttcagaggtttggagggggccggaacctcaaaagcaactggatgagcacaacgcggacgccccggagaagcggcgcaagcgggcccaaaatggttgctgatcagacgagtggcatctctcgcccccctaccgcgggaattgggacctccagactgtgcctgggggatcggcaagtggttcccctctggttttttcggcgctgccttcccggtggtatcctcactctctctctttgaaatgacctctgctttcctatctctaactcttcccagatatttgaaagcaagtttttgtacaaagcaacatatgaatgtattcagccattcgatcgttcggcgaacatttctaggtgtctcgtgctgtgccagatattgttctgagtgcgctgaagatgcacctgttagcaagacaaagtcctggctcccacggagcttattcgaagcaataggggcccccaagcaggtgcctgagaagtagggaggggtggacagtgggaaaacaacctaacggtggagacacacgaggggtctttttttacttttagaaacgggggtgggtggtcaccctatgttgcctaggctggtctcgaactcctgggcccaagcgatcctcccgactcagcctcccaaagtgctggtattacaggacaccatgcccggcagaggggtcgtttttgttgtttttttagtgtcgtcaggagactccctccatcagaattactcaggctgattgttttgagtcctgggacccagttggtatccagaatcttggcttgtttgcctaggaacctgcattttcacatccccatctccacacccctggtgattcttatgcatataataatgtgaaaagcattgcattgaagaattgctaaagggtgtcagaaaacggattaacaaaatcaggaagctttaattttcaagattctattaacctcaaaattcaacatatccaaaaattgaatgtctttttctccagtgttttctaggagagtgccaacactagccacccaagtgctcaagccagaaacctggaaatgatccattactctttcctctgtctctggagtccccatgttaaattagatgtgtttgtttgtgagacagattctcactctattacctaggctggagggcagtggtgcaatcattgttcactgcagcctcgacctctctgggctcaaggatcctcccacctcagcctccccagtagctgggactacaggtccccaccaccacgcccggctaatttttgtatttttagtagagatgaggtttcatcttgttggcccgggctggtctcgaactcctaggctcaagtgatctgcctgccttaacctcccaaagtgctgggattacagccgtgagccactgcacccagccccaattagatttttaaaactgttgttccctgtcagttcttactctggttcaggctactgtcatctctcctagagacactgcggtagactcctcttggtctccctgccaccgaaattgccctctccaaatccactacagcttgaatggtctttcaagaaagaaaatcatgttttttccctgtttaagactcttaaaaagatctgattaacacgtaggataaagtctaaaattctttgaggtggctacagggccattggtgatctcatccctgttgccatctctgacctcatctgccacagatatttctcaggctacactcaaaactgggaagctctcaggtcatttaagcctggaaattgtgccacctcacaactgttgcaagggctgttccctttgcccataacttcatttctctctacaccatctatgcacttacttgaatcctcacctgaataattcttaccattctttcagatcccaacattaataccatcgcctccaggcagcattttttcatctcccaagattgggtgcattagaccctttgtcatcacacccagtactccccacgtttattgagcgctcacgatgcgtcaggccctagtggaagcctttatgcacattatcttctttctcatttaattatcaagtagagcccacaaggtaggtactaccttttttttaacttttgagacagggtctcactgtatctcccagactggaatacagtggcgcaaacacagctcactgcagtctcatcctgggctcaagcaatcctcccatctcagcctcctgagtagctgggaccacaggcagatgcctgttgcccaggctggtctccaactcctgggctcaagccgttctaccttagcctcctaaagtgcagggattacaggtgtgcaactgtgcccggcctgggtagttactaatattatcccattttacagatgaagaaacaaggacatataggggttacttgcccaaacccagacaataagctagatctgaaagtcatcagcctgacctcagagttgtacttttaaccattatcagggtctcaggccagtacccactgatgaaacacataagtaacttagtgggtcattaccaacatttcattaaagaaatagaaaatggcagagaacatcaaacttagtaaggctcttgtttcgtgaaacttgtcagattctctaatatgataaatactaaatcttacaaacattgaaaatacaaaattaaacaaaatattaccaaggttaacacaaaagtatgaatactgcagatctgatttattttactatcctcatctttaatgcagaaccttcttaggattaaatgacatttaccattctgagcaaactgaggttactgccccaaacggactgggcttacctttgcaggagaacaggggaggctgtgttttggctggagatttttggctaagagtcaagacacagagattcttctgctaccactgtgaacacatcaagtccctttcacatagatgctgtttccacaagggtctccccacacccttccctacagattagattcccgtgatgccttatttaattcttgttggatctgttgatttggttatgaagtaggtgaaattctggtaacctcacccaggttccttcccctcttgattagatccagccagtctgttcgctggatgattaaatttggcattcatttttctgtgctttccctatctgctactatcctaaagtcattctaatgaccaaaaaaggtgccttgagccagactgtagagggttctaatggcctccttagaaattgtgtttttttgttttttttttgagatgaggtttcgctcttgttgcccaggttggagtgcaatggtgcgatcttggctcactgcaacctccgcctcccgggttcaagcgattctcctgcctcagcctctcaaatagctgggactacaggcatgcgccaccacgcccggctaattttgtgtttttagtagagacggggtttcaccatgttgcccaggctggtctcgaacccctgacctcaggtgacccacccacctcggcctcccaaagtgctgggattacaggcctgagccaccatgcctgccaaggaactggttcttagtaggcaatagacagttgacaattttgagctaagcactaaggtcataggagtgtagattcaccagggagtgagttgggcttctggtctctagagggcgctcaaggcttctccctccccaccctcttccttcccccaaggtggaggtaggatggtgaagaaatttcatctccccaccaccaaacacacacaaaggaagaaaatcttactaaaattggagaatatggaataacattttcttgggatggagcccttaaaagataacacgttcaacagaaagtgctgcgtctttcccgttcttcaacatactctgagtggtaacaagggctgcccttgcctttctcagaggcagcccagccagcttgttctctttccctctcccacaaggtagccaggccctaaggctatggcccacagaaaaagtcttagcaaggccccgggcttggggcaaagaggctgtggatttgtctttctctctactttttctggttagtgtgcctctatcccactcggaagaaaagttccaagactcaaatttgggcattgatgtggggaggatagacagagatgaccagaatccagcctatctttcctgacttctgcattgtggttcatacccagctaataataaagtgttcctttccctggtgtgtcattgcacatgtactccccacactcctgatgagtagagatggctggccaagacaggattcagacattcccacatccccaaccaaacatcctctccataccatcttattaatcagtctttgaacaatttcctaaactccctaacaggttggagatggctggaagaaatgaaaagaagaacgccaacaaaggcgataaagaaaaattcaacactgcttgataactgatgagatagtgaaggagtaggagggcaaaagtcagaagtaattccaggtgttcaagaactaaatgctgaagagatgttagtgtcgttgacggtcttctaatgggaagtgaatttcaatagaaagaggatgtgtttggtttcagacagaccgagtgactggtgacaacaggaaagccacgtgtttggagcagattactcggtacagtcagcagctggaatggaagtgaagaaggcccagcagagcatcagacctgagtgcaaactatggtggtgttggtggaatagagggaagggagagatttgagagacattgggaagaaaggttttggtttttgagacagagtcttgccctgtcatccaggctggagtgcagtggcataatcttggcttacagcaaactccacctcccgggttcaagcaattatcatgcctcagccccctaagtagctggaattacaggcaagtgccaccacattcagctaatttttgtatttttagtagagacagggtttcaccatcttagccaggctggtctcaaactcctgacctcaggtgatccacctgcctcggcctcccaaagtgccgggattacaggtgtgagtcaccatgcccagccaccagaagtttaatcaaggctcagagactgattccagtttgagttttctaataactgtctaatacttagctaatagctttggacagttgctctttttaaaatgagatcattcaatcattgcattcatctttgggtatgactcactagtcaacagagtcccccttctgtagaaactgcctcattcacagagatgacctccaccagtcatgcctatatttgagaccctgtctctctttatcccccattgctgcgtgattcaagggtggtcacctgacccaggcagtgccaagtttattctctgtcttgggaatttagaatgtttgtttggctaagagacacagaaactggaagctggagctgatgatggagctgatcacgctaatgatggagctatagagataagatgcatgaacaccaccgaggtccccaagattgccatattcctgcagtgccttctggccacagatagttggtccagaagcaggttcctgactcaacctgggccaattagagcctttcacggagattttgaaatcaaagttgagatctctctttctctctatgccctttggtgtatgtgtacttgagctacaagttacccaactttggaagctgtagacagaggcaattttccactaaatgaagtgagaaacagaaagtccatcattagtgagagaggagcaaggcagatgcacacagagaagcagatagaggggaagcgggcgggagtggggcgggagttcctggagtccccacagtgctctagtttctgattctcttcctaagacccacaggattcctgcctttgggtttcttaagttcctgaatagctcctgattgcctttgtcttttttacgaaagtcctttgagcatggtttcaggtgagcagacagtcctaacctaaagagctgtaacaaatacacgtgggctgtgtgtgagattcggggagaggcaccagggatccagtgtgggtcaggcgtggtgccgccctcaaggaacttagtggggagaaaatgaagtctgtacttcaataactacagtgcaggctaggaagagaacacccttagagatgtgcaaatcaagctctttgggagtttagaggaggcctaggactgctaaggaaaggctgggactaggaagaggtaagcaagtcactgaggaggcaaaatttaagaagccacccactctcagggtgtgtgaatgcagcgttggcacttgcatgaccctgagaatgagcaaccccttaaatgtatcttaggcaccttgccagactcacttttagcttgctggactaattgtggggatcagtaggccttcagaggaaagttagtgtctgagctgaactgaaggatggggtggttttggacttggtggcaatgtcatctacctcaaggtaaagtaacaatatggaaaacgctcccgtgaaaattcacaaggtctgttctaggatcatcaggctcttcggtgtgacttaagagttcagagcatgaaggaggagggggcagtaagaaaaatggagagaacgtagcatcagattctgcaggcaaggagaaaattgctaagctgggaaataacataatcagagcggtacttaagatgaatctaacggaatagcatgaaataaaggaaaggctaaggagaggacaaacaggaggctattgtggcaatccaggcgtgaaagtctaaactaatcagcactgggaatagagatgccataggaaaaataatacatcattaatataacttggcaattgagtagatgttggagacaagagagaaatcagaaacactgctaaacactatgcagctataacaaagaatgagagagcattcagtaagatcacatccaagatatgtacatgaaaaacacaagggatagaactgtgtatatggcaagctatcacttgcattttttattttttaaatggtatttatttatttcttgttttttcctttttttaagactaaaaaatcaattataaaatcctcaa

SEQ ID NO: 1174 - DNA, 199 bp, Homo sapiens
gcgcaggcgcccagaggcgcacaggagacctcaggcccagactccactccccagctgtgaaaggactgctggccagacccccaagctagcccgccaggcctccatagagctgcccagcatggctgcatccagtaccaagagttggtgggagacgggtgaggtacaggctcagtctgcggccaagactccgtcctgcaag

SEQ ID NO: 1175 - DNA, 237 bp, Homo sapiens
aaggagaagcagaaatgagaaggttggagaaatccgaagaggcagctagggagagtgggagttctgggggctgagaagtccaagatcaaggtgctgccaatttggttcctggtgaatgagcaaacagcacagaaaaagaaacagcagtatatgtggaagaaagcaagaaaaatcaactggcctggaacctaagacttgtccaaagatgtcacagagagtaaaatgagaaaaatccag

SEQ ID NO: 1176 - DNA, 453 bp, Homo sapiens
gcgctggtgaagcggctcatcaggtctatcaggaaacctgagaattggagtgagaatcccagtgtggaaaatcaggaaagaggctggtatgagcgacagagaagtcattcaggaaagaggttattgaattcattggagaatgaatgctgttctgaatttgtatcttaagggaaatactacaaaatgtcgcagaaggtgctggatggatatctaaagttcaaaaaggaagagaaccacacgagctggagattcaggaagcatcagtagaagtcaatggccattaataaaaacattttttattaaaatattgaatctgaatagaaacctcctgtacttcatttcttaaatcccttgagggtagtaactgcatcttctccattgatatagcccctgccaagcacagtgcctgaaggcaggtccacagacattggctgaataaacgagtgctctgtt

SEQ ID NO: 1177 - DNA, 768 bp, Homo sapiens
cgtctcggccgcggagaaggcgagcagcgagccctctttggccaggaagcctttgccgtcctccgcgtcagcctgcagcgcctccgccttgtcgaagttaccgccgccgggcagcggctgcggcgcgaacttgcgggccgctgccgcctcctggtgctggggcgacgcggagaagccgccggggagcgtggccatgagcgtagagggtagatctgacgggtggaacaaggatgagttgttcagagtcaagtctgcaagggtgagccagcagaatgggggtgaggtcccaacactgcaatgacctgggcagggcacttcacctgaccgaaccccaggtagagggagaatatcacctgcctctcgtgtttcactgcaatgtggtgaggaccgaatgagagaagtctgcaaatgtacgaagcactctcattaacaaggtggatgatcagattgggtaattttgtttcagatcaaatgccagatgtggcaaaagactgattttcatcgttctgaaaatgacactgatgatgagctgccaaaatattttgagctctgactgcatcatcgaaataagtgcctggcgtccgtccccaggtgactactttgaaaggatgcattcttcacatgcaaccccttaattgtctcgtggctctaaccagaaggcttctaggcccctgttcctcaaaatggggtcccaggaacagcagtctaggccacacccgggagcttgttggcaatgcaggctctcccaccccagaccggcagagcaga

SEQ ID NO: 1178 - DNA, 399 bp, Homo sapiens
cctcccctcgctgctcaccttggttcccaagagccgggcggccgcaagacggggtcttgccatgttgcccaggctggtctcgaactcctgtgctcaagtgatctgcctgccttggcctccaagagtgctgggattacagctccgactcagattttgaacggatgtttgcatgtataccacagtgctacattaaaaaccagtcatgtggatgtggagaagggtgctgatcaggactccctgtttgctaacaaattctacagcagaaacaaagtattaaggtttgcagccaggaagcaagtgcatggggaataagcctgcagcttcttccaaatgagacagagccaaatcttttttctgagtctgttttcttcatttctattaaaccaaggtcctttttaa

SEQ ID NO: 1179 - DNA, 1036 bp, Homo sapiens
agaggctgtgccttccacaaatgctatcctgtatctgtcagaagcagctatttctttgccatccttaaaccaggacaccctcatggggagggagcctgcaattttgcagtccagtctgcagatgtttggcttccagcttcattttcagccaggcacgtgtatttgcctccaaaactaatctgaacatcagggattatcaagactgcaacaccattggaaaagctcattttgatttttccgtcttctctgatgacctcttgacctttcatccatgtgacagaaatgggctctgaccctctcacagcagcttgcaggctaatttcaaatggtccagtgcctgagacttcacactgaagtagagcatttgttcctctcactatgtctgcaggctcaagagttttgatgaaagaaggaggttctacaaaagcatgaaagcattgtgtggaccttcttattgatagcggactgcacaggctctaattctttaatgaaatgtggcttatcaatgatgatcaactctgcttggcagatgtctgctccaaacttgttggaagccttacaagaataaactcctctatcttgaatggctctgcagtacctacctaccatgttactgtcttggttgttggtctctccagttggtaatacaagcatttcccacacatgtacagaaagcaaaaaggacaacaatatgaaatgaagtgacaacatctgtgccaatgtatggcatttacctgtcacagttagtgtggctgtacagctgacactgccatactcattggaagctttgcatgtatactcgccgcagtcaaccacctgggttctcaggatttcaaggctggagatatactttgaagatcgaatagaacacttgtcactctcataaatttctcggccagctttaaaccactggaaccggacattgggagcactttggatctcacagcatataagcattagaagacaggactcaagtgtctgctggctgtaaaaatactggagaaactcatctatagcatgcagaatacatattcag

SEQ ID NO: 1180 - DNA, 690 bp, Homo sapiens
tcggatccgtttattccaaatgtcccagcccacgccgtgcccagagtgtggcgacacgaggccaaactgcccacctactgaaaatctgtctgtgtgccgagcacgcgctccccatccctctaccaaatgcctggctggcgcgtcatccctggctttgatggacggagtcttgctgtgttgcccaggctggagtgcagtggcatgatctctgttcacttcaacctccgcctcctgagttcaagcgattctcctgcctcagcttcccaagcagctggactacagcagggatgacggcgctcctggaggctggctgggaagctggtcagggtcccaggactctgacacccccaatggcccttgtagccttggggagtcctgtgatccaaggctggaggactgagtcccctccaggtctcatagcagacgaatagcagcttcacccaggcctgttttgtcgtggccccattcagaggccgccctcctctgtggtttagagcatgccctggaatccctagcacaaccaggggttacctcctgctggctgaccccttcctgtgctgcgggctggaatatagggtttaaccctgttataacccagaggaacacaaaaggaggaacatcaggctttatggagagactggaaatgaagtggaggttttccttgctcatgaaacctggctcaccctacag

SEQ ID NO: 1181 - DNA, 2890 bp, Homo sapiens
ttagaggatcctgtttggtagttaaaaccgtattaaaatagagagggaagaaattaagcctccttgatggtgaagagattgggaaccaccactccagtgttagaaaatgtcaaatgacagaaggtgggctatattaagtgggaatttccaaaccccaccccctggaaggaaggaatgcttggtgacaagccttagaggagagagatgcttgtctagcccattgcctgtgtgcccaggaagagatgtgcataccttgagatatagagaagactctagtggggagaagccccaggccagcttgtcagcacagggcatcggaggcccccaaccagctccaagttctgaacagcacacagccttcaaaggcttgtactgctgctcatacccagcagaggccttgcaccaggcctccccatgcaaatcagtgtccccgcagcgtaggtaaaggagctctagctgtgctccctatgggggaacagatataccgtgggacactgagagactggaagattgcccaacatttatttactgatctgtgttcaccacagaacctaaggtatttattggtattgtttcaaccagtacgagtgattctttcatttagtggtcatctctgcactccaccacagacttttgggaattacaagatgaaaagggccacatcctcaccctggcatagctcagaaaatttggttggggaagtagggacatagacgtgatcactacaccataatttactaagctgtgagaactggaggtgcatcagtgaccagagtgcatttgagccagaggtagaaggtactgtagacaaaaggaacaacatgcgctctaggctgtatcattaggtacaattttctgtccttgggggagtctttttaaccctaagacaaaaattatgaatatagaaagaggccacggttcatctttgcaattctttcaggagaaaatttgctgcaactcactttctaagtttaaaaaaaaaaagagtaaatgatatgaatatcacctgaaagaatttgaggtctcaaacttgggaggatctttgaacaacaatcttggggaatgcctaacagttcatactcatttcttgatatctacagatggaaactctacagccttacatatatttcttttttcttttaactactttatactcacagaaaatcagtgttcagcacttctaatagcaggtctagtggaagcttgagatcagaacagagttccataaagggaaactgagggcacacaaggcagagcagtacccccttatccatggggacctgtctgactggaagtaagggagaagattctactccacagagaatcagggaaggttaaaactgtgtgtgtttgtgacacttttgctctcttgggcccagatacaggccggaaatcctttgggttctggtgactcaaagtgtggccaaaaggaccagcagctttagcttctctgggagaacatatgagtgcagaatttcaggcctgcaccaagtttttaaacgtctgcattttaacaagctgctcttaatttgcttacgtattaaaatttccagaagcactgttctaggaccatctttaagtgttatccaaaaacatgtaagatcttttttcaaagcaaattctcaagctctaccctagagggattgcttctggttctctggggttggtgcaggaatctacattttcggcaagtgccttagatccttgtgcacactagcatttgaggattgctgccttagatggtgggaaatctgagcaggggagggctgtgggctgaaaatgaaatgatgatgtttaggaactggcacaagcatgcttctgctcctggtgggaagcagtgggacagatccagttgattgtagagaatgcagacctcgtgtcatgctcaagtgtcaccttaatgtaatggctggagacagccacatatgaccctctcattgtccagtcagtaagctcaatcaatgacaggaaccactgactctggtaattaaaaacttattgtggccgggcacagtggctcacgcctgaaatcccagcactttgggaggcaaaggtgggcagatcacctgaggtcaggagttcaagaccagcctggccaacatggtgaaaccccatctctactaaaaatacaaaattagctgggcgtggtggggttgcctataattccagctactcaggaggctaagacaggagaaacacttgaacccaggaggtggaggttgcagtaagctgagatcgcatcattgcactccagcctgggcaacaagagtgaaactgtctaaaaaacaaacaacaacaacaacaacaaaaacacttattggtgggcaggttctcataagaggccatgggaaagccatgtcctatctcagggacacagggtcatctgggcctctggctaatagaggccaaataatgggactattttccctgtgaaatcctgaaaaccaaaaatggtggcgtctttatctgcattagcagaggtaatttgctccttcttgaaatccaaggtcacgtctactgtctggggattttgatccagggtcagtgtggtttctcctttacaggagagccgagtctcagaaaggtgaggtggtttgtgttggtcattggctacctcagattttagagcagctctaccttgattgtggggttgacctaattttttttgctgtcttctttcttctccaggtgaggaaagaggacttcctgtatatctctatccttttgtttccattactcactttctgtggctgctgctgcagaagccactgctgactgatgtggatacctcaatctttggtttacaaaaagcctaggtgtcttttggcctctctccaggttgatagccatggctcctgaaagaaataaaagatgatcatctttctaaaaa

SEQ ID NO: 1182 - DNA, 869 bp, Homo sapiens
gatgggctcaaaccactgacttttcagtcaacatctgacagcactaacccagtgttccagagacactgcttgttaaacagtgaaagctgttgctcaattgtgtcatccgtaattgtcaaatattgccatttagtagcacaaggaagtattctctgttgccaagctagagtacccataactcttctgttttgttgaacattcttccccaccacaaaccctctttagaagactgggggctcctaaagcattgaggccgagagtcccgtccttgtgcatgtttgggcattgacccagggccaagtcagtgggagactcctccacgcctacgccaggtccccaggtgacaactgcagtctctggatctgaagtcatccactttcccattcctagctcacctcacccatcgtgaagcctggatttcctttttatcactggttttgatggatttgattaaggcgttccttggtgaagttttcttcatgtttcttgttcttagaataatcatatttctgtaatatttgaagtttatggtttccatggagcttctaaatctttcatccagtatgttttaaatatctttgtctctcttctccactacacgcccttcagggattccatttagccctatactggggggtttaaagttttgatgccgatggtctttttatgttttcaagtcatttgttactgtgtgtttcatttatgttagtttcaacttctattccttctagttcaataatcttctcttctgcaatgtttaatccactgccttcttccatttcagactgtaaatcatactttttatctacagaatttgatatttaaaaaatcttcaacctccccatttaattaaaatacaattatactaa

SEQ ID NO: 1183 - DNA, 598 bp, Homo sapiens
aggattgggatattccgactccttaagggcctggcgcacataaggtgtgaccttttcattcccgttgttatggagggccacatctgccagagcctggagtctgcgaaggccgggacccggttccccggcccacagtgggggtgtgcaaacccgagagaactgggttgcaaattcgtgaagaatcagcatcatgtttggcagctgagtattggagccaggagcctgccatgaggttatattcccagaggatgtcagtcccaaggaccagtagctgccatcagtttggattctgaaaactaactggcatcaacactgggtgtagaaacatgcttgccttatgtatcagaggacatgctcagcagatccaagagatatatttggcaactttttctagaaaaggcacattgggtatcattcattacattcttgagtttttttgggtttttttttttttttttgagacagtcttgctgtattgcccaggctggagtgtggtggcacaatcacagctcattgcatcctcaatcacccaggcctaagcaatcctcccaccttgtagctgggactacagctcacagcacacctggctaaaattttt

SEQ ID NO: 1184 - DNA, 974 bp, Homo sapiens
ggccgctgcccggcacctggaggaggctgggctgtgcgcggcgtttgggggtcggcgtcgcccgcacgctctgcgaggcttgggctcgcgtaccttccagtagagcaccccgagccgccgcagctgctccaggcccactgggcggccggggtcggggcggtggggttgccgcgggtcgcccggggcgtcgtccatataccaggcctgcaccatgacgcgcagtgcgggtgccgtgttcgaacccaggggccgcgctcggagcccgtcggccgcgctttatcttatagggaggcgtggacgcgcatgggagccgggattgggcggctggttggaggcagggccggcgcgggggaggccccacggctccgctgttttcggaagcaaaggcattcaagccccgaccctgtcctgggcaccctcggacctgcctgaggcccgcggcccggggccagccgttcgccagacgcgccgggcaggtgaagctcaccgtaggcatcgcacgtgccttgtgtgtgctgccgcggtctccctgcaccttcagagcaatcttgtgaggcaaacgacgttaaacgtgtttagagtatggaaagcaaatgcaaaaaaaaaaaaaaaagaataaggattttgttaagctcatgcagtccatatgggcacagttgagacttcacagctcggatcccaggtatgggggaaacagttttatgccataaaaaacatactttagaaaagcaagatgatggagaggctctgaggaattgccaaggcagcccagcacttgctgctggcaggagttcaagcgggcagaatcagatgagaacagcactcattacttcatacggacattgccggcccatgggattcctcctttgaagaggaatctttggaacttgaactgtctcttccagaagaatagccagcagcagcccaaaaatatgtttcatgaccagaatttatcaccccgatgtaagacactt

SEQ ID NO: 1185 - DNA, 478 bp, Homo sapiens
atacagtgagtgctgccaacatctggcatactagaattgatctactgggcactgcagcctagtggctaaaagtcctgccacttactaaccatgggaccttggacatgttcttcaactgctgtgtgttatgaggattaaatgatttaatccataaaaaatgcttgaagaatgccaacatgcacaatgttgctccaacagccaagttatgatcttggaagagtttgctgtccagtgacttcctgatggcattcaaggttggcatagaacgctacctggcccatgggttactcgccatctaaaaccaaaaatcaggacatatttatatcttattgctatgtccaaaggttgatttttcttcacttggtgagcatcttctgtttggcatttccacatgtaataagttaagaactgatttgagaagatatccaaaaaatgcaattgtataaatccaaataaaaaatttaaataatcatcccaa

SEQ ID NO: 1186 - DNA, 541 bp, Homo sapiens
ctgagtaaggagcatagagacaaatataaaatgaacgcactctacctgatttaattatagtcttctggtgaagatcttgctgttatctctgtgaatcaggagagaagagattgatgaatagacgagattggatttggtcatttccccaaggtgaagagcatggcgatttcttctgtggtaaggagcaataatgaagaccatggttgatttaatcagtctctgctgatgaagatcttggctgttacctttgtgtgtaaggaagctaaagacttaagtaaataacagtccaaaaacttgtcaattagggtaaatttttcattaatgttcactgaattatttaaagttaaggcatatgtagatcaatgagatgaatgtgttatgaaacttagattgtggttagtccaattaagcacaattttggttaaaaataagatgaaagacattttattcatttttttatctgattaataattcatcttattttgtactgcatttaatttaagatttattcactaataaaatctatggctgcactgttcaa

SEQ ID NO: 1187 - DNA, 680 bp, Homo sapiens
tttgctctcctgatgaagacaaaggctgttgatccactgaacccacccagacactatgtggtttcttgaatgtcctacgtacattttgatggattacccaaggactatctgatgaagaataatagagacatataaatacatatgggctacatcttggcaaaataaagtaatcctgaagtaaattctaaggatgttctgaattgacacctcttaagcacaaccgaatgtcctggtggctttgcctcccactggggctttttggctcttgtttggccccagcggctgctgcagctctgtctgaattcacacaggagcaacatgatggtgctcagccctcgccgaagtgtcttgctgaagagttgggagatgcttggactattcagatagaagccagctggaagtacagggcagtcaacacaaaccagagaggcaaacttttggccagtgagacatggaaagggagaagaaatacattcttctttctcccctagagtgaggaccaacctgagtcccagtcacctggaatcccctcagacgagcgtcccttgagatccagcacatggcagccagcgtgctgacgattccttcctgcctactggctccttcttatttctgcctccgtggaactgtattctctaatcaatattagcacatacatattgccccagactgtacctcct

SEQ ID NO: 1188 - DNA, 3549 bp, Homo sapiens
agcccacgttcactattgaacacaacggaagggggaattattgtgcttcttgctttgattcccaagctggtgttgtctgagcctgtctggcatgtgctctgcctgccctgacttctgaccccaggaggagcattcaaggagccaaggaatgggtccaggcattgtgctagtatctagccatggcaagatgctagatctaaccatgacgagagcagctaagatcggactgtacctgagtgagcccattgaatcctccaccagcaccacacggggtttctattgtttgtctcagctgcagcaacataatatgagacaagggccaagaactgcagaactgtgcacggtgtttagaagaggctgcgagctgctgctctgcagagttgggaggtgctttcgggctctgcaggctccctgcaggcccttgctgactgtccatggcctgcacctgccctacctgctgagctgccccatcagctgctcctggctgtggtttcctgaggggtcccgtctgcatcggctgccctgtgtcctgacactatggtgggtttgcaagtggcaaagtccagggaaggagactggggagcatggccatgggtcatccggggggcacggagggttccggctcccgcccaggtccacctgcttcatcagcagtggtcaccaagattgcataaccaggacgatgacaacgctgagagctctgttgcagttaaagacttaagaacaacttgtgcctgctgactaatacattttatcacccaggcagcgtcaggactctgagagcctctcacatgctgctgtcatctgagcgagacctcaagatttgtcatcgagcaggctgacccttgcctgaatggacctcacattcttgaggcagggagagatctgcaatcagcatgatcgatcagcgattttcataagacgttagaagtcatcagagcttaggaaacagggtgaggaagtaggggaggagccggaagggcccccatttaaaacaaggtggccaggataggcctctctgtaggggtgacattgaagaaatggtgggagagggtgtgaggtgcacatctctgagggcagagtgttctggagacaggaaaccatctgtgcaaaggccctgtggtgagagggtgctaggagctagcaagcccagtctactcaacacagccatcattttaaaacctcggtgagccctgtcccttatcttctgaaccccctcccacagaagcggatgtcactgagagtgaaagctgcagtgtagggtggcctcctctgcacaccggccctggccctctgacctcttctaccccatgatggtcccctgtcagctgggtctagagtggaccgtcggggcagacctggaaggggaaggctgtcaagttcctgctcccctgtgacatacagcaacacatttgtttccccctggattctggggatcagcaacatgtgcgggtgggggcagggcagtcctgctgctctgggatgggctgccccctcagggaggactggccagctgggtggctctgctcctggagagtgaccggccatttgctgggtggatggggtgactgtcctgagagcttggcaccaccagaagtgtagtccacgcagcccttcacaggtggctcagggtgcccagcggggcaagaggtggccctcaagctaagcttgagcttaagcctaagcctaagcttgccacgcttgggctaggatgccaagtctccatgctggctgctggtcacagctctgtccctgtgggagaagacgactgaagcctggccaggctgggccatctccccagcagccaccagggcttgctgtgagatgtgggagccatgctagggtcctgccccggggatgttggtaggcatggtgggaagcagtgcaattatggatattttctggagataatcatcaacaggatttgctgatggaatggacctggaatacaagaagaaaaggaatcaaggatggctctgaggttcggggcttgagcaacttggatgggggtgctgctgagtcaggtgggaggggagcaggctcaggggatgcggactccatttgaagtggccgcgttggagatgtctgtggacatccacgtgaaatgctgagtggccagctggacatgtggatctggtgtccagggggaagtttgggctgcagatacagatttcaccaggacatatttttagtgatgcatagactgaccaggctcgaaagaagcacagggtgtgcagccccattctggtaagcgtgtctctgcctttactgaggtgtctccactgcatccttgatttaatggaattcaactgaaccatcattgagcatctgttgtatacgatgtactctggaggcataaaaactattgggagaaatgaggaagtaaataagtaatattgatataattcttctattaataagaatcaatttatctgaaaacaaaaagtctcttaagcatttgaataaaatagaaagcctttattaacatatgaaaataaatccatacccataaataaaaatctgcacactcacgggtgctgaccagtatatcctagctcaccagcacagtgggctgggtgtggagaaggtgggcattcagctttcacatcaggcagagggagccttggagcggagggtgctggctcaggactgctggccaagcccatggtggagtcaggccggcctgcagttggacactcttgactgattaaacattaataggcaattctaacaaaaacagagaggatggcaactccataggaaggagggccacatgtgggggtgaattccaagtcaaacattttccccaaagaatttgttgttaaacttttaattttgagataactgaagattcacatgtagtggtcagatataatatagcatgatcttctgtgccttttacccagttttctccgtcataacatctgcaaacgtagcactatattacagtatctcaaccagtgtataaatgcatacactcaccagtgtcactggggttcctccagtctcagttcatttgtgtgcatttattttccgtaactgtatcactgctgtagagtaggatggccaccttgacagtcaagaggcagaacagctccacacgagggttcctgtcttccttgctcctggaaccattaatctgctctccgtctctataattttatcctttgagactgttacataaacaaaaccacacagtaacctcacaaggcatttttgcactcagtaaaatgcccttgagacccattcacgttgctgtgtgtatcagagcccgttcctttccatagctgagccgtgttcctggtgtggacacaccactgtttaatcagtcatcgtcgaaggacggctgccttgtcccccattttcgaccattacaaatgaagcttccatgagcattcatgtacaagtttctttgtgaacttaagctttcaagaaattaaaaaagaaatgttttcaaatgcttgagcaaatagccaagatcccagggcaccgtgggaaagtgtggaagtgaggattttttttttttttttgagatggagccttgctctg

SEQ ID NO: 1189 - DNA, 1700 bp, Homo sapiens
ttctccctcctgcctcggccctggcaccagtgatctttttattgtttccatagttttgcttttttcagaatatcatatatttggaaagctacagtatagagtcttttcagattggcttccttcacttaataatatgcatttaggatttcacatgtctccttgcggcttgttagctcaatttttttagtgctgaataatagtccagttctggaggtgccacactttgtttatcctttcacctcaaaggacatacaggttccttccaagttttagcaattatgatgaaagctgctataaacacttttgtgtggacataagttttcaacgcatttgggtaaatgccaaggaacaggattatttaattatacggtaagagtatggttggtattataagaaacttccaagctatcttccaacgtggccataccactttgcattcctacaggcaatgaataagagttcctgttgcttcccatccttaccagcatttggtggtgttagaatatgtttctagttgttttagtaacaatgtttcttccttcagcaacagctactctcactgctgaagagaaattattttgaggccacaaacctctgaatggcttgataagaaaggaaagtcaaggagaaatgagagtgagacttcctaaaaaatacagtgagtccactttctgtgtcaactgtttatgtgaaaagatatgtgaatatactatcagccattccataagcaggctgtggcatctctgagcaaattagtcatgttagaatgatatctgaaatgctataagggaacattagtaagttgttcttttttcctacttaagtgacttataaattagttgcttacattcactgtaactagtaatttatctgtactaatctgcctaatttaccttattcttctgtataagatgaaaatcttttccaaaaagcatgagtgcatgttcaaagcttcggcattcttcttccgtccatgcagtcattccttctaagaaaaattttaaaataaaatttatgggcccccaaattttcttatgtgaatcactgattttcagtatgttttccctgtaaaaggtcacaaactctctctctctctcacacacacacactctctctctcacacacacacacactctctctctctctctctctctgtatgcaggagatttcagttagaattaccaaaagcatgcatactacagttcaagtctagaatacaaaaatataaacactgctttttttccactacattatgggatgagaatttaagttttctataacatgcctgtttttctgattaaaaaaaatttttttaaacaatgagcgtatttttcaattagaaaaaaaaactctacctcctttattgggggaaagaagctctgttttggtcttacttcaaaaccacaagttctagccaggtgcggtggctcatgcctgtaatcccagcactttgggaggccagcgcaggaggatcacttgagcccaggagtttgaaatcagcatgggcaacatggaaaaaccctgtctttacaaaaaaacaaactagccaggcgtggtggcgggcacctatagttccggctacttgggaagctgaggtgggaggatcacctgagcccacgagatcaaggctatactaagctgtgatcatgccactgccctccagcctgggagacagagtgagaccctgtctcaaaaaagac

SEQ ID NO: 1190 - DNA, 481 bp, Homo sapiens
tctaacctgagaacctattaccaccacccagtgtcctcagaagtcatgatagtcaccatgatgcagctagagttataaggaccagagtttgactcccagcctttgaaaacgatgttccttgggggtaggagcatgctctcacccttgtcttctatctctctcatcctttaagactcagttcagaacttgactcttcaggcggaggcttctctgagtcctgaagctggctgcctcactcacagctttctctgcaacgggtgcctccacaattgtgatagagaatgacatgccccagcataatgcctcaacccaagtgtcaacctacccttgacagagaagagaaccccaaatgaatctcccaagcaacacaagctgacccaacacagcaaagcgagtcacctttgaagagaaagaatgacgcttattttctcctccaaagacctacttggaaagtagacgtggtttactgcaaatctctccc

SEQ ID NO: 1191 - DNA, 477 bp, Homo sapiens
catttctttgttaatgaacttttcatgcactttttttacttatctagtagtctgcttattgagtagtttgccttttcatcatgtgtctgtgacacagagcaagtatcttttctatgccttggcaaattgtcatattgctttctaattttctttctaatcatgatcatgatgtgcatctgttatttacgtagtaatttgtgaactgaaaggctaccaataaagtttatactttatgcaatttcaattaatatacagtggtaactgttatttgaaccatgatgtagggaactagtgttatttaactaaattatggtaactgaaattggtgcataacaaagctgtaaaacaaggactgcctatatccttttcagtgcactaaatgctacatgattgtttcttacctcaccctatgtacttgtcatgtctttttaaaaatgtactcaaagaacagaaataataaaccaaatagagaagcaa

SEQ ID NO: 1192 - DNA, 2043 bp, Homo sapiens
agatgctcccaggctctcccgcagtttaaagacttaactcagcggctttcagggcctgtggttgagggactccgaaagaactgttgctggtggaccggttcagggtcttgacttcgccacacaaaagaacttgagagcacgtccaaagtaaagctaagacctctagtacagtgttcaatggaactggtgagaaaagacgtccttgctgtgttcctgatatgaagaggaaagcagtccttctccattaagtaaaatgctgacaacatgagcctcccgtggtcggaacgggcttgtgaaggcggtgctggggtgcaccagggcagcagctacagaatgcaccagctggagtcgacattaaagggccccatttcccatttgctgcagaagatgtttaattggaagtctctccctgtccttttaccctctggtgctgggcaccaatgagaagctcatctggccccgggatcctggcaggacactgggagcactatttccatgggcagcagggttgttcctggagacatcactgacccaggacacctagcacaatggcactcgatgtgaaagtggcttcgtacaaatctgccactcaagcctaaataagtgcattccagaagagccgcagcccctctaacagctcctgaggtgagggaaaccctagggatgggaagttggagcagaaagagatggtggcctgaagtcaactgcagtgaaaatctctccccatcagcaagttttgcaaagctatggccacagggacacatgactggggcccctcctagtcttggaaggagcccccatggaaatgagggcctcacagtgaatccacctctgatcctacttcacctgcagtcaaatgagaagagatttcaatcagctaaagacaccctatcccctctccccgacccctgcgaccccaggagctcctgccttgtcactgtgtccccaaacgaaccgcatctgaatcaagcccctttctctccctagtggtcaacatctgggctgtgatgggcagctcccactcttgccttagaatatgactggagaggtgacttctcatcacatggagaatatgttcaccccatggtgctttccacccaagctgaccatggcttgactttttggtgtagttgctagctctgtgccatccttggcaatgtgaccctggagcagctgtccccagtgtgcatttgggggatttcatgtaattatgaataggatgcaaattttatagccccagtgaagggaaacacccctggcgaggcttcccggggccagagagaggactccactgagggagatggtggcagggccattctttgtgtcctgcttttttttttttttttttttttaacatcctctttatgtcctgagagccatgtgcagatgaggaaaaatgacatgcaatgcatttttgcctgccacaatgactttgcaatcataacaagcaaaatgttctaaacagtaagtgaatcgaggaagatatactgccaagtcaggaagaaaaaatccacctgttcagtgatttcaggaactgctgaagaaaatcaccagtgagtatcagtttctgcaagagaatctaatgcaggctttgcttctcatcggaatcccccagctggtgtcttggttgactgagagtctgggggagagggcagagaatggatttattctctgctaggtttttaacagtcaagaagggctgtggtcctaaggggcactggtcaaaccttagtgtgcatcagaattatctggataaggctaggcacagtggctcacgcctgtaatcacagcactttgggaggctgaggcgcgtggatcacctgaggtcagaagttcaagaccagcctggctcttttagtagagaaaccctatgtctattaaaaagtacaaaatttagccaggtgtggtggtgagtgcctgtaatcccagctacttgggaggctgaggcaggacagtcacttgaatctaggaggcagaggttgcagtgaactgagatcgtgccattgtgctccagcctgggcaacaagagtgaaactctatctc

SEQ ID NO: 1193 - DNA, 579 bp, Homo sapiens
aaggttgcaaaatggcgaggggggaggtaagctgtctttgcttggccatcttgggctagcaggccttgcagagaactacctttttagctgagtgaagggatcaacctgagttggagttctcctatgctgtggccagatccactagaaattaacccagaatcttagcctctcagtggcctatcggtgatgccacactcaatcagaaactatgctactgctgaagaggtatattgagccctgcctggttaacctccagtgaggttattagagaattgggagaggctcaaatcagcatcctgcacctagttatcaaaccattgtgaagtcttgattcctggatggccagaaaacttgtcattggtcaagagcaacattaagatctgcctgttactcatactgatgcttcctgcccagcaagttcatcagagggcgaggatgaattacggttgccatgaatgtccttgtgaggcagttgggaagccttggctggattgtgaaggatatttgaaaagtattttagagtccaccagatcatccatgtgagtgaccatgcagcaaaagaaggagggtcctctcagt

SEQ ID NO: 1194 - DNA, 549 bp, Homo sapiens
aagagattgagtttaacgtctactgatcacaggtcacacagaagagattgctctttaaaaataaatccctgagagtttatatgaacatatgtctttttcctattatataaccatttaagtacaggaaacaatcgacttagtgctacacctttattaattctgaatattatttgtctctatgtcttctcccacttggtttcctcaaggagaaagagtactaactgagaagagttaaaaatctacattttgttttgcacagtctgaggaatctttattatgaaatctatactctgttgcccgggctaagtgcagtggcataatctcagctcactacaacctccgcctcctgggctcaagcaatcctcctgcctcccaggtaggctgggactacaggtgtgtgcaaccacacccagctaatttttgtatttttaatagagacagggtttcaccacgttgaccaggctggtctcaaactcctgacctcaaatgatccatctgcctcagcctgccaaagtgctggattacaggcatgagccactgtgcccagcc

SEQ ID NO: 1195 - DNA, 444 bp, Homo sapiens
ctttcagccctcacctcccaggaatggggagggggcatcctaccccatatctgaggtgcgactgcgggacgtagagcggactgggcctttcccgttggcgcgtggcctcaatcagggagtcttcctctgtcacccaggctggaatgctgtggcaccttcaagactcactacagcctcaactttctggcctccagcaatcctccaaacacatcctccaaagtagctgttattacaaagatggggttccgccatattgctcacgctggcctagaactgccgagctcaaagaatccacctaccgtgacgtcccaaagttgtggaattgcagtgcttcactggccccggccttatttccaaaatgaaataactcacataagttctgtggtgacatgtaaaaacccaattcccgtaacagctttcccaacgttgattttttagacatga

SEQ ID NO: 1196 - DNA, 3334 bp, Homo sapiens
aacaggagagggagcaagcgcgagaggatattagaagagaggcttgtctccaagatatggaaggaagtgagaaatgacagggctgcaagctttgtatgtaggagcccggcagggcgggggagcggcgaggagagccaagtggattctcagaaaaggggggaagccatcgaagagctaaaggtgattagagggggatattgatttcttattctgccagagatttaagcaggcatgcgaggaatctgcaccatggttggcaaaaagagacccgttgcctcctgtaaccagacactcaggctttccaggagcccagggagcaagccgagaagaaagggggcagtgtggtctaggaaaattcaacttgtcgctgatttgtgcctgatgcctgctgtccgtcagcagcctcccttacaatctttttttctctctctcctttttttttccttgccttctccttcttcactgaagcctaggggagccagtaaagattaaatgtgcttctcaaaggcagccacttcatgctgctatgtcgaaagggccattattattattatattttaatggtaaaagagaaaaggagagaggttgagcgagcgagagagaagctaggtgtgatgatgacagactagcttttctgagaggaaaaggaaaagggaagggagagaaaaaggagagcctctgagctcaacggaggattgtgcctgagaagaacccacagagctggtcctatagtacccctcctcaggaatgtctccccagtgcaaggacaaagactgaagagactgctatattgatggactctcaagccaactatgaagttgaaacaaagaaagtgatcacctgaagacacctcctctgctaagaaacacccccaaattgtgcagcttctgccactagaactctcagaacaagagacaatcttttcaagaaacagaaaaactcaataatgacatctagattttcatgagccaagaactttcccttcctcatgtgtattcctctgtttgtacttaaattcatgtgacattcatttttttcctagtatggatatgcttattaatgcacttgtttcaaaatcccaaattgcacaaatgtgttaatattttaagaaacaaaatgaatcctacaaggagaatgatttttagccacacatagggttggatcttgagagtgacctacagaataaaagtacttttaaaataaagtagtcagaggctattcaaagggtaaaataatcatagtaccacattggtccacttgacactaaccaatcgatcatttttttttaatcaagaaagctagattctatcagataaaatcactgcttctaaagagtttaaatctagttagaaaaagttatagaaatgtttgcaaagataagtaacagatagagtcagtagaggataagatcaaaaacaaaaccaagcaaaagatgagttcaggggagtttgccatcaagttggcaaaactgacttacttagggaagaaagttataaaacaggaaaatatgagatgaaccttgagtgatgtggaagatttagataaatggaaaggaaggagaaaatggagttctttaggtggttgtaattggaggaggaaatgaatacacacatcttgttgacttaaacccagacattcagcagctctctatacatatctggaaaagactgcacagtcacctcctgtctctcaccccaggtattacttagaattattatcatatttcccttcctttaaagtaagtaagggtgattggtgacaatatggagaactatgatttttccattaacctaataataattggtatttattgagttctgttaagcattttacatattaactcacttaagcctttcaacagccttgcaaaataggtattattatccccattttacaggcaagaaaactgaggtttaagtaacttgccgaagtgccatatacagggctcacattcagtattgcagttgcaaagctcatgatctatagtgccaagttgcaatattgtagtcaatgtcacaattattacccctttttatattccttgatatttttccatggcaaacaattagctatttcatttaataatcacctaaaacttttcagtcttctgattaaaattacgctggagtgatagaatgtattttcatgatagaaattgggaaaaaaaatggggaatgaagtttatcagcatttcagacttgttttttttttttttttttgcaagactttgatgagattgttcacttttgtctatgtaaaatcccaaatccttgagaataaaaaagggggaggtttaagtcacttgttgcaatgccctttttaatagaggcaataaatctaaaggccataaatttagagtgacttacagaagatcgaactttggagtgtggcagagtaagggatggaaaccgggccctccagttcactatcagtagcttttgcactggtctgcccttcctaaattaagtatgcacttcaatttgatgagtggaaacagtctatctgggcagtaaccagggagctttgtgcctagtagattgcttctgttctgcacttctttggtttcccacctcaatgtaaaaaatagctagcaatgaagtccagaagttgtcaatggttcatccccagaagaatgcataatgtccaaagttgtatgtgtatgatgtcttcaatggtattaagttatttcaaattcttagttcacctacataaatcatttctaacaagcatcttcttaaccaactttatgcacagtgtatgtttgtaagtgcttctgcacgaatgtttatacatgactgtttccatagtacttatgtttttaaaaatattcagtcatttcctactataatcctcatgtatccatgtaactgactcaaaaatacttcagccacagaaagctaaaactgagcaaatctcattcttcttttccatcccctttgcatgtggctggcatttagtaatgattaataatatggccagctgaataacagaggtttgagacacaattctttctcaaaggagtcagctaagctgggtctacttatggacaaacatctaaatgtgtggaagtatctgatatttgacaatggtaaatttccacttagctagctagcattgtcagacttcaatctcctcatggctctggccgtcctgttttaagcatgataattgttggccacatctcacatagttctcattgagtgagttcataaataaacagggtttttttttttttttaaagagcagccaagcacaaagtgtgactttgttgacattttatgtgactttgtcatatgttcctaacccccaataaaagcaatgttgcatcaactgt

SEQ ID NO: 1197 - DNA, 622 bp, Homo sapiens
caggccatcagactccaaacagttatgcaactggagcctcctgaggatgaccccttctgcctgggacccttagatcagcctctagagaagctttgactgctgtttccccaaaacagcaccccctgccatcaggaagcaagctgatcaaggagagaagataaggcatggatattcagtttaaaatggtagagaaccataataatacctaccttgaagtgatgatataaactacatgacacagagtacttgcttcacacagtgttggaacacacagagctgccacctggaaatccctgctcatctaagggttgcatctagactctgaaagccatgttggttcaccacatgtatcgcatcctgataatgtgaagtgaaaaagtagagcctggaagcctttgtaagatgactgtgccagaggaggaagataaatatctcgatgctatggaggcctgtcagctctttgaagtatctgggcaatatcaagatttctacttcagatgaaaaaacaaatagttattcattgaccctgttgccgccaagaaagagaaactcaggaattctgctcttgggaagatggattagatgtattattctttactcttcccactaactacaactaaaa

SEQ ID NO: 1198 - DNA, 613 bp, Homo sapiens
agaagaattcctggactaacaattctaagccaaggcagctgcggcaacgttgaggcagaatcaaaacctggggaaagaccttaggtattcagaacaaaacaatcagcaggcgggtctgcggcattctaagaacagacactggcaggaacaaaggttacagaagtgaatgactctaagaatcaagcaagacatggagtggcagaaaattaaattctgaatccctaaaagacatgatgcaaagatgacctcctctcccaaggacatgtcctcatcctgcgctgaccgtgtgtggtcatttcagaaaaagcgaacaatggagaacctgcttgaatgatacttagacctgggacaactgaaaggagttgcacttatacaattcggtgcagtggagtcccctgggaggagccccagtcacacgggaagagacagtcacagctgtaataaatgatggctagcatgtatcaagcactggccgagtcctcagcatacattacattacagaattcagtgtgcacctcaacactctgggggtgtattttataggagaactgtggcacaaagaggggttttgcaatcccaagaagagtcagcgtttgaattttgaatttatgtg

SEQ ID NO: 1199 - DNA, 746 bp, Homo sapiens
ggaatatgagaaatgtcacctcctggctaccacaataatgcaactaggagttctggttctccgctgactacccacaggagtccttagaggaaccacacaggaaacctgggaaacctaacactctgattccaaggctccaagcttgatatagaagactatcatatgaaccagaaagggtaactgaaaccaaagaaatgactccagtatcaagctaaagacatgccttaaaggatgaggaggagcagaaatcttaccagcaaggcaagaaagaagccgtacgtgaacagcctctgctttaggcccagaaggaaaagaagcttacaggagacaatcagtcttacactcttccatggtcacaaacaagaggtccctggatctacaggtcatcttgcccctgaaatggccctggaaagctatggctgaagaatggaggaaaagatgactttctctgtttcttcagaccaggcatcaactgggatgttgggatgttgataaaaggacatctcatcctttgttttctgcctatgctttcaccatacccattcccatgtctggtcatcacagcatccttcacagcccttagctgaatcatgttgagtacaggatggtgtgaatatcatggtttgaatgcaaccatggtctgtcagtgtggcttgttttttgcagcccacttagacttaagccctcttaatttcaaaattacgttcatatgtgccaataaagttgtccctacatgaactgaaaaa

SEQ ID NO: 1200 - DNA, 500 bp, Homo sapiens
aagagatcagaattcagcttccccagggacagcaaggccaagaaggtgtccagatcctggcctctctccagatcttggactctctcaaggccaagactctctctcttaagatctctatctcaaggccaagatctctctccagatattggcctctctcaaggtacttccaagatctcagagggccattcactgtggatctaatatgaagacagagaaaccagccttccagaggagcggacacatttccttagtcccaggatacactttgtgtggaatccacagatctgccctgatgatcatgaaggaatgcgaaagagcctggtaaaacgatatggacttgtgcaaatgcaaagcaatggtgaagtcatcacgaaccgcacagactggacagaactcctatctggctgcaatggcttgggttcagtcagcccaggggccagagaattggctacaaagagctctggagtgcccctccctccaaataaagtattctaagcgtg

SEQ ID NO: 1201 - DNA, 2517 bp, Homo sapiens
ggaaaggattccttatcagcagacagttacagctcccactaggacactgccttctcagcggcttcagttatcagatattcctggacatactttccaagccatgaaaaataacagccacagctttcccagcactctgacaaacatccatgagcccccaaagaccgggaagtaatgatgatgcagctgcggcaccatagaagaaacaagtgatttcagtcaaagggcctggactcacgagctagcaactttggacagattcttgaactctcagcctcagtttctgcttctgtaaagggagataactacagtgaccttcaggttatcttgaagatgccaatgagctagtgaaaatgcaatttaatctgtacagaactaaacaaatgctcttttaatacaaattaattaaaagcaggcatcttaagaggtggcttaagaagactcctgcatcatcatagggagttaaaattctgagcaaaaagccttctggaggagaagcataggacaggcagccccaagactggactggatagatgttgctgagccaccaactctctgagggacctgagacaaagccaggtgacctcaccagtgctccatgttctcaccataagttctataggacactcaaatattctcaggacatcagtttactatacacatgcacacacacatattttacatttcattcaaagggtaaaacatagactccctttgttctataaacctacaaacatgtctgagcattttttacataaatatttcacaaatattttacatgaatacttcgacttataagtccatattttaacaatggcatcttttccaatgtgtacattatggaagtgtggttggggtgtacagcctaggagctcagggactgcacaggcctgttctttatggatgcattgcattcatctcccacagccatttgtagcttcagctgtttctgaaagcagccactttcccttttgatgtctgaggtccattattttcatttttgacttaaccaacaggtgttctctcttgaactctttcctacatgagctgtcttgcctcagggttcccacggacaggagagtttttcctacagtgttactgagaggcacagagaaatcagttcctcctggtccactggctccgctctcagcactgcagtctcttgtgaccacgctgaagtctcaacgtttcccccttctgaggacatgcagggacagaagggtgaaccacaagggccagacctaatgctccaggaaaacaatgaaagaacaattttccatccttttatttagggcttaagtaagccaggcctgtaacaccaaattgtgagagtgcacaagatgtttttgaaccttggtgcagaatccagaaagaagtgcagcctctggtgacagggtcttgggctagccatgtgaagcctggctttatgtcaggcctctcaaatgtgctgtacaaacctacctgcaggtctactctaggcagaaggggtggaccgatggcaccaacaaacacatctgtacacacaacagtgcagcagacacttgtggatggggtatgagacaagctgtagatgccctcaattaaatctgaggacaaaagaagactgcccagagagtggcactagcatggcaacaaaatatttcaaaatattaatgggttttacatacacgcataaaatcacatttttctgaccttataacacatttcagtcatttaggtattgagtttgtaatgcttgtggatactcgaaaaattgaaagaggcaaagttagacttcttgtccccaagactggaaatatgtcccttcgttgggagttgggtggtgttgaatgcagttggggtggaaggagaggagagctaatgggaaaacaaagaataagtaaatgttctacattcctgagaaaaggggccctgccccctagccatctctgcagcaaagccctgggggagagagagagaatgctcagacatgtttgtaggtttacagaacaaagggaatctatgttttaccctttgaatgaaatacaggaaagcaaaatacctagagcagaaatggctgtgtgacatgtcagacaaggtcatagagttttccatggccctgcactgcccgtggctcatgtggcatgactgtaggtgaaacccagaatggactctcaaggtgccctgggctcccttcctcaatggctgaagaaggcttctcttgacctaatggagtttaaagagacttggggatatagtgaactagaccccagaagcctttcaaacaggaactagggggcgcccaccaggaccttgtggactgacagtggaggctcaatgagacaaaatgtgtcatggagatgccttcaggacagacagcattcgggaacagataccagctccttacagtcttggcctccagattagacatggccctggaaaaaggtgatgggggacctggaattaccagacagcaattccgttcccccacttagtggaatgggagcacaacatgtaaattaaaggaattagagaaaaaca

SEQ ID NO: 1202 - DNA, 1097 bp, Homo sapiens
atttctggtgagtcagccaggaggccgtggagaggacaggttggctgtctcctttgcctgtaggtggtctggggccccagcagtgggagacctgtaacttcaggcaccactggaagaacttaagcccagagaaggaaacggctcttccactccccagcgcccctccccagatggtgcatcagaacctggagggttgcaggacaatctcaagagcagcaggcagacatctgaaccgtggtacatctagttcttctatttgtctacctataggtgcactcataacattttaatttatttcatgtgttgtcatcgttatcctctgtattactctgagaaagaagatgttacctgtttgtgaaaaagagggtcacagagtatgtgtgaaccaatacttcatttgagacagcctcacatggagaatgcaatgagccattctcttctcacatacagttgaatatgacatttactgcagtttgatcactaagcataagagccaagaactctggaacaagaagaagaagacgaaggaggaggaggagggggagggggaggaggagaaggagaaggaggagaaggagaaggagaaggagacggagaaggaggaagaggaggaggagggccgggcgcagtggctcacgcctgtaatcccagcattttgggaggccgaggcgggcggatcacgaggtcaagagaccgagaccatcctggctaacatggtgaaaccccgtctctactaaaaatacaaaaaattagccgggcatggtggcgggcgtctgtagtcccagctactcgggaggctgaggcaggagaatggcgggaacccgggaggcggagcttgtagtgagccaagatagcgccactgcactccagcctggaccacagagcgagactccgtctcaagaagaagaagaaggagaagaaggagaaggagaagggaaaaaagaatcctcatcattaatgcaagtggaaggaaactcttcaccaaagaattgatcacatcatgaaaggtgaaatcattacggaattgcttaaatatataatttgaatctggatttaaaaataataaatgtaagttttttctttaaaaaaaaaaaaaa

SEQ ID NO: 1203 - DNA, 4494 bp, Homo sapiens
agtatacatgaatttgcttctgcctttgccacccctgagacagcaagaccaacaaccccttctcttcctcttcagcctactcagtgtgaagatgataaaatgaaacagttggtgatgtttcagagaacccaactcaaactgacttgaacaagagaaatcagtgtttactgcagagaacacagaagccagcaagcagcagggaagggaggcgaaccaatgcagcagcccaccgggaccgaggaggacacacgcagagcaagtcacaggaagcgcagctgaaaacaaatggacgcttatcccaaatgcacaggacacttaccaagaactgatggtccgtcaaagtaaagctcaacagctttggctggcaggacagtcaaacttttggacgacagaaagtaacagtgggaaatgggacaacatctgccagcaacgcgagaggccaagaccatggctgctacaggaggggtcagcgtcacagtacacgcatggcggcggttgcacatgcatgcctggggaatgtgagtgttcagacatgccaggagtccagcctcaccaggaaacaggcacacggggacagaggcgcaaacactgaaaactctcgctgaatccactcggctgagcggtggtcacgagagcacggccctgcgctccccacaaaactgcacctgggccccagggcgagacaggcgtggaaggtgcaggggtgtgtgtgggggcaggggctcctggctcagagccgtatccaggaaccccccttcaggctggagccctgccctgagccccctgtggagagactgtggagagccccctgtggagagggtgactgtgggagagcagcatcaggcctagtctcggctgtgaagtaccccccacctccacgcaggatcccggggattctgtcaaggtgggggccgcctgctcagcccaggctccctgaacgtgtggctagctgagtttgcggaagaaaccaggagagtgccaacaccaggcttgcaagcaagaggctccctgactgcctgatcctggagcgcaccccatcctccctgtgttccctgggcctcagctgttccccagtgaccttggagacaccctgccccaccctggctccacaggagccctgcccatcaccgcctcagctctgagtctcccctggggacacaaccttcctcctggtgcagaggcgcaggatgctgcccctaaggcccatcttcctctgcagcatgttttgatgtcagctcattcacaggaaagaaacaatcacatctcagtgcccagaatggggaccaataggagaggtcactgggaataaagcccacacgcaccccagggtccatgggctccccagaaatgcaggtggcctccgccagagccaacaagcctaagttgctgatcagcccctccctgcttccctgtgtggaagaggaaacagaggcccagactagtagggctctgccgtggtggccggctgcgtccccagacctctggtcccagggctggctgggagtgcccctccctgtgctcacttcctgctctcctgggaaatggctcagggatggggcgtgtggggacagatgctggcatagctcacaaaatgcttgcacaagggacactccatggcaggtccctgcaggagagcaaagtcacaacattcagagattccctgcactctgaggcccgcagagcctggccgaccaagcgaggctgggaggatgttgcctgctggtcagggcagccctctgatcagggcggccgagtgaggctgggaggatggtgcccgctggtcagggcagctgagcgtggctgggaggatggtgcctgctggtcagggcagccctctggtcagggtggccaagcgaggcagggagggaggtacccaccggtcagggcagccgaacaaagctggaaagatggtgcctgctggtcagggcggctgaatgaggctgggaggatggtgtctgctggtcagggcagctcaggaggtgctgcccaggaggtgctgtccaggcagagcctagggctggtgtgggtgtgccatgctcctgagaagtttctgggttgtggctttaatgttctcctgcagtgagaacgctgacacttggccaaagggtcctcacctctcccctagtacacttctgagatgccaggaaggttctgaacatcagattgattcctgggactcccctccagggtggccttactggagtcaggagcccctgccccactaggatggctctgcagtggcctgaggacagtgagcactgactggtcactggtgcaaagttgcccactgtgatggttttgaccgttgatgggaaccaagtgaaagccctgcagctatttctaggcatttcagagggtgcttccctgcatgtactctgctgcagaccatcctccctgggccaggagcccgctacacagtaggagattctttttcttctcttttgagcacttttattctctttttcttaatctctgctcctcctttgaactgagaaatgtgcaaatcttttttgttagttttgaggttgcttcttatgcatatttcatctggaactttcccctttgggggtgatctgttctatcagcctgcccgctgctagagaggccgaggtggtccggccagccgtgcgctgctgctggtgtctctgtgggcatgacctggtgagatatcattctgcatctgggggtccatcctatcagccctgtgttctagattccccagtgactgacatttagccagtctcctctgtcactctccagtgacatgtacacactgttggcacgaactgcagatgtcacgttctgtggctgagagcctcagtgtgcatctgtagtaggaggatgtcagtgaggactgtcctgtcgctgctgagctggcaccgactgtgcctggtctacactccaggtctgccaaacgacccagcaaggtccttcacaactcttctgatccaggatcacacatcacttgtgctttgatgcctgcttctgaacaattttacctcctgagatgtccatttttgggagtgtgagccctcctctcctggtgacagctggctgaggccgtccagcctcaggacacacagggaacggctgcataaggagatctggggcagggggcccaccaggatgttctgccctgtggggggcaacaccggctgtggtctgccggcggcatccagggacagtctgtctaggtgaggctgaggccgcccccactcgctccctcacccccatgctgacagcagtgagctgaccacagactgggggagccccacagggagactggcctccccagcacatgccccgcagtgccagacgcggtcatcacagaggcaggtacacgacaccacggacgtgccacgtacccgccatcgggaccaaggaccactgagaaaccatgaaggccatgcagcgactgtggtggcaggaccgtcaggaggccataggtgccacggctcccctctggtggttcacctgcccacctgtagctggggtggcccctccagtgcgctccccagagcagaacaccccccaggcaacacgtctgatgaaggccaacagcgtcagtcctctggtgtttggtgacatcaaagctgtgccgaaaggccttccctcactgctaacacttgaagggcttctgtccggtgtggaccctctgatggcgaatgtggtctgtcttatgcttaaagatccacctccattaactgcactcttagggtttcttcctctgaaaaggaatgaacacgggaaccccctcaaaggcatttttaaatgaagcgtggaaggcatcaaagatgtgctcttcttcaggactcaggcttctccatcattctctgttccttggaagcgtgagggctaaggagctgctgacttctctctcttggccccacttcaagaaaggcttgcttcccacacacctctccacgctcccagtgcgggactgacactctgcaccgggaggccaagggccaccatcgtcttgctgggagaaggtgtgacgtttcttggtcataggagggagtgtgatctgacaccagaggacttaatataacattgcagtgttaacatcttcactggcagattcatggactttccccctcctgaatgcatttcaacaccttgaaatgaacgatgcctcatgtctctgcagggtggacatagctctaactctctgaagctgattatatgtcaagttctgtgtgaaatgagagaccatggggattcattattgctggagttgacggtattgcagttttataaccatctaataaattagcatttaatactgagagatttcatcttaaactcagaggattgctttgttttaaagaagatttttgcaaggagaagcaatggaaaccattcagaaaatgtgggagataaaaatcctattcaagaaaacggatcttggatctttgcattcacttgatttgtcagaatattattctgtgctaaaaaatagaagggattaaatgttaaaaatcactgaggcac

SEQ ID NO: 1204 - DNA, 3444 bp, Homo sapiens
agtcttgtcacaaaatattaaacctggacctgatcaagcatctggactggcttatggatatagagaaaatgtaggggatagatgagcacgggaaatgtctccgtggggcaaaattcacgaaattcagattgttggacactctccaggacaaaaggtctagattcttcaaaaacaacaacatcgaaaaaaaaaaactgccagaaagaaaaaatacagagggagaaggacacagaacacatttatgagtcttttcaccctcatttcgttgaagattttattggccgaagaaccctcagtaggcacgaaattcattctcacaagcagagagatgcattatgctccatttattgctcatcctaaattataaacatttccagtgaatgtaaaggaagatatgattgaaaaggactctgtgaagacaggatgtttctgtacagtccttgtatctgctcacctattccaaactttccagagattttaccagaggtttaagatattctcctgagggtttgctgtagagagatttttcttaactaaggagtgcaagtagcaagcaatagcccacccagttggagacaaaaaagaagggtgtcagtgttcccactgttaaaaaacaaaaaaaaatcaccctggacacctctgagaattatacaaggggatgtacacagccctgctttatttgagttcaaaaggaaggtgggttttgaaagaagaacaaggagagtagatctctctggatcttctgatgctcacagcaaagagctcaaggtatctgagtcaactcttgaggcttcttcgaacagagggatgaagagagaatatggcaagcttgccaacagatcccagaagttttaagagaaaagaacagattgctctttgcaaaacaaaccgagctgggtgcatggagccccagtagacagaaagtgaagaaaacatcaacgttctgaagttttagataggtgcaccatcccttatggataccaatctgtgctccccataaacttctgtgcccagggtcaactggccagggacaactggctcaccaggaggcctacatagcctcttcttcaggccctaattacagctctatgcaatagggactctgccatctgacagccaaggaggtggttcggtttctgcacatggttttttccgctgggtcccttgaggtccatggtaacctcttcctcattctctacaggcagatcacactttgtaataagatcagaggcagagaactttgaccagatcacactttataataagatcagaggcaaagaactctgaccagatcacactttataataagatcagaggcagagaactttgacaactatctccttgccctctggccctggggtcagggctactcaaacaacacctgctgtcccaaacccggagaagtgtagattttggcactggtagaggaataacagctattgttgacacttaatcttgtgggcctggaatttcaactatgttttcacaactcggagcctattgctgccacctctgtcagggaagataaatgggcatgaataatagacagatgagtttcccaaaagcccagacaggctgcagggaacacgtaatgagcagacagtgtggttcacgccggggagcccaggtttatccaggcctcatcctcactccctttctctactgataattggacccaacaggaccattccgaatcatttttctctcttcagttattcttcagttctactcaaagggtcagtttagggcataattaaagtcaattactttctgaaaggccatcaggacaactgttagagaaaatgatagcagccccgcacttgctgtaggaattattagcttgtcagcctccaggcttatggagacaaaggatcaaaaagttagagagatccaggtgttcacctatttgttcactaattcttttattgtgagtgtgcatgtgtgtgggtgggtgtgacatttattatgaaccagagggcaggagccagtgacacagtggtgcagagaataatcatattccctgccttcctggggtcatacagcttggtggaggacacagatgtgaattcggtaatcactccaataaatattctcctacagatgaagaaagatgatacgatgtgatggacaacagagacttatatggtggggtctgggctggtctttctgaagctaagactggcaggatgagcaggagtttgccagacaaagaggagtggagttgttttccaaacacatctcagcacaaagtgttgtctttgctgggagctgaaaaaagatagtgtgggcagagaccattaggtgagacgcttgatatgagatacaacctcaacaggtggaagaagatcatgagagatgaagagaggaatatagtacagcagagaggacacagaagctgacgtcagggtgtctcagtttgaaaccagtggccaccctgttcctctcccatgtggtcccatcatgggcctctagggtctgggataagaggttaatgaatatctcataccctaagcaggggtggtccctgcactttagcaaaaagttaaggaactagggaaaagagatggaaataataaagagatgggacaaagactttgaagaccaaagcccctgggctattctcttttttaaatttttttatttaaattttcatttatttttatcaagatagggtctcactatgttgcccaggttggtctcaaacttttggcctaaagcaatcctcccaccttggcctcccaatgtgctgggattacaatgtgagccaccacgtccagcctcctgggatatttctcaatgaaacattggatgccaagattggttttgtgccacatgccaatttcacagaagccagtctatgagccaccagctctactcagcaattacagtttctggaactttggctaaattcctgtagatgcaccactgcttgtggcctgactctttgccacccaagtgcgctcagcctcccctggggagtctgccaggcttgcatggctcccactgcacttgctgtgctgggaccgaaaacagtttttgtgcccctagcttaactccactggattcatagaggctttggcctcctcaatggctgtcctgggacagggaggctggttagcacaattaacacaacctggtcatgcaaggcattgatggtccgtaacatgaactttgaccagtaggagacagagaatggaaaaaagccagcagataaatcatctggccttcctcccctatgacagactgttctgagccacagtgtttcacatgtcttcctggagatgtcccacatgacttgagcaaccagctggagctctggagaaactgtggccatcctggtaacatatgaccttgtatttgctttctctccttcctgctttatttccctatgtcccttactttggttgttgggattgcacctcccaataaagcattagcatgtcc

SEQ ID NO: 1205 - DNA, 2351 bp, Homo sapiens
caggccaatacccttgatgaacatcaatgcaaaaatcctcaacaaaatacgggcaaaccaaatccagcagcacatcaaaaagttaatccatcatgatcaagtatgcttcatccccaggatgcaaggttgcctcaacatacacgtcaattaatctgattcatcccataaacaaaactaaagataaaaaccatgtgattatctcaatatatgcagaaaaggctttcaataaaattcaaggcctctccatattaaaaactctaaaaaatctgggtattgaggaaacatagctcaaagtgatgagctgtttttgtaccagtatcatgctgttttggttactgtagccctgtagtatagtttgaagttgggtaacatgatgcctccagctttgttctttttgctgaggattgcttggctattagggctctttttttttttggttccatatgaattttgaaatagtttgctctagttctgtgaggaatgccattggtaatttaatagggataacttgcatctgtaaattactttgggcagtatagccattttaatgatgttaattcttcctatccatgagcatgaaatgtttttccatttgtttgtgtcttctctgatttctttgagcagtgttttgtaattctcctagagatctcttagagatctttcacctccctggttagctgtattcctaggtattttattttttctgtgtgtagcaattatgaatgggattatgttcttcatttgactctctgctttactgctaggaatttttgcacattgattttgtatgctaagactttgctaaagtttatcagcagaaggagctttggggctaagactatggggttttctagatatagaatcatgtcatctgtaaacagagacagtttgacttcctgtctattcctctcttccctcctctatttggatgcccttccagttttgcacattcagtgtaatgttggctgtgggtttgccatggctagctctcatcattttggcacttccgactagaagtgcgagaggggccagtgttgttgttacctgaaaggtaagtgcagcccacaaaaatgcagtgaagaagaagatatatgcatatgtttaagttaatacaattgagatacatttagcagacagaatcaatagagttgatgagtgactgactggatgtgtggggagtttatatcactcccaggtttttgacttgggcaaccgggcactcaagaaggaaaaagaggatccagggagaggaacttttctgaggactggggtagggctgaacagctgcattcgagactggtggagggtgggctgggcatgggatgcacaaatggaaattccactgggtctgcagctcacacataggcatgaccagcatagagatagagaggccccagtgctgctgagtaactgtgattccccaggtgatggcatcagctgagaagggaaggaagcccatgtgaggacactgaagaaggagtgagcagacaataagaagcccacagaagacagagaaggaacaactagagggagaagccaaggcaggcatgtgtgataacatataggaactgagggagaggacatttcaagatggaggggatgccatacaacaggactatgtgatggtttttggctgtgtccataggaagtcacaacaggcaagggaaagaaaccagaacccagtcatggagttaagaagtgagtcagagaggagatgggtagggacagtgaggtaaggcctctttctaaggaagtttggctgaaggatagactagctggacacatgctggctgtgtggggtagagggaggaatgatggagggtaggagagccttgagcctgcgagaagagtctcctagaatagagaagctgaggttaaagttgtggaagacagtggggataactgagtgacagataatcaggagaagaaaaggagatccagaatcatgacagagagatgacctttgccaagagcacagccatctttcactgtcacagagaggtaggacaaaacgattggtgttcaagaattggtttgtagcacaatattttaactatgtcctttaaaaagtttctccacagacactacccaaagcagtccttcactacagtggcagacagacctgaaaattttcatctgaagcagcagagtgaactgcagagtcagagatagaatctcactatgttgaccaggctggtcttgaactcttggcacccaagcgatccttttgcctggaatcccaaagtgtcagatttactgaagaatatttcattgtaattactttttatactttataggtcaagagctctgttttaaagacaaaatttattgaatatactttttcaaacaaa

SEQ ID NO: 1206 - DNA, 127 bp, Homo sapiens
gttggttgaaaatcgcccccggctttggccgtggccgcgggtgagattcggcgcccagagcccccgggggcctcagctcaccgcgcgctgccccatgtgcggcggtgaaacccaggccccgacaggc

SEQ ID NO: 1207 - DNA, 728 bp, Homo sapiens
caagtactcaatatttggctttacatttcagctactggccttcaacaccacggagagaggtgttttcctggtttttcagagctgagaagtgagctgtcttccaactcacctgcataggtggaagtcttcccagatgctgtgcttgaatctctaatttgatatatttacaagacttgcagaggctgtgagctgtgtgaatacattgcacataagaactacagatgttttaaagccttctgtgaaagtgattctgaaggtgtggtccctgggccagcagcatcaacatcacctggaacttgtgagaaatgaagattctcaggctcttctctatacctactgaatcagacattgggtgcaaaggggaacactacagtctgtctttaaggagccctcaagaattaggagcctcccaagctgagacagatctcagctactggctgtatggagttggatgagcttcttacctgacccctgggcttcagtttttcatctgcaagatgaagtttaccagagaatgggacaaacaggagagaagttcctctgcttttatgccagataatcttagatgaatgtatgatgattttacaaggtgcacggaaaggactgtattgaattacatcatgagaaagttattcccttctgatcaactctctttccccagtttctacattgaggcaaagtctcagtttaatgctggaatattataacacttgctaatctttctttaa

SEQ ID NO: 1208 - DNA, 3018 bp, Homo sapiens
tttttcaggttttactgtttgattatgctccaaatcaattttattgcccactaaggtaaccagcggctgagtttctgactcttcactcactttcttcactaatcttctaaaaattctcaaagctttgataacttgtaataccatataccaagatgatttcctgtgctccatagatggatctgtccaacattttgcttcttattgtccggcctcctgtatcccaaactagagagtaacattcaagtttcctggcaatgttatccttctcaaaagaaatccagtcctatagtttgtactggttcctgaaagttttttgagcaaaatctgtagctaaggaggtcttccgggaggtgctgttccctagcacgatgattttcagtgctggtcctggctctcttccttagagtcctacatgatgtcccaggaaccatgcctgccccgctcccccgggtggagggaggaggggaaggagaaggtctccaggggtgagggaggaagaagggagggtagtggggacagtacctcacttgtctgctcgatgtcagcagtggctggagaatctctcgccaggtgccatcttgccaatctcttctccctctgccctctgtgggtcttttgttgagggctgggctgtacatgcatagtatgagattctgtgaggcctagaaaagagcagctgctatggggttgaaagaagaatggagaaggccgggtgcagtggctcatgcctgtaatcccagcattttgggaggccgaggtgggtggatcagttgaagtcaggagtttgagaccagcctggccaacatggtgaaaccccatctctactgaaaatacagaaattagctgggtatggtggcacatgcctgtagtacaagctacttgagaggctgaggcaggagaatggtttgaacctgggaggtagaggttgcagtgagccaacattgcgttattgcactccagcctgggtgacagagcaagactctgtctcaaaaaaaaaaaaaaaaaaaaaaaaagaatggagatactagaggttgcacagtgctgagaaatatgaggttctgacctagccagagtggagagaactttttaacatcataggcatgcgccaccacgccctgctaattttgtatttttagtagagatggggtttcgccatgttgctcaggctggtctcgaactcctgacctcaggtaatccacccaccttggcctcccaaagtgctgggattacaggcgtgagccaccttgcctggcacctcttccacttttatgattagattgggcccatgtggataaaccagggcaatctcctatttttagtaaactgattagcatctttaatttcatctgcaatcttaattcctctttgccatgtatcataagatatatacaggttccaaagattaagatgtagacatctttgggtggccattattctgcctaccacacacaatatgtcctctgactgtaatggaaccaaactggaaatcagtaatagaaatacataccaccacgcctggctaattttatttttgtagagatggggtctcgctgctcaggccagtctggagctcctgggcttatgtgatcctcttgccttggcatcccaaagtggtgggattataggcatgaaccactgcacccggcttaatttacgttttatagtgtgcaattcaatgttttgggtttttttttctttttaaagcatatttacagagttgtgcaaccgtcaccactatctaacttaagaatattttagccaggcatggtaggtagcacgtgcctgtagtccatgctacttgggaggctgaggcaagaggattgctcgagcccaggaggttaaggctgcagtgagctatgatcacacccactgtacgtcagtctgcttgacagagtgagaccttgtttcaaaaaaaaaaaataaaatttctatcaccctaaaaagaaaccccatacttactcttagtcacttgctattcctttttgtccctgggcccggaaataactacgttctgtttctatgaattttcctattctgtacttgcatataaattgaatcatacaatatttagtctttcatgactggcttcttagaatgtttttgaagttcatgcacattgaggtacacatcagtacttcatctcttggtcaaataatattacattgtatgaatgtatcacatttgctttgtccattcatcagttgatagatatttgggagttacactttttgtctatgatgaataatgctgctgtgaacattcctgagcaggttttggtaagaacccctgtgttttcagttcttcggggtatatacctcagagtagaattgctgggtcctaaggtaactaactcattgtttaccattttgaggaaatacaaaactattttccaaagtggctataccattttacaatttcatgaaagagaaatttataatactaaatgatgcttatattagaaaaaaggaaagatctcaaattaataatctaaattaataatctaagttcctgattcaagcaactagaaaaagaaaagcaaatgaaaccaaaggactggacgcaatggcttatgcctgtaatcccagcacttggggaggctgaggcaggaggattgcttgatcccaggagttcaagaccagcccagacaactagtgggaccctatctctactaaaaaaaaagttaaaaaataaaccaaagaaagcagaagaaacagtgcaagaagagaaatcactgaggccgagcgtggtggctcatgcctgtaatcccagcactttgggaggccgaggtgggaggatcacttgaggtcgggagtttgagactagcctggcctacatggtgaaacactgtctctactaaaaatacaaaaattagctgggcgtggtggcacatgcctgtaatcccagctatttgggaggccgaggcaggagaatagctcgaacccgggagccggagattgcagtgagccgagattgagccactgcattccagcctgggccacagagtgagactccatctca

SEQ ID NO: 1209 - DNA, 691 bp, Homo sapiens
gaaaacagcaaaattacattgttagttgtattatttacagtgaaaacttggaagacttgacaaagcatcagttagtttatcaacagacctaggaagctccctgtcccctcctttcagggtcctttccttggaaatgaaataaacttaaatcagattttacataactttaagcaccagcttgacaatttaaagttttatttcagttttataaaatactcctgctttgaaaggcaaagtgaatgtaaaaatgtgaatgtaattaaacaagtcactggcctggaaactttttattgcaatagtctttatgttttactactatattcacttcttggaatgaatttgcttgtaggtttgaaacaaaatatttgccttttgtcttgaaaaattcccttaaaaaattaattatttttggaactgtacaactacattttcattcgatgttaaatatgcaacttggtccttggatatcatgttacaaagtccaacctgttggataacttgttatagaaaacaataaaaaaccttaaactatcataaaatattactgatgttaacagtcatgtatgtataacacatcactgtatctagattttcctgttattggatgtttaaattaccaatgtacaatcaggttttaaaatgtaatacttaaatttccattcactatgtaaaattaaaagctctaaaagac

SEQ ID NO: 1210 - DNA, 547 bp, Homo sapiens
gagagagagatgatgggggatgaagggtatggaattgtatgctatggctgcctgctgtcgaagttctccaggaatcagctggctggaggaattttggaaggggtgaggcatacactttcttctatgttcctgaaaccacaacattgttaggactcatctgttcatgagaccagaccaatagaaaatgagcacttcgtggataaaaaatacagatggaaacttagtgaaatgtgacctccagtgctggagatggacctaatgggaagtgtttgagtcatgagagaatatcctttatgaatggcttggtgccttccctgtggccatgagttactacaagatctgattgttaaaaaaagattctaggacttcctgtccctctgtcttactcctcttttaccatgtgacatgcctgcttccccttcaccttctgtcatgattgtaagcttcctgaggttcccatcagaagcagagtagttgctggtgtcatgcttgtacagcccatggagctgtgaaccaaataaacttcttttctttataaattacctag

SEQ ID NO: 1211 - DNA, 4395 bp, Homo sapiens
gcgggtgttcggctacgtcactggggcgctacggttcctggagctgggcagtcttctcgtcagagtggggactggtaagagcgacctccccgccaggtcctgtgtgttgccggctgaagaagggatgatgattattccccaccttctaagagacaaagaccaacgagccaccacagccaccagtcccagaacccgccaatgctggggaatggaaaatgagggagttcaactctggccctcacaatccagtggaggagacgaaactcatctgcctctgtccctctgggcacacctcatgccaggtgcatctgtggacaggggccatgctcctgggcttccaaagttggagaaagctgccaggctcagacccacctaagctgaagattcccttgagaacaagtactgtcctgtggtttcatggcctttcttccatttgtggttcttgcgaagtggaatttaaatgacatcttatcaagatggataaaccctagtttcccagtgctggaatatagaaaatggatggacaagtaaatcccactcagtacccataggccaggcatggggacctcaacacacctgagccccagacatcacctttcattctggacctaccatgaaagacttctgaatccaggaagagaaactgactgggcaacatgttattcagaaacaggaccttgccctgtcactcaggatggagttcagtggtcctatcatggctcattatagcctcaaactcccaggctcaagcaatcctaccatgtcagccttcccagtagctgggactacagctggatctaccatgaaagacttctgaatccaggaagagagactgactgggcaacatgttattcagggtctccctctgttgtccaaggctggagtgtagtagtgctatcacagctgactgcagcctcaaccttccaggctgaagtgattctcccatctcaacctcccacgtggctgagactacaggtgcttgccaccatgcccaactaatatttggaattttcatataagtggattccagaggggtgacagcaaaacgtgggaccatccagttgcaggaaaacaagcttaacacgcccactgattttacattatgctcctaccacccggcagcctctccaggcccagaactttctccagtcagcctctacagaccaagctcatgactcacaatggcctatttaggcccataccctacctcacggcagtctccgcagatgagcctactgcctcacaacagcctccacaggcacagctccatcattacaatggcctctttagacccagctcctgcctcccagccttctctccaggccctgaactttctgaagtcgacctcaccaggcccagctcatgcttctttgcagcctctccaggcccagctcctgcatcttggtggcccctccaggcccagcctctgcctcccgtcggcctctacagtcccaacatctgcctcatagcagattcttgaggcccagcatctgcctcactgtggaccccccaagccaagctcccaacctttcagcagcttctacacacccagctcctgccacccagtggcctctttaggccaagctcatgcttcacaagggcctttccaggcccaactttcgtctcatggcaaccttccctggccagattcctgcgtgtctcccagcagcctagacaggcccaggtcttgcctcacactggcctctctacatccagctcatgcctcacggtgacctctccaggcacagctcctgtcccagaacgtcatctccgggcccaaaacttactcaagtcagcctctctagtcccaactgctgcctcctggtggcctatgaaggcccaaaatctcctcaagttgacctctcccggcccagctcctgcctcctgtcagcatctacaggcccaacctctgcctcatgggggcttctccgggcccagctcttcctattggctgagtctacaggcacaactgctgcctcacaacagccttttttggcccagttcctgtccagttcatggcggccaatgtaggcccaaaacttcctcaggtcatactctccaggcccaccttctgcttcctggtggcatgaacaggcccagctttgacttgagaacagcctctgcaggccctgctcttgcctcccaggggcttttccaagcccagctcttgcctcatggcagctgccccaggccaaatttcttcctgcctgccagcagcctcaacaggcacagctcctccctcacagtggcccatttaggccccactcatgactgtcgggccatttccaggcctagtgcctgcctcctggctgactctttcttgaagcccaaaacttcctcaaatcagccttttgcctaacttctgtctactgtcggactctacaggccagcctctgcctcacagtggaccctccagacccagatggtgtctcactgtggcatcctcaggcgaagctcctgcctttcggcagcctctacaggcccagctcctgccttgcagtggcctctttaggccaagctcatgccgcatggcgacttttccaggcacagcttttgccttttgcagcctgtccaggcccagaatgtccttaactcggcatctccaggacgagcttatcctcccagtgcgtctacaggcccgtctcctgcctcacaacaacctcttttggcccaactcctgctgagctgctggcagcctctgtaggccacagacttcttaaagtaaagctttccagccaccttcggcctcccagcagcctcagcaatcaaactattccctcactgcggccaccgaaagccaagtttctccctgcctcatggcatcctccgaaaactgagcatttgcctcacggtggcctccccaggccacgaatctgcctgcctcccaggcaggtgctgcctcacaatggtctctttaggcccagctcatgctaaaagatggactctccaggtacagctcttgcctcctggcagcctctgcaggcccaaattctccaaaagttggcctctcctaactcagctcctgcctcatgtcggcctacacaggcccagactcttaccacacagtagaccctccaggcccaccacttgcctgatcatagcctcctaaggccaagctcctgcctttcagcagcctctacaggcccagctcctgcctcgcaattgcctttgtaggccaagatcatgccgcgaagtggcctttcctagcctaacttttgctttttgacgcatactccagtcccaaaacttcctccagtcagccggtccaggccaagctcttcctcccaaaggcttctgcaggccaaaatcatcctgaagtcaccctctgcaggcccagctcctgcctccaagtgctgtgtaggccaagctaatgcctcacagcacactttccaggctgagcgtttccttttgtgcatcctctccaagccctgaacttactccacttggcctctccagaccaagctctccctcccagtggcctctacaggccaaaattgtcctcaggtctgcctctccagggccacctcttagctaccagtggcttctgctggccaaaatcgacctcaagtcagcctcttcacacccagctcttgcctctgagtggcctctccaggagcaaaactttctcaagtcggcctctccaggcccagcctcctgcttcccgagggcatgtacaggcccagcctctgcctcacagcagactctccacacccagctcttccctgtctgcggcctctccagtccaaagctgctgctgccttttggcagcttgtacaggctcagctcctccctcacggtggcctctttcagcccaactcatgcctcttgcaacctgcccaagtgtcagctcctgtctcacactggcctgttgagggccagctcatgcctctcgtggcctcaacaggcccatcccctgcctgtcggcggcctctacaggcccggcctctacctcacagtgggctctccaggcccacctcttcctcaccgtggcctcctggggcaatgctcctccctctcgggagcctctgcgggcccagctcctgcctcccagtggcctctgtagaccaagcccgtgcctcagggcagcctttccaggcctagcgtttgctgctttgcatcctctccaggccctggacttcctccagtcggcctctccaggcccagctcttcctctcggcggcctctgcagggccagactgtcgtcaagtcggcctgtccagggccagctcctgcctcccggcggcctctgcaggcccaagtcgttctcaagtcggcttccccaggcccagctccggcctcttggcggcctctccgggtgcaaaagttcctcgagtcagcctctccaggcccagctcctcctgcctcccagtggcctctttcggcccagcccagctc

SEQ ID NO: 1212 - DNA, 355 bp, Homo sapiens
gctactccagatctgggctgaggtgggagaatcatttgaacccaggaggtggaggttgcagtgagctgaaatcacacgactgtactctagcctgggtgacagggtgagaccctatctcaaaacaaacaaacaaaaaccccaccagcaaccttgctgacaaatccacaggcccccacgtctgccaattgcctgcctgtatgaactgggcacctgggggaggggcgtggcccccaggctactcatcttggctttcacagccaaagggcctgggtggaacctcagcttactgtgtttactgactgggtaatgtggcctctgaagctgtcacctatctataaaatggggattaaaacga

SEQ ID NO: 1213 - DNA, 644 bp, Homo sapiens
gttgtctgtttgagtaatgagtgtagaaacctataatggaggcgtgatggctgatgcaatcattttccactgatgaaggttttgatggccacctgtaatgaacagccccatctgatttaatcactgtgcaatgaccgtgaactgtacagttacctccgtgtgtcacaggaagactcttttgacttaagcacccttccatggtcatgaggtttctggttgcctctgtgtgttagaagcttggagaccaatgccttctgctgtgatcgcgttctccacagttgcctctgggtaggagcctggacactaatagaaaatggatgcactggagctgatttaaacattctttggtggtcacaagatgtatagctgcctctgtatgtttggcgcatggaaaaaaatatgagtttttgtggacatacactctttatttgaaaagtatgaaatataatccaagaaagccagccatggctcagtgataaatatggaattgatatgaaacattatattgattaatcacctttgaggatgattaataaaagagagaaagtgattctatatagagatgcaggactatttcaggctcattcatgatctaggtttttgtgcttcatggttattttattatcatcaataaaaagaaaaaa

SEQ ID NO: 1214 - DNA, 373 bp, Homo sapiens
gagcccacagagcaggagagctgccaggtctgcccatcgaccaggtttgcagctctcccctgggccactaaccatcctggcccgggctgcctgtctgacctccgtgcctagtcgtggctctccatcttgtctcctccccgtgtccccaatgtcttcagtggggggccccctcttgggtcccctcctctgccatcacctgaagacccccacgccaaacactgaatgtcacctgtgcctgccgcctcggtccaccttgcggcccgtgtttgactcaactcaactcctttaacgctaatatttccggcaaaatcccatgcttgggttttgtctttaaccttgtaacgcttgcaatcccaataaagcattaaaagtc

SEQ ID NO: 1215 - DNA, 143 bp, Homo sapiens
gtcctcaggccaaaggagcgactccgtttccagtttcggaaggggtttctccagaataccaaacaccagtactcgtccaccgccgccgcgccgccgagaggcaacgtcaaccgctccattgccggtggggaagccaaaggctt

SEQ ID NO: 1216 - DNA, 829 bp, Homo sapiens
acgagtcacggtggctccgcgctggcggcgggttcccccacaaggtcttggggaaaggagcatgcgctggaagctgtgtgctgttggttttgaggatcttcagtaagctgaaagcggagagtcaggggccttgtgtcctaccatggtatttgctaacgtttagagagtgcttccccttgccgagcactggaacccaaagattggatcttctgagaacatcagagaaagactgtccttaccatccacaccacagcaaaactttggagccttgaacattgggttcataatctcacagctgagaaaggtccctccacactcctggaactgtacacctattggaacccttaagccttccaggaggcaccagtcagagcaatcaaatggaatcatctcctggtgaagttacccagctgctaaatctaaagccctgagcaaggtactgtacagtttacaaagaagagtcagatgcagccccattgtactcttaagggacaacaatagaagaaatgacagaagacaatcagagattaatgaccagatgaatgatatataccaggtggtcccaacctgagctcccaggctcccaagggtcttagagagcagtaatggggggagaaggaaggggtgcttatgagctatttgcagtacttcaaaaagactaatccaaagagctcatatttgctagatattagatgcacaggctaattaaaagaaaacatcaggtttctttgctcggggctagaaacaccagttaccccatgctgactggaagatctgattggcagttaccgttgtctttgattaataaaacatgagaaaatgaattaat

SEQ ID NO: 1217 - DNA, 1835 bp, Homo sapiens
ccaaatcttgatgttaacaattaaaaagaagaaatgacatgcaagtaggtcttagcagaaaaatgcaggctgggcatgagtcatgttgttaccctcccacatgctcctacaatccacagagatgcctgtctgcaggttcttgaagttattgttagtatttggtatctcaaatttttcgtcactgttcacatgccactttctctgtgcacagtggtatcctcatttgctttttaacctacactgaggagtctttgtcaggttgcactgattttccaattctgcagtaatgagtaagctcacggcatggggaagaagacagtcagtccaatgaagttctctaaattattttaacattgcctttgaaggccttgactcatccttagctatttcaatgaagaaattcctaccatgaatttaaaaccctaaaaattctgtttcaaattctttgggcattggggtactcagatatcccattgtggaagaattttaagaataaatagaagtttctgttgagaaccatgagcaacatgtttcttacaatgagaattgctatgcattttaaaattgcaaatatatatgaaaattgaagacaagaggaaattgtatttctaacttgattctgatcactcacagaggtggcatattattatagttgggacatcctttgcacccttcataaaaaaggccagctgactgctcagcatcacctgccaaggccactagatttgtgtttacaggggtatctctgtgatgcttgtcacatcactcttgaccacctctgttaataaattccgacagtgcagtggcgatcggagtgtgaacttatgttcccagcatatggaaagctatcttaggttttaaggtagtagaaattgcccaggagtttgacagcaactttgtttcccgggtctaaaatcgtatcccactgaggtgtatgcagtggagcataatacatgcaaatacatgcaaaactccttttgtttcacctaagattcactttctatcttactttcccttcctgcctagtgtgacttttgcccccaagagtgcctggacagcattctagtttctacaaaatggtcctctgtgtaggtgaatgtgtcccaaacctgctatcactttcttgtttcagtgtgactgtcttgttagaggtgaagtttatccagggtaacttgctcactaactattcctttttatggcctggggttaaagggcgcatggctcacactggtgaaaataaggaaggcctggtcttatcttgtattaataatactggctgcattccaccagccagagatttctatctgcgaagacctatgaaacactgaagagaaatgtaggcagaaggaaatggccacatatcacaagttctattatatattcttttgtaaatacatattgtatattacttggatgttttcttatatcatttactgtctttttgagttaatgtcagtttttactctctcaacttactatgtaacattgtaaataacataatgtcctttattatttatatttaagcatctaacatatagagttgttttcatataagtttaagataaatgtcaaaaatatatgttcttttgtttttctttgctttaaaattatgtatcttttccttttcttttttttaagaataatttattgttcaggagaaagaatgtatatgtaactgaaactatctgaagaatgcacattgaaggccgtgaggtactgataaactaaagaatttattattcaaaatactaagcaataagtaattgtgatttatttaaagttttgtccattttccatgaaagacatactgcaataaaaatgctactctgtggaga

SEQ ID NO: 1218 - DNA, 997 bp, Homo sapiens
agatgaaaaccgggcgggatggcagccccggggccagggatgcgggagccgccgggaagacccgcgcgccgctcgactcagagggactcacaccttcccccgacaaagaggcggccccactgtcgaccaagtgcccaaggcattgtgggagtcatgattccaagatgcccgcgacggaaaatggaacttgtcagctccttgtcatgggagcattgtgggcgccacaactcattcagctgcagtgaaaagactgttgcatgtcgctgtgcagcctcttatcgccgaggtctggcttccgctgctgctgcgcggcccctcccccgcccgcccagccccaccaggaagcccagggcggactcgtcgagctcctaatgcacgcggcggcgagaaaaacgctcttcaactttccgccggcgccctcccgcgcttccccgggccacagggtcgcctgtcaaccggacagagcccgcaagagcgggtcatgggcggtcgcccagcggcgccgagagcaggaggaagccggagcccgcgcgggcgccgtggatcccctcggcctcccgttggtatcttccatctcatgcgttcagcattgtaacctcgcggcgggcgtgcagaccggacgccctcccgcttcttctaccgactgctaggcacaccagtgggttcattttgaaagaggcccttgcaccgggctttgcaaggaagccggcaaggttagattgaaggttagaagccaattagactagaatcctgcgatctggtgagactgccgccttaaaatgcaccaaacagtttttgaacctggagggctaacaggcgggaaaaacatctgcaagactgccaccgtgtatttttctcaagtaacaggctatccacagttttggaattccttagtgaaactgtcacacaggcacaaacacatgtcagctttccttctagtttgtaaataatatttgtaatttacaggccactgtattcccaactttgcaccatgtga

SEQ ID NO: 1219 - DNA, 761 bp, Homo sapiens
gggtgattacacagtggttctcaaagtatggacctccaaccagcagcatcagcagcatctggatacttgctagaaatggaaattctctggccctattccaggccttccaagttggaaactttgtgatggggcccagcactctgtgttttaacaagccctctagccttaaggaaaacaactctgaggacttttgtcacggacttgaaattctcatctgtgcttggacaagactctgaaacataccaactgtgtattttcctgcctttggtaaatctggagctattaactgattctaaagaacatttgacttaaaaagactatggaaagcccaaagaataaagggacacttgtcactggattgaaggcatattctaatttaggacaatgtcttgagatctttaacttaactacatttgcaaagacccaatttccaagtaactggaacattctagataatgaagaccccagtggattattattagcaaatgaaaactggatatcaagaagggcaaaatcttcaaccttatcagcagaaagagtttatgtaaaaatataccacatagaataactaaaaaaataagcaagtgataccttatctgagctcaaaatatctgtttctttgcaaatggataaaggatttattatattatagcaccttgaggacagagactttatgtttctaactacccatcccagcatcatctagttcattcctatgctgaacagcccctaacacattgcctaaataaatactaacatta

SEQ ID NO: 1220 - DNA, 699 bp, Homo sapiens
ctggagctgcgctggtttttcctcggagtggagcctggtaaccgcgacttccccgccatgttctgtgtgttgctggctggagaagggtggttgacaaactccgacccagcacagtgtttctgtgggtcaaaactagaaaactatgtccaggctcggccgaggcggaaggatccgttcaggccaggagttaaagagctgcctgggcaacatggcgcgaccccatctctgtagtcccacctcagcttcccagatacttgaaccccaaggttcaaggctgcaatgagctatgatcccatcacagcactccatcctgcgagacggagagacggggtttcaccatgttggccaggctggtctggaactcctgacttgaagtaatctgcccacctcggcttcccaaagtgctgggattacaggcgtgagccactgcgcctggccccttcaggtgggtattgaggcttcactacaatactagttccccgttgctgccgcaataaattaccacacacttagtggcttaaaacagcatagaggtattcctttacatttctgaaggccagaattctaaagtcagtcccactgagtcaaggtgggagcagggtcagtgcctttccaggctctgcgggagaatccgtttcctggccctggaggcggcctgtactcctcagcttgtgctgcccttctcgaatgactcgcgtt

SEQ ID NO: 1221 - DNA, 649 bp, Homo sapiens
ggactatgtttgaggggtgttgtatgaccccgttttccatacccagccaacttgtcatgtgacaagtccacagaaagatgttatatgacaggaatctatgaactagtcttccctgaaatgtacctgactacagctaacatcatatcacatgatgaaagaccgcgttgttttcccctgaggttggcatggggacctattgctcacaggaagaaaaaaacagcgtccttattttgtgacttctggcaactgtctttttccgaggaagccccttcccttctgccctgcctctgagttcaagccgggatgcagctcctagtgttttcaagcgtcttacagatggagatcagccccgtcttcctccaacgtccccaccccgcatcggagtcaggactccacggtgctgtggtcagcacggctgcatggtcctgcgaccctgagccccagtgggctctgactgtggttaccagcgccttaggagacagagtaacagtctggaagcagaaacagagactgtccatttcataaacagccacatccgcaaggtttattcctggatcacaaaccaaccccactgaccaaactcccaagtcactttatattaaacttgttatcaaatcacccacataaatatatataataaatacaaaaa

SEQ ID NO: 1222 - DNA, 760 bp, Homo sapiens
cttcactgtactgctcagacctctccatcctggtggcaagggcttagaccattattcatggtctgactggcctcgaggtggctgtctcgcctttgaaaaagggcagacacagagcatgttcagagcacggagccatactgtgcgatttcttcaaagagagcttaaccacagaatttggattaatgaatgacgtaactgcttcagggcaacacaccctcactgcagctgcttagcccaggaagcagcaaggtcaatacaaggagagccacaggcctggggagatgcatgccttccttcctggccacgtggatctcactacttagcccagatggcctgcgagaaggacaaagccaagcacttcacaacactgtcagttgctgtcctgaagaaggtggccaggagctctagaaggattcaaagccccagggatttttggtttttatgtatacacttctctttacatacttgttcctcaacatccaatcagccttgcagggatgatgtaatagccagaaaaataagtgaacagaagattccgggttctactttatgccaatttttcttaaatatctcagtcactagaaaaagatctatttgaaaatcttgctctgagcagtttctgtcttgggcccagttgtttgaggagcctgttgaatttttaaatttattagtgttcccatgcttcattcattggcatatatgtatattctctatactttataattacaagtaagctcttgataataaaaagtaactgtca

SEQ ID NO: 1223 - DNA, 262 bp, Homo sapiens
atattaactcaaggtaaattataataggattgcagataaattaagcatctttatctttgattacagagatatttagcatatgactatagataatttccccttcatattttcttgggcttctagtatttatgtatcaagaaaattatttccttatgtttgaaatggtgacatttctgaaatgtaccagcagaggatacagggatttttgtttgtttttcattttcttatttactgaagaaataaaggcattttagtttataaa

SEQ ID NO: 1224 - DNA, 216 bp, Homo sapiens; identical to SEQ ID NO: 291

SEQ ID NO: 1225 - DNA, 427 bp, Homo sapiens
gctgttcttatttgctgaaagagaaaagaccacagaattgaataccagtgatttcccgttttcttaactctactgaaaagtcataaaactgcattagcaataattacaactacagttgacccttgaacaacatgggattaaactgtgtgggtccacttacatgcagattttcttccacttctgccaccctgaggcagcaagtcagctcctctgctccctccttctcctcagcctactctccacaaagatgataaagaagacctttatatgatccacttccacttaattaatatgtatccaaatcatgagcagcatcttgtgaccctagaagaaataaatgataccaccttgaacacaaatataatcatcttgaacttttatataaatttctacagcaattctgttattaaaaaaaaaagaccaacaa

SEQ ID NO: 1226 - DNA, 2058 bp, Homo sapiens
atgggatttttctagaaggccacgtgcatatgcaccctccccttccattaccccagtatccgccatcaagtagtaacatgttgtaacagaaagaatcccattaagtcctagttctggtagcccggtacaaattttagattttcccccaaaaatgaaaaaaaattatttaaaaaatttagatttgaaatgcttagaaaacaatcatttatttttttatgtcaaaatgtccaagtaaattaatggattaatttccatgcttctggtgatgtaacaccacttggtggtggcgctgaggaaaccctgggaagtgtttttctcttctgtgtaatgaaagactcactgacaaagccgtcggtatccagaatgactgctcttgaaatgatattttgatgatgatgatcagggaagtagcctatgctgatttatttatcatccccccaccccaaccccacttttgtgtcacaaacatttgaaacacccagtgctcaagaatgctgcttttccaattctgctaatatcctctctccccatctggaaacaaagttactaaacctagttttgaaaaagcaatggaaatgaaagtgtccagtgaacttactggcagttgtgcaagttgaaagcttattccttacatcctgagcctaaaagccttattccttatatccggagcctaaaagtttgctcaaaagtagaaaactttccagacaagatcacatacaaaatggttaacatgaaatgctaatgaagaaacaaggcaagaatgaatacaagagaaatggaatctggggaaaaaagtaggttctctaactggggcagggatcttgcttcttgggggcatatggttggatcccaggtgggccacgaaaatcatcttggatatttgtttacaggctgattcctgagtttccctccaaagattctgagtccacagatctagggtgtggaccgagaatcctcattgtaacaagcaccctctgcccccgggacattttaaggtagatggagaactaaggtgagagtgtgccagctaaatactctttcctttgtccctgtgcctcagtcttttttgtttgttttttttcatgtgacactcagtaggaaagtctagttcaagaaccggaaactgagccgggcatggtggtgcgcacctgtagtcccagctactcaggaggctgaggcaggaggatggcttgagcctgacgcccatgccgctgtgagctatgattgcaccactgccctgagcctggacgacagagcaagttcctgtcttaaaaaaaaaagtaataaaaaagacatttaaaaaaaaattagagctcagtgacctgtgactcactttgccactttgtcattttcttgacttctgtcccaacgccagccctgtaatatggagataaagagtggggaggacagaactctgaaacctaaaaggcaagatttttgctaaaccggagaacgtaaaaatacattcctagaggcaatctaaccagccagataaccagaagtttactcttcaaagccaagaatcagtacccccacctcaccttccattctctcttaggctttgtctatgtctctaaggggagtttttcagttgactgatgaggtcctgactggtagggaaagcctgcagggaaatcctgtggcaaagcacactcttgatcacctacttaacaagaaggtctagcaggacattcttgatccaggtcagcttcttccctgaaaataatacatatttttaatttctgtttgaaaaaactccactgtgaaattactctgcttatattagaaggtatgaagacagtagttatgtactgttcgtttgcatacggtcattttgagatagaaaaattaaatttttttaggaaaagaatttcaagcaactttctacgaaaatacagcttgtggttaaatttcctaatgaaagaggaattattcactgaaaaatttgtctaatctgtgccacctcaaaataagaattgtgcctcttcaatgaatgttgtatatgagaatgttacatttgtaacagcacaggaaactcaataaattataaatgaatta

SEQ ID NO: 1227 - DNA, 3510 bp, Homo sapiens
gtggccttgaaaccttcactgtatttggacagatgcaacagaagcacgtctcccccactgtcaccccatcccacaacaaagtgggaatcccatcatgggtatggctgtgccaggcatggcatcgggtgtgccccatgcagcctacttcttgcatgcacagttggtacatttagctgtatggcatcgggtgtgccccacgcagcctacttcttgcatgcacagttggtacattcagctgtacacttaacagcctgtacaggaaaatgagccttagttgtagccccaaggaaatccaaacccatgcttgtgagatatggagaaaccactggttgcctagagaaagcattaaggtgtatttccagttcccctttcatgttggtgaaagacacctattcacactctaattaatcatgggagataagcatgttaccttctgcaccttgactttgctcgtgagcacctggctttcctcttcctccttctcccctctctccctgtctcagtgtgcatctgtgcagatgtgggccagtccccctgtaaccagtggttacagaatgataccatctgttctaagatgtggtcagctttacttctcaggagtcctgtcctacaattcagagcacccctagatgggatggaaccagtgctttatgatcatgttcctcttctctgtgccctgtccttcggcacccccatgttagtcatgatcctcattgtgcagggctggctggactgagaattgcaactccaggacagcagggagctttgggactaggcacgcaggggttttgtcatccatttgaaccataatttgcatattttcttacggcctccctttgtcttttctaaacaaatgaggcagacacttgaacagtaatgctggagaatgttttttctaggagactttgtaagcaaatctgattttaagatgaaatgtgaatgagaaactaggtgccagggaatttagcactgaactagacagtcaaaacttttttaactttgcaggaagaaataaattttgctctcgtctaaatgttcacaagaagtaatgttgtaaatagttttctaaaaatatttattacttgtgctgtatacaaattcatgttctgagtgatgttggtttgcattgtagtattatagaatatattttgagcagtggacttcctttcataacacagttcacacatggagaaagaacaaaaaccagcaggttgagagctgtttggggcctttgatctgtaatgttacatcaaatctgagctttaactgccccctcttctcatctggttatgttatattatatatatatattatatatatatatatacaggtgtatgataaactggtcagtggtcagtactcagatctgcagagcagatttccagatgttctttctgatgtgttgcccataagcaataagatcctaggtaataacatttattccagggcccacattggcccttgtctcagaggatagggtgggggtagaacagctcttgctaagacctcttgcctttgctggagaggttgctgtacttgaatttttgcttctgtttgtctgcacgctccttcatgtcatagaactctagcaatggatgagaaatctgccagcaccagacacatcaaaattgggcacatagatggaaaattttgcaatttttcatgaatttatagggtttccagaatctagttgaggcaaagctcatttggctatagagtaaatgtaagacttgttacaacagaaatttaagtggccagttcaatgtcctttggctatatttgacctacctttaaaacctagcccatttcatatcagcctcttctgtgcctgggcttgaaatgtctaaagctgccttcgtgtctgggattacaccatgtaggtcagtataaagagggcagtcactcctccatttctcccagcgtgtccagttcagcagatttctaaagctgttaagcagcctctctttttgaccgtcctaaactttgtgaaaataaataccccacacccagataaccattaatagaagtaatgtagttttttaggcttttggaatatgtcttctcttttgtatttatgatggtgtttggaatttttcactagtgtatttttagactgaagtgggtgcattaggataaaactttcccttgctgagcctgaaggcaagcaagagggaagaaattgacctgtattgtatcattggggaggcgactacttcttgtggtggtagggggtggggggaatggggcattgtagattatgtgggggtacaatagaattctggcctgaggctccccaagtcttattaccttgtatgaaaaatccccatattagcctcacttaatctcaatagaagcctgctgtttaccctcagggaacaagtagttttcaaaattgagctcctccaaggtcattggccaatgctgtgtgcaggcattggtcatctttgtaaactcatggcattatttcctcatatgcattatgatactaagaaattcaaccccaacctgtatgaaaagcacagcccagggccctaattgaggctagcatgaatgcctttgaggggccagggggccataggaggcccatgcaatttaactgaagctcaggtgccacgttggatttttattcttattaggccgcaacctttctgaatgagtttagggcaggggctgctgatccggctgtggattcagggagctctaaaatgaatctctaccgttcctttaaaggtctttctggttcctcccagtgttgtcattgctgaggtcgatctcgtagttgttcagttgtgctctttttgctgtcttgtgagtcttagccagtgatccagctgcccaaggacagggcctccagagggcctagcgccctcctggtaccaagcgtgtgctcctggcctgtgtgacagtgtctttcccgaagcagtgaaatgagaaattctgcaagtggccacccggaagatcagtctgtagctcttgggcctggatttctactatgttagtgagtgtaggaatatactgtgtctttaatggatgaaaattcaatgtatgctgtgaatttgttggtttgaaacattgaaatttttcattagacaatgtttacatacctcacctgaagaacctttgagagtgtatatataaaattttaaaatatattaagttgctttaaaacaatatgtatagctataaaagttggagttattttaactttgaatatgtaccaagtctcttaaatattgaaatcttgtagacttcttgtgcttctgtgttttgctttcctatcaggccatgtaggaaactgtgttcttgttattggtagaggggccctcactgaaatccaagcttggaaggatgtcctgtgttgtttcagattctcttgtttggttttgaaggatgcggtgtggagccagaggatgtgtgggaggggtttctctaacactgacttctattccatgagctttttcaaggcgcttattttatggcagcgtattaaacttctttgatattcaagtg

SEQ ID NO: 1228 - DNA, 565 bp, Homo sapiens
ggctgggcccgcctccgggaaggagccttaaagaaccagctgcccggtggtgtccgcgcccagtcccccagagtggtcgtgcagggaggtcctcacatctatgcccttggctcccacattcccgggcccaactgctcacctcccagttgtccctgcctgacaagaggaggcagttcaattgagacttgagataaacctgcaaaagatgagggaccttaaggagccaggcatgctgagacagaaacatgaacggagggcacaggaggcggggcctccacaagaccatgagttggaggtgggagagacaacttaccttatgctccagaccccgtggattctggatcctgtgtatcctcaagactctgtccaagccacaggaggctagtagaggctttgaagggtggcactgcaacccacgcacactgcctgccagccccttcagacagcccagtagacgccctagagaaggggggaagcatccgtgataactggctggccaataaccaaccattcattgtttcctgttccaatcactttccatttcaacatttaatctgcaacaaaa

SEQ ID NO: 1229 - DNA, 1854 bp, Homo sapiens
ggggaggggggtccgacccagcgcggacctcgccggagacaccccgcccgccccggcccggtccgcgggggcatgcgaggcaggggagggggcgcgcccggggctcccaccgacctcgcccgggcgcaagggccggagcccccgggttcccgagcctcggagccgccgcggctgtgctgccgccctgtggccgccgcccgcactgcgcctcgggcccggccgcgctccagcgcgtgcaccccgcactccgccctgccccggacctccgcgggccccgagtcttcctgccagcccctcggccccagggaggcggggcgggcgccggggtagacggcggggccatgtgggctttgctagctcgggagcggggcggggtgggaggctgcggggagccgggccccaatgcccggaggtcaggggcgccctggggcagaggaagcggcaggtaccccttagcgactcgtggcttctgcagcccctagaaggacccccagacgagggtctggaaaagtgaccccttcatagtcctaaacaagcagttggcaatggtgtgccgttctccacgcggtccgatgggaaagggaggccctgagccgcaacgagtaagtagatagtcagcaggaccacgtggacgcgaccaaccacaggtcacacttcggacgggagcaggacccggcgcccatccctcaggaccgccgagagccgggccctctgggccgcaggtgccgctaccttagccatggagccgcagcagaggaggccggcgctggaattgcaggctcgtcctggctgccccgccgcactcctctcacggaagtggctgtgccggaggcgcgagaacagaactctgttcagacgctcgcgtgctcggagaatggagcctggagacctggttcacacccgctatgtgtttaaatggataaaacgctcctcaggtctgtgagcctgcaaacaaggtccccactgccatctgctggccccacagacaagaacccacacaggaatgaagcccaaaatatcccataaactttccaaagagaaatgacaaaactgaaatagtagtggtgtcaaaacacagtgtacttctcagcccaatgaagctgggatgggtggcccagggagccccagacttcatggataggcttttcgttcacatggctcaaaatggcaccccagatccagccatcacatctgcactccagccagcagaaaggaggcagggccctcttcttcaaggatgcctcccaaaagttgtgttgccacagctgctcacatcccattggctagaacgtagtcatacgacccacctcactgcaagggaggctgggaaatgtagtctttaatctgtgaaatgtgcccgcttaaaacggagccatggaggaagaaggactagcgatctggggggtaggggttgggtgggcgaaaggctgtgcctccctcggtggcgtcaacatcctggccatgttgtcacatgcacttgctggcaaaattcccaagccatgcgctcacagtttgtgcagtgatgagtgtggcaaacacagctcagttaaaaataaacatcattttatagattagctgaagaatacaatgtcccacgagactatgtggccatcaggaaattaacttttctgacctaatggcccaggaagcactgcgggcagcgtctcgccccgtgtaacgcagcacccgcagaagtgcccgggatcagcctttgcctcggcgggatcctggttcctggttcttccaagggcatggcgaggtccccgctcccttatcttgaggaaagtaataagtaacccagctctttcaactcccaaggttactttgtcaataaagtgcgccttctcaagtctt

SEQ ID NO: 1230 - DNA, 2952 bp, Homo sapiens
gcctgagccagaggaagggaggaaaacaatagcaaaaaccaggacccttcggacttgccgctgaatggggattttcgtcggatgttgagtttacctggaatgccccggtgttattttgggaaggcagacatcccacggaaacaatgaagtggaaaagaaaacagctaaagcaaaatctagagcccagtttttgccaaaccagccccacgtgggctgggcaggctctggaagcccaagtcaggccgatgaagagcggctgaggccgtggggatctggtttaccaggagggcacatggaggatgcaagaaaaggaagagccgtattcaagtccccacttcagtgatgaggcagaaagaccctgcgcctgaccacgtgggaacagcctgcagtgagcggtgacgccgcctggcttgagctaagtgctgggctccaccattcattggctgagtgaccttagatgagaagagaatgagccatgtgtttcctgaaacatccagtggcctcaccggagaatctgcaagagccggtaaacccagaagcttggccgtccattcctggaagcagacattgtgtcttcgtccaccaagcccctggctctcaacactcactgtggtggcaagaacatggcaccttgaccctacacagttcttccatttttcagaagcaggtgagcacagattgctgggatggagtgagtaaaagatataaactggactgggcacggttgctcgcacctgtaatcccagcactttgggaggccgaagcgggcggatcgcttgagctcaggagttcgagattagtctaggcaacatagtgagaagctatcttaaaaaaaatttaaataaaagttataaaccaaggcttggggtttctgggtgctttgccaggacctgttcttgggcagaactgaatatatactcaattctgaggagggaagaggaaggtcatggctaaaaggtaggctctgaaatcagactcccggagctcaaatcccagcactctctgcttgccacttagacttcaggtaggggagggggatataaatgtttgagcctcagtcccctcctctgtaaaatgggggcagtaaatgtactgcacacagctgcaaggtgtgaatgaggcgatgcacgtaaaacacagtgcctatagtatcacattggggttttttggtgttttttgtttttgtttttgtttttttgacagagggtctcactctgtcacccaggctggagtgcaatggagtgatctcagctcactgcagccttgacctcctgggctcaaccacttttcccacctctgccttcaaagtagctgggactatagccatgtgctaccacgcccagctaatttttgcatttttttgtagagatggggtttcaccatattgcccaggctggtctagaactcctgagctcgagtgatccacccgcctcgacctcccaaagtgctgggattacagacgtgtgccaccatgctcagccccacactcgtctttaagaaaattaaaataaaattgttttaaacacagtgtctggcacagaatagatgctcaataaacaccagctgctacaattagaggggaaatcatcataattgttggattaaaacataataaaagaccccagttgccttgttcaaggcagtattttcagaagcaaagttttaaaagtttaaaaagaggtcagtattttaagtcatgtcagctccacagccacggaagtgctggaaaggcaccaagcctcctctcggtttgcagtgaaacgctcctcttccgtctgagggctatcgttccagcagagatcaacacaatggactctgggatggacattgttctccaacaggcctggccctggcccagctggggtgagcatttcctttgcagcattccaagaggcgacagtcccaaaagataattaaaaatcagctagcggtggtgaccaagagaaaggcactgagccctccgagtgtggagatagggcatcccgggttattaattaagtgtgctcacatttgcatggtgtagaggacaattatcaagctggagctgtcagctttaaatgctgtttgcatttctggatgactttttggcgaagagggtcagggaggctctctaaagtcatttttgggagtctggaggaatagttagcaattcgcacttcacctcgttttaccctgcaactccatggaaattccagaaagtcttggttttaatggtctcttgcataggcccatgacatgggtcatctctctcctacctccttccatgctgaacaaatggaaaggcatgtaacatagtgtggcaaggacttaggagtccagaagctcccagatgtgtgcacctgtggaatccgccaccacaccctccacacaccagcctctgcaaccagacagagagaggagaggtaaggggtgaggatgtgattgatttccatcctcggccctccaaggaggaggctgccaaagaaaacaaaggccactgcaggggggcagctcgtggtgacaacctgcactggggccggagggcagccagcatggcacctggatctgatcaagatgaagttttcatccccatctgcctgttaatgtcttctttaccagttgccaccccctaataaggggtatgccgtagactggaagtcactagggacctgcccagcatcctgttctaggcattgactaatccactctcctacatcctgcctcccatccacatggtccaatcagaggctgccatgcttgcacaatgtgacactgtctctatggacacattaattggtcctgatgtagaacttgacccaagatcagggtcaagttgagagaagacttattttctttccaggtgtttcaataacatgtaaaacttggaattcgatagcagccatcttctgccatgagaattgggaagagagaaagcctatagtgataataaagtcaaattatcctaaacgctaa

SEQ ID NO: 1231 - DNA, 738 bp, Homo sapiens
gtttgtagatggaaggaagaacttgtgtgcttagacctgacgctgggaggagatgctgccacctaggttacttgtaggaccctatacggcaacctcctttgccaggaactatttataaacatcctgcaggaaaatgagtctatatgtcagaatacacatttcccaccttgcccaacagtagaaaaacataagaagagaaaaacattaaaaaatgacaaggaagttaatggaagcaatgtgatggtgtttggaggtggagccttcagaaggtaattaatgcccttgtaagaagaggccagagagcttgcgcaccttcttcctgccatgtgaggagccaagaagccggctgtctgcaacctgcaagaggaccctcactagaagctagccatactggcatcctcatcttggctttccaacttccagaactgtgagaagtatatgtttgtggtttagtcaatggtctatggtaatttttttatagcagtcccagccaagacagtgcctcatttactacataccatttatattattatataggctcctttcagaaacccatgttcaaataagagataagatactgaaacacataacaccttcactagtttttagtatacaaatattgagaaatagtttgttattaactatctcatccaagaaatgcagattcatgttgtttctaattttttatatataattgacaaaatgaagaaacttaacaccatcctagattttagctgc

SEQ ID NO: 1232 - DNA, 2021 bp, Homo sapiens
acattgccagaaaacaggaggaagagcaggtctggagtaaggctgggggactcaagcgccaatgtgaagctgaagagcgtcctggagacagggggcggtgagacggagtctgcccaggccacaccagtggccggggtttggacctgggcctggggagggtcgctgtttgagaggaggacgcagctttataaaatgactccgctgtcgtaaagattaaatgggaccctatatgctgttagcatggtgcctggcacagggcactgtactaggcactggggatacagcagggagcaaaacagtgaaaacccctgtcctcaaggagcttctatgctggattccacagccacacactcaagtctttgttgtcagccctcctctcccttagtctgcaccctcccctgagcctctgcctcagcctcctcccgggctcaggattccctgaatttccctctcctcacacatcctgtctctaagctccagatgcgcttttccagtcacttgcaatggggtgacctgcagacgctcaaacctggcacatctgaatagtaactcacaatgcccaaccccttctcaaacctgctattcccactgggttccctgaggagccactgtccagacccctcttcctccaacatgcagctcttctatcgccatcgccaccatgaatagagcacttagtgcaggcaccatgctaaaagcttttatttattaaatcatggaatcccctgacgtccctaaaaaccattccacttgtttgcagataagaaaaccgaggcggaaatcgttaaacagccttaggttacacagttaggcagagcccggacaaagagcccaggctgtctggcctcagttgtgcttttcctgccgctgtgctgtcctgcctcgggtcccatgggcttgcctcagctgtaccactgacctcaggcccctcctgggccgcatctagctctgccctgggctattgaagagcctgctcactggtatctctaattccctctggcttcaccacagaccctgctgccagggctgcctatgatcccctcccttacaggcgggatcacttccccagcaccaccacacccctgcacccctgcaattttccattgtttacaggcagcctggccctgttccagaccaacttccccagtcccatataacctctccaagacccttcttctccctactcattccccacgtgttacagccaggcaggccgtccaccccaatgctttcctaactcccgtggcttcctcaccccgtctacctttactgagctctgtatcctttaatacccagcctcaaaggccgtctctgctgcaaagccctgcctggttccctgtcagactcctctggctctctctgctgtgcccccacgggtcttcacctctggctgggttgacttcataccacctgggattattgtttgttatctgtgtccatctgtgtcctccagtaacccatgatcttcacaggccagtgccctgtgttagtcatctctgggtccccgtgactgacggggctgggtgcagtgcgagcctcagtactgaaatgaacagggccggcctacgaggtcactccgcgatttggggcaggaaagatctgagtttctttctgcactcccgtcgagtcctgctgtagaaaccacaaatggggaatgatcgttgaatcccagaagactgagcaggaagggccgctgcaggtcatctgtgttaattctttatctttgaaatgttggagtgaggcccagaaatgagaaagacctagcccacgatcactccacagggaggagttgtggttggaattcagacccctggcttctagcccagtgtgctttctgctttgctgaaccattccatctttgctttttctctacacaaaccacctactacaataacaacaattgcttatgctgaaaatcagcccagtctcatagctctggaacctctctttgtccccttccagataaccacaggacactttattttacacttttgtcataatgattttacactctcattttt

SEQ ID NO: 1233 - DNA, 744 bp, Homo sapiens
catttggaggtatgaagagatcttggaaatagaggccatgtgtgttgaaacaagaccgaacaactccaagttcctgaagacttcatttcaccaacccagaacctccttgatcatcacagtgttcaaatggtttccagcaacattcctaccacctactttgctgacacaaaggtgcataaacagaagtcctatgtggtcgaaccattttacattttcaccagcaatgaaggagggttcctgttgctctaccatttggtactgtcagcgttttggatattagccgtcctaatagcctttgcatggatgattgtctgtcctctgttgggccccttctgaagagttggagttggctttatacaattattcccaaatcttctaaactgacagtgagggagagtaatttgaaaggactgctcaactcaacgtcatttgaagatttgcaccacagctgcatttttccaatttcctggcatctattctgctctcctggacttttcaaaaacaattgtaagtggatgaataaatataataactgattccattgatactcttagaccatcctttggactttctgcttttggacattttacagtttaaaatttatttatcatctatcgatgtttcccaaagaaggactcaaagtacacattgtcaaagatctcatggatctaattaaggacagggaacaggtacagaatcatacattgtctctacacagaggggataatttctgaaggaaagaag

SEQ ID NO: 1234 - DNA, 2117 bp, Homo sapiens
aatttaagacacttaccaaatggatgtctcgcaacaattggctccgatttcaggccttcccctacaccatatttattttcggcactgaccctgaaggtatattccatgccctcatgaagtctggttactctaaaggtggttttctggacagctgaggcgcacgtcacccacttgttgttcacagaatccctcttctctaggatatagttggtgatttcagaacctccatcatcctttggaggagcccactttaaggtcatggcttctgctgtgacttcatcaaatttgattggtccagtggggatgccaggcttgccaacaacctttatggagatagttccttccttggtgccagcaacattcttaagtgtgattgtgtattttccagcatcagatttttggcaatcgtacactataagagttgtgttaaccgcagatgactcaacactgactctagtgtcagttgctagaggatcttcccctttcttccaggagactgatggagctggcttgccttttatggggatcttaagccggaagttgctgttttctttagccaagtagcacaaatcaggtagaccctttaagtcaagatcaggagccactgtaaaatagcagagataaattactgttatttttaaggccaggcgattaactttttcaaatagttctagcttttaacggatttttagataagctagtgagtgggacacaagagtgcactttcgatgacaataaaggaaaaatgaagatgtgtgcatagagccttaccaacatcatcccttgccacaacagtgatttcgcttggggttccttctccattttcattctcagcactcactctgaaggtatattccttcccttcagtcaaatcttttgcagagtactgtaggcttaaggatttcataactcgttgccacttattttcttcagtcaggaaatcaactacatatccaataatccgacttccaccatcactgtgaggctttttccagccaatgctacaggatgacttagatacagacctcactttcaggtccacaactggtccaggagtttctaaagcaaaggagaaatgataagtgtaagccccatataacaaaggaaggatataactcaaaatgatgggatgatggttcatttgcttacgggaagctttgacagcatcacgagtttcaccgggatcaccaatgccatactcattttcagcaaacactcggaagaagtaggattttccctcctccaaattagctactctgaagcttgttttggagcactcagttgtcactgtagaccaggatttcctctctgcatcacgtttttgtaccacatagtttatgatggggcttccgccatcaataatgggaggctcccaggtaacataagcagagtctttggatatttccttaacagtcacattgacaggtggcccaggagtatctggataaatagtaggtaaataagaaatgaatgtgtaaaaaatacataagctattttaaaatatatatgattcttttttgaaatagacttaccaagcactttcacaacaatggtatattcctttttaccacagctgttctccagggttaagatatattttcctgcatcatatttgttcacattttcacagcgcaagaaagtgtcaaagtcagttgactttatgtccagtccaatcctgtctcttagattgacatttggtttagaccaagtaatctttggaggtgggcgtccttttactggtacatatagtctcatagtaactccagcacgtaatatgagtgtcttccttaagtccgcatcaagttctccctcaggtggaactgtttaattttgggtgaagaagttaaataaaaatttaatagtcaaatgtatttccagggactggccttgtcactcctaaaatacatttattttctagagctgatttcttgttctttaaaacttccttaatacaatcctcaaaatcatttttctgttctgtactaattgttgatctttccattttccactatgctttaggcttaaccaggttttccccccggaggatctgtacctcctctttcatgagccttatgtactctgaaatgctacatatattaaaaggaaagtagacgatt

SEQ ID NO: 1235 - DNA, 396 bp, Homo sapiens
aaagtcatacttcaatcctccagaatagattacttctgatttgaaaggatacatttcttagggaaatcagtgcattggttacatgaaaaccgtgtgacaaccttggaagtctgaaagagcaggagagaggctaagcacacacatattgtgattttaagagtctcaaggtgagaagaaacatcagaagcagttgagagaccaggacgtgggtcctcaaaggatgaacagaagttcttttggataacattttaaaatgtttcctccagagttatctgcctcattaacaatggtttgagtctcaagagtctctcttcgattttacaaacatgatttgttgctctgctataaatgcatgctgctctagtccttcaataaacccacaacatgttttcacca

SEQ ID NO: 1236 - DNA, 5941 bp, Homo sapiens
gcacattctctatatggcagattcggtgctgtctctggaaatacataaacatagagcgattcctttttctgttgaggcaaaatatggatttggttaatttctattcacgtcatgaatgtggtatgtggaaggtcttctgagagcagaaagggatgtttcacagcacagcccggctgtgtggtgctcagggcaggccctctggaggaggtgagcctgggctcttggcctaatgtttcagctctcactttccagtcctgagctgttgttgccagtccatctttcatgagaccattggagtgatctttctggtcttgtcacttcatggtttaaagtttccctgggcctacacagtgaagtccaaattcagcatggtattacaagacccttatgatccagtcttaaccattggttaggtatcctacccatactgtttatctcttgaatacctctatgctctttgacaagtccagcccctacgtgttcatacctcacttctgtgacacagccttgcttcagggctcccaatctctgtagcctccctgaactgtgcatttgctctgctgcttgatttgtttctgtgactgttccattctcctcgggacacatagcagggaccttgtcttggtccttttttttttggctttaacagaacatagcaaagaacctgacataggtgtagtctgagtttaccactggggttatcacagaggtctgctaagtgaatacaacacagtggggacccagaacctctagaaagggttgaggattacaatccccagatagctacaatcagggaataatgtaacctgtttgcctagggtgctacatggtaatcttgaattagaacaactgagacttccatgggaccttagggtgataaccattaaacctactctttcagtgtttactttgtaaaagcatcacactaaggaggttgtcatttaatcctcacacctaccctgggttattaacactgttgatgaagaaagccttacttggctaagatatggagcaggttagtaagtggtagaatagatactccagtcctgtctccaaaatgcaaatttttttttaattaaaaaaatttctaattttcaatatatttatttttgattttttattttctgtagagttggagtttcgccatgttgtccaggctggtctcgaactcatgggtgcaagccataccccaacctcgaccttccgaagtgttgggaatactggcatgagccatgatgcctggcctcaaaatgcatacccttaaccactatgctctcacatttttagatgtgggatttctgtctacgacgtcgcccccactaagacctagggcttaggtgtcgaggtgggaaagatcttgaggcttttcttctcaaaattaatcagaaacgatgtgaattttatatctctttctgaggttttccccataagctaatcgggattagtagacttaaaggtgaatgaccaactgtatccctggttcactggttaggaagagtacatagtctttgtgtataggctattttcctcggtaaccttgggcaacatgcttgacttctccaagccagtctcctttgtgaaaggtgatatacttacaagacattatattaaatgagaacccaggcaggttacctaccctaccatgacactggaagtattctttgccttaagaaaaggagaattgctggttggttccaggtccggtgggtaccctcatttcccctgggcaattttactgtaaaaatagaccaaggatctcaaggcccagtggcttttgccttctgggatacttttttacctccctgtttagtagtaagggtcacattttaaattgcagctatcacactggagggatcagatcatttagaactttgactgcttaaatattactcttgctaagatcttgagcttgtctcatgttgacagactagtgaagttggttacgttgtctgtctcctcactggagggagagattcagagttgccctgtccaacccagtgctatctctggaaagggttggattgaaatctagtctgccttcattctgaggtataatcatgagggttaggtgaaagggtcccgagtgagaagatggcatgggtcctagggtggggagcccgatgccaagtcagacttcactcggtatgtttattcaaagccccactttcactcgtagcatatcataggtggtctctgcaagttgctgaccctgattcagactgttccataaaagtcagacacttggttttagttcccaaactgattttgatgacattcttgactgcagggcttggagttaaccccactgggcctgagttgtctctctgtaaagttacacatcatttcagactcaaaggcctctagcatgcagggtctggtgtcataataggcaccaatgggaaccattactgtcattgccttttttggctttaatcttcccaattgtaagttcctttcatgtttaaaacaagtttaaaagacagggggacttaggcatgctcaggcagtctagcctttaatgtaagaatttcaaaacataaaggaaaaaaaacttttttttttaagcagtactttgtgagttacaagacagcagcagctccttagtgttgattgccgaggcctttttggtttgaaaactctgcttcctttgtgaatttggtgttaggagttcttattgttattctgcagcctttactattgtcctttatttactgaacacagtgaataccaagcactgtttattagaggttaggagtaggggcaggtgattaaaaaaacaaaaaagctaataatctcctcaagcaatttctggcctaatagaattatagtagacagtgaagtatctaaacccagggaatcagattgaggcaccatgtccatcgccttgagaattaataggctgcatttctgggttctcctttttttttttttttttgcccaactgagtctttctgtggacttacatggaacttcttattctcttaaatcattaagttacttgacaatattcttggatttggagaaactggatgtagggccgtatgaaaaaatcattcgaaatcagatttaggggtataaggttggataggaatgttttagaaagaagaatgtaaggcagataactaatttgtcacatccaaagtataaaactgctactttttccctagaaaagggaagctcattttaggcagcctaaaccagtaagattttcttcctcctccaagtgcagatttttgtacctttcgtttgtcaaaacattctttggccctatgcatgccagagtgatatagaaaggaagttaccacatttttttgagaacaaatcactcctgataaaatttcttagacaattgataatcattttaagaagaaatttaattgtatttagctctgtgtctcgcccctttggtgtcactcttctacctcttccatcactatagctaaatatttagaagtatatcttgacacctagcacaaatgttttggttaagtatcttaaaactgatggatggtatggctggggcagcatggctcacgcctgtaatcccagcactttgggaggccaaggcgggtgaatcacctgaggtcaggagtttgagaccggcctgaccaacttggagaaaccccgtctctactaaaaatacaaaaattagtcaggggtggtggcgcatgcctgtaatcctgtctactcaggaggctgaggcaggagaattgcctgaacccgggaggcagaggttgcagtgagctgagatcgtgccattgcactccagcctgggcaacaagagcaaaactcagtctcaaaaaacaaaacaaaaacctgttggtatagtacgaaagaaacgtcttgcagttttctgttgcagagaattaattagaaccaacctgttggattatacacattcacctttcagaatcctttcttctctgtggaaacccacactctcagcagtgtgtgggaacacagtagattcttaaggaatgcttgttgaatgttgcagtctgcatcttcttgaagtaacagaactgttggtagctgtttaaaagtaaaatgtgtctaaagaccttttggaaattaagatgtaagagattaatgcaccaaagcagtctcttaattacttaaaatgaattatttcaaagaatctttaattgaattttctgtgaagtctggaatttgtaaattatgtccctttgttcaaaccagcccctgaaaagaacaattaaggcaattaagatagcattaaagttttcaatgaagttggcattttctgtgtattaagattagatgttagctgctgaagtttgtggaggtcggacataaagcttccaacatcagtaatgcaaaattgtcttgaacctgcgataaaattttgttggacttttttttcattgcagtgaaaagggccatgtagcatgcctcaaagccaggttactcagcctagtccttgtttaagcagttttgatattcattcaagttcaattttctcactgattttatgattaatttcttggaaaatttgaaagttttcaagaagtaaaaaattaatatcttgttatcccagtatatagagattaacttcagttcaatgtttggtgcattttcttctagtctttttttcaatgtataaatattaaagttatttcatagttgagatcatactgcatatatgattactgtatcttgcttttttcattttaacgtcgtgagcaattttcccatgacattacaaactgtctttgaaaaatggaaaacatttggggctgtcagcataactgaaaatgttttcttggtgtgacacatgtatctttgtaattggtttgatttagtgtgctttatttcaataaaaattcagtattataatttacagattggggtggggagtggtatctacttcaaattactgaaatcttcctagtagaattcctttttaaatgtttgaactcccctggtacatcttaaacacgacattgacactgcaagtgcttggatgtcctggcacctcagaacacaactttgtgcaaaaggagtgctgtgcatctgaatagtgcaattcatttccaatgcaagaatgccagtttcttagggcccccggtcaggatattacccacttggtttaagttgtgatttcaaatcccattttctatgggagatacactggtggaacaaatctgcagagggccctgcacctgcgctggtggatcaacggtgtcttctcacctccagggctagctgccttgccttccctcgtggggcttaagtggctgggaagcagatagacagtgtagatgaagtcctgggccactggctgctggactgaggcagtgagatgactgggctggcatttgttctttctctgcctgtgtgtgacctctaactatgtgcctggaaactgaattacatgtaattaatgctgcaaacaggattttcttattgcctaagcatgaacttggtatgaaaataatagttaataatttactatgtaacttggattcttataacctggactgtaagtttgttttagctccagtgggagtttccttttcaaagtatgatgaaaccatcctcatcttttctacccctggactaatcatttaaaatggatacagacactttaaaactgctgagtttatcttgtgttaagcaattaagacttctctgtctaatcatgctacttgttctgcttttgtcaattgatactctcatagcccttttgaaaaagtatgtttttgtagaaattaagttgtatgccctcaggacgtacaacttggttttttttttttgttttttttgtttttttttgttttttttttagttctgaagcatgtttagatttttctgtacttgtataggtctgattgtttatgtggcttagctaaggtttcctaaagcatcttctagtagctgtcattggtttgtaaaataaaatttgggctgtcaaaatgca

SEQ ID NO: 1237 - DNA, 2139 bp, Homo sapiens
atgagcttgcttcccttctaccataactgtaagtttctgaagtcctccccagccatgcagaactataagtaaattaaacctcttttctttataaattacctagtctcaggtatgtctttatagcagtgtgaaaataggctaatacatctggtgaatcaataattaaaatgtagcatagctataaatggaatactactcagtaataaaagaataactcgatacatacaataatattgatgaatctcaaatgcattatgggaagtaaaagaagccaggctccacttatgtgacattctggaaaaaggaagactatacggtcagaaaacagatcagtgtttgccaggacttgggggtggggggtggggagtgattgactacaaaagggcatgaagaaattttgaaggggaggtatggaacaggtctgtatcttgactgcagtggagttattgatacttaccaaactgtacaataaaaagtaaatttttattgtatgaaaattatgcctaaattaaaaactattaataaaatcagcattagcaaaatatatgagtttatacacaagagactactcaaccattgggtaaactaattatttttaaacaaataccattgattttaatctttttatagtttttatacaggcagagaaataatagtgattctgctcacctaaaggaagatagacccaattcaaaggtacagaattttccccaaatagtatcataatttttcctttcagattccaaaggatttgcatgtaaattctatcatgtgatcctcagaaccaccctatgagggtaagcagaacagatgatccatgatattccattttataaatgaggtgcaggttaaatatttagccagtatttcttgataagtatagtccatttatttcaacaaaccttgattgagggccccagtacttgttgagcttttgctgagccacccctgctctagaggagcacatgctctggaaatctctaaggaaactactacaactctaaatagatatggtgtatagtgatactgtgactaaatattcactgcaaatttcctctaaaattatagatatacattactggaataattagtatctcaacatcttcattaactatgaatctactatgtatatatcatcaccatgtgagtattaatttggtacaaataggctgccaactctaaaattatttgatgtagggcaagtacttttatctttttagccataaattttctcatctgtaaaatgagaggagtaggcatgtgatcattaaatcctgggttacggtaggaggcatcaatatgaaatgtttagcttaatatagatacagatgggtaaatatagaaatacttaaaaatgcatgtggattcatgtttaatacattagtatacacacatatatttccaagttctgtcctccgaaggcctagaagcaatgacaagcagaagcaaggagcacacccagcatccagttttttgtttctaatactgttctccaacaaagggaaccagagcccttgagaaaaatgcctaattctaggactggggcaggggatatacaagatgagtctgaaacatcttatagtgccagaaaataaacaagtgctttaaaaagacacaaaaaactgatggtatatcaaagtgacataggagccaactaaaagagatcccaatagctaaagctagaataattcaaaaaataagtaattcagcattggatttaacccaaattataaaataagatccatgagttcatactgatacaagtaaatgattgaagaaacaaataattgggagataattctcatattgaaaaattccaaaaaatttatgtactctaccctcgagaagatggaacataattctccaccccataagcatgagtcgagcctagtaaatgtttttcaaagagcgcagtatggaaaggaggaagaacactacctcaaccagctgatcaaggctaacatctctagtatgtcattagtggcatgtaaccttgatatgatatgatgagaatagcatttgatctttgatctgtttcctccccgaaactcattgccccagcctaatcatgaagaaatatcagacaatctcaaattaagtacaaaataaccagtactcttcagaactatcaaggccacc

SEQ ID NO: 1238 - DNA, 800 bp, Homo sapiens
ttaatgtattttgtttctttttctttttttcccagcacgtccttactctggcactacgaaatgctccagactcgtgtgtatttcttgctccaccatagaatcagccatttctacaaatgtcactggtttcttttatggagaatgacattggaaaccaagatctgactactaagtgtgttctttgctactgggttgtcatttctcttaaggcttccaagctgacagagcaaacgagtatatgacacatctgattttttatttgactgtggaactctgtatctatatacacttgcaattcttatcaagtaaaaatacatcaaagatatcaacaaccacagacgtatacacccgacaagaaccgctgtatattctagtacatcatttattggaccaacaaatacatggcatctggcaaggaattgaaaagtggcttgtctatctggaatacagggaggaaggagttgaaatgagatgggaagagtcatctgtatgcagaggaggtataaagtcatgcaaatggataagatttcaagaagaaagaagaaaaaggtaggctctgagtttggagagttgaatgagcctacagagataatgaagttgttgctggagagcctccataacttctgttgagaaatcggccttaatcttattgatgatgactttcacatgatcctcagatatctgcctctagatcccagatgagcaccagttgcagcagtcaaacgtcatctatctgtatatcaagataaattatgaaaggattatataccaactgtctaaatgacaaagagaagaaaggt

SEQ ID NO: 1239 - DNA, 1021 bp, Homo sapiens
agggatagctggtgtgcgtgcagcggaaggcgctaactgccctggatgtggagacccgcggactggacgtgagaggcgggcaggggcagttggggcagctgcccctacaacactgaagaattggaataggaaagagtgtgggggtaggggacggggactctttgtctgcagttggaatgcgcggaggggcatggtggaatgtgtcgcgtcccgggaccggacgacaggaggcatgttctgcgctagcaccgtgactttgttcccagcgtggggactgtgggagagatggagagagactggtacagaaatggtgagacaaggagagagccataaagaggaagacagagagaaagaagacaaatgcataaagaggttcagagacgtgtgactgtggagatcgaaggcctggttttagggctagcgaacaccttctccctttggttttggtccacagaagactggtgatacagactccttatcagtgtaattgtggggactggtcaccagctcttgcttgagcttttccagaagaaacttcactactgaaatattccaagaggacttgatgctgccacaaagagaagagaatgaataaagttgtcggctttgtaagagccagacaaacagagatacccagcactaatcaactttgtggcaaatccctccacagcctaagaaggatccctagcagcaatcctcaagagcctcagcagattggagagatgcctctttgattctgtcccagagctaaagattggaataactgtccctccccctctaaacccacagtctgccacaagaacattttaaaccttcctccatgatgggcagcagaactccctgactagtcctccagatccttctcaagcacagaatagagagagcatgatggtgagtgaggatactgtccttcctgcaggtcttcagttccaccacactctcctaagggaaggaagaagccaggcctcaatgctgtacctctctctggaggcagcaggcacaagtggaatggaagtgatgg

SEQ ID NO: 1240 - DNA, 553 bp, Homo sapiens
cctgtaatcctggcactttgggaggctgaggtgggcagataacgaggtcaagagatggagaccctcctggcaacatggtgaaaccgtgtctccactaaaaatagaaaaatcagctgggcgtggtggcgcacgcctgtagtgccagctacttgggaggccgaggcaggagaattgcttgaacccaagaggcagaggttgcagtgagccgagattgtgccattgcactccagcttgggcgacagaaaaaaaaaaagagagagaaagtggcacagctgagatgtgaacctagcagtctgggccccagcctgcttttagccacttggccagcattccctgaggtgggagctttcagaaatcctgatgtccagactgtaccctatcccgatgaaaccagaatcgctggggtgggccccaagcaccagccatttcttcaactctccaggtaaagaagagcgaccgggacagcgctgaagggcaccaccttgggctttcgaggcccaacacctcctcagcccccaacatgctccactctctcaaaaaaaaacaacccgcg

SEQ ID NO: 1241 - DNA, 688 bp, Homo sapiens
tgggcgccagtggcttcaagggaagaccttgggacctggatagggttctccctcgcaccagaagtcatcggcctgtggggtctccaggagccacacctctcgaggcaggtcacaggccgagctggaggcctccttgggcctgaccggctccagcacccgagacagactttcaccatgttgcccaagctggtcccacattcctgggctcaagggatccacctgccttggcctctcgaagtgctggtattacaggcatgagccactatgcccaggcaatccttcaggaagaagaccctggcgaaaattaccttgcatatcaagagttggcggatgaacacgaagcaatcaccttgggaaaaggagtgatgaaagtagaaagcactaaagagattctttatagttcttgatgggtagcctgagttgctcttgccatgtttttgtttgttttttttcactcctcaccgtatctttaaatcctatttttaaaaaaagtaatgaagaggtagccaagatgttcttcaacagatgaaaggataaataaatggtggtacatccagataatggaatattaatcagttataaaaaggaatgagctactaagccatgaaaagacatggaggaaacttaatccatgttactaaattaaagaacccaatctaaaaaggctgcatactgtgtaattccaagt

SEQ ID NO: 1242 - DNA, 643 bp, Homo sapiens
atttccagagagaccattaggaacagactgcctgcgctgctgacttaaggccccaacaccaaacacagaagcaacagccttacacagagtgttcagcaagctccaacaattgtgtaagcagcccaagctgacagagatagaaacaacacaaggacccatcagcagacgaatggatgatcaaaacgtgataggaaaaatgaggcctaaagaagttaagaaaataccatggaaatgtcactgctgaactgccatacgtaggatccgaaagaaattggaactgtataatgatgactgcacaagataccaaatcagaagaggttccatttccaagttctgattcataagagcttccaaagtagagccggtacatattgaattttgattcatctggaaggatctcggacatctctaaagaaacaagggactgatctaagccacattctccatctccagctgaatcgtcagagccactgctatggttaagaaagaccattgaagacagacttaggtcactatcagagctggaacttccatcctaaaatacacaaaaggacaaccagtttaaagatgtaaacaattttagtctcagaaataaataataacatagatagcattctattagagcaatacaagaaacttagaa

SEQ ID NO: 1243 - DNA, 2795 bp, Homo sapiens
agattcgacacaaaacccggaaggaccccgccgaaggttttctccggttcgggagagagacggagtcccgctctgtcacgcaggctgccaggctggcgtacagtggcgcaatctcagctcgctgcaacctccacctcctgggttcaagcgattttcttgcctctgcctcctgagtagctgggattactggcacacaccaccatgcacagttgcaggaatttagccaattcagaggtcttgttctccataatttggaattttccttcggatttgatcaagttggatagagttggtcaaacccaatgggaaaaagatgaaaacaacaagaaacagaaacaaacagcaacaacaacaacaacaaaaacagttaagtgaaacaaacaaacaatcacacaatttatgtggtcactgagtgctctaatagtaaggagaaattaagaccagctggctgttagtcttaactctagccaagacaaaactccaattcagctacttacctagtaatgagtctcaggctgaagtctgctctctcccatcctagaagcaggaaaaaactgaaactcatcttccctgctggaaacgagctcaaactccagaaaggagttacctgccttccatcatcatggacgcaggaaaatttgccttccttgttggaagcaagtaaaactccaaaaaaggagttgcacagcaaaataaacttcagatctcaacaaatttggggagatcagggattctctgggggtggggtggctcccaggcctcagccaattgtcctattggtttcagccataaagacagctcaggctgctaccacgcactgataggagatttgtcaaagatcgaggcatcttcactcagaatccctctgtgattaccaattgtgaacacaaaatatctgatatgggtctcagtcaatttagaaagtttattttgccaaggttaaggacacatccatgacatagcctcaggaggttctgttgacgtgtgcaaggtggttggggcacagcttggttttacacattttagggagacatgagatatcaatcaatatatgttaagacatatatcaggtggtccaaaaaggtgggatgactggaaacagggagggggcttccaggtgataggtagataagagaaaaacagttgcattcttttgagtttctaataagcctttcactgaatacacaatttacaggactaatcacttaagccttagcctggctcagtgaaacaacagggcaaaggaagcaatcagctatgcatttgtctcacgtgagcagagggatgactttgagttctgtctagctatcttgtttaggaatataatgagaggcaggtttgcgtgcagtttccagattgacttttccctttggcttagtgactttgaggtcccaagatttattttcctttaacatttacaaggagaagtgaagaaataagtaaattagagagctagaaggatggaagtttacagttagagagagtgggatgttgaaggtaatactggttgcatatttcttatccaaaatgcttgggaccagaagtgtttcagatttcagatgttttcagattttggaatatttgcattatacaggttcagcacccctaatctgaaaacgtgaaatccaaaattctccaatgattgtttcctttgagcatcacaatggtgctcaaaaggttttggattttagagcatttcaaatttcagattttcagattagggataataaacctatatctcagaaacggtacatttctgaataatgacaaattgtcattatttgccatgagaattgtcattaatgtgggtggagatggggatgattgtaggtcaagagactgaagcaatagggtaggcttgggtgttagtacggcccttcatgggaatgtgttgatgtcatccagggtcacgggaggcttctgagtgggaaggaagctgagagcctatgattacggtcttcactgatgaaggcagacagtaggaggttggcagatggtgggcactgactagactggaagtgccaagaacttcagtggagcaaggttttacccaagacacagaggttgtggtctagagcagcccagggatgaaggatcacccattggagaggactgtggggaaagcagagtcctgggagatgaaccaagcatcagttgaggctggaacagttaaaatgtatacatcaaattctctccaaggacactgtacccttggctgaaaattccctccttagtctacttcccatcccaaattctacccatccacactgtggcatcctaggtctctctagcagctgaacaggcaggcctctgtaacaactgtttcagcgctgactgagtggttaagttaaatattaaaagttgaaagagccagtaaccttatacaaaggctggaatagaacaaaagcccaccacaagtttttgcctaagtctttcctgtgccttgaaccatgacaagaggaggaaggaattcttaaccagacccatttaggattaagtaagtttttattggctgggtacggtggctcacacctataatctcagcactttgggaggctgaggcaggcagatcacctgaggtcaggagtttgagaccagcctcctggccaacatggtgaaactctgtctctactaaaagtaccaaaatgagccaagcatggtggcgggagcctgtagtcccaactactcaggaggctggggcaggagaatcgcttgaacccagaaagcggaggttgcagtgacctgggatcacaccactgcacttcagcctgggcaacagagtgagactccatctc

SEQ ID NO: 1244 - DNA, 448 bp, Homo sapiens
aggcaaagccagaaagccctggcaacccaaaactgaaggatctggggctttcttcctgcaagctctgctcagcgaggggcttgtgctcctacaagctctttgctacataagtcaagccaaacttccatttcccgacatgacatggccaaataagagaaggccaggttaccagagattaaaaataggacgttgctgcagagtcctgggaccggctggcaaatgacacaggaactttgggagcgcatggactcaggccaagcggccgtcctcaccctcggccacctcagggcagggacgaagagtaagcccagcctttgatggtggggattagtcccaaaattctggagttcaccactcctcccgctacactggctttatttcaaatctctgttggtccatgtcaacatcagcgatgggagttgaaagaagtaaaacagtgactcgtgca

SEQ ID NO: 1245 - DNA, 1569 bp, Homo sapiens
gcgatatcccctgggtgggcccgggctgtgaagcagggcggtagttggcgggcgatgctatttatttcactcggattccgacttgggtggtctggggagcaagggatttgtgtgtttgcaaccgggtgtggcggcgagggaggggcccggccacccaggtgggccagcgggatgcctgggaggccggtgggtttggctgaccacttcttcccattcctcagtgagagacttgggccctcccggtcatccgagtctgtcccgaaggtttaactgcgcgcggcgaggggaggccttgtaggtttccaaagggcggagctccagtgggaaaacttgaaacttgtcgtctgcggatatttatttccacttcttgtatggcctgaagaatctaggaggagaaaaagccagataccaaacttacggccaggcagacgggtcgcgggtgttgacagggtcctgagggagtttgaagccttattctcgagccgcctcctcttctctacccacacttgcaccgaggtcaccccggcaccctccgcaccggttcggttttggtctctgcttgtcctctcagtccttggtactttcgtctccctcagccggaggtggcaaactcagacatctacgggcgcccgaggccctcgcagccctgagccccagctttcacttccctgggctgcccctctccgggagcaggcagacgccccgttctcggagcccagcgctcacttagagcgactgaggttggtcgaaggatctttccccacatcccataatcagggccctaggacactcgcaggtccctttaactctgcttctgtcattacactagaacaagtagtgtttctgtttagagtcccatttcacaaattggttagtggaggcacccgtggcctggcagcttgcacagtggctgtccacctcgggggggtgtggacctgagccgtggctcagtgacaaaccaggcacccaactatgcaaggcccctgcctggtgggcatcctaccctctggactgggcccatggaagccactgggcgggcagctggggtgtagttcatgtgaagccccattcccctcacgcttttggggccactgtgaatggggccaggaaacggatttttggtgcagctgcattccctaatagacctagttccctccacgttagtgtagacatggccttgggggctgagcgcagcagccaggctgccagggctgggggcgggtaggaggcacggtagttggtgggtgggaagagggcctgggtggtggcggtcagttagcctggctgggtgaggttggtgaggttgcggggcggggtggtgaggagagcaggggtcccagggaggcattggggtgctgggtaatgacctcggccctgggtttctcctctccctgcgggacaggagcctcagaaagggccaagggcaaggtgggcttggggggctctgggaatctcagctctagccctgtatggccaggatctgctgtctccgtccctcctgggccccagcagctgtcctgcagctgtcagcaggagggcctggctttaataaagagtggacaaactgaa

SEQ ID NO: 1246 - DNA, 622 bp, Homo sapiens
gaaagtgtgcgctacacgccgcctcggccatcctccgggacgtccccacttgtccgcgggaggttgacataatctggtgtcaagaagtgggaccaaagtgagctcaccttgatggatcggtgactcctggaatcacatgaagttcccacattgagcccctttgagctctccaatcctacagctcaccttttctgtcatggtgaatctcctctcaggttcttgaactccctcattttgggctgcccacctgtgaagaagattgaggtggaataagagcaaaacctcaagtggggccatttttgcttcagaatgaaatagaaaaaggccacagctgaactacattttctagcaatcctcagaataagatgtggtcattgactgaattctggacaatggaatggagtagagtgaaatacatcactcctagtgacaaggaggcactcaagcatgagttacaacacaaccgacctggaatacagctgaaaagattgaagcaacaggttcgcaggggaaggcctttacagcttctttcgactctgacatttcaggatcagcacaattctcccctatttactgctgaagcaatcaactgggattatacaaaaaaattatttgtattgaa

SEQ ID NO: 1247 - DNA, 556 bp, Homo sapiens
gatcggagcctggagccggtgtgtgctgggtgccgagaagagacagcgccgccggccgtggggagcggacgcagtgatttgctccccctcgtgcagcaacccccacacccagcaccaggcccccagaactctccttccagctgaactccctgggaacaagtcagttgggctgatcactgaactcacatttctggacctgaggagcctgttcctctcacgccctcacctggctgagccgcagtagttcttcagtggcaagctttatgtcctgacccagctaaagctgccagttgaagaactgttgccctctgcccctggcttcgaggaggaggaggagctgctttccccatcatctggaaggtgacagaaatgggctgggaaggtccgaacagcagggtggatgatacgttttgggcaagttggagagcctttgcccagattggcccagcaaggagcggttttagattagagacactggctggattgaggagtagaaggctcaaacaacccaagccctgatccattctcacctagcggctacaggaagctgtgtctg

SEQ ID NO: 1248 - DNA, 820 bp, Homo sapiens
cccgggcagcctgcggggggcagcgaggcgcaaagaccatgccccaagtgccgagggaaagtcctgagatgcgcgacttgggacgctaggggccaagctccgacgcggggctgggtgcacctggacgcacctcacacgccgcgagctaagcagaaaagggaggcaggctgccccgacaccccactactcaccgctaggtttccgtctggcgccgatccggctgcgtcacgccggccgaacgacaccccgctgagtcgccgccgcagggaaggtaccttcggccccaacgggaaaagccaatttccagtaattcgcgcccgaccaccggggagagatggagtcttgcactgttgcctaggctggagtacagtagtgcattcttggctcactgcaacctccacctcccaggttcaagagattctcctgcctcagcctcccgagtagctgggattacaggcgcctgccaccacgcccagctaattttttgtatttttagtagagacagggtttcaccatgttggccaggctggtctcgaactcctgacctcatgattcacccacctcagcctcccagagtgttgggattacaggcgtgagccaccgtgcccggccaagatgaacattttttaaaaccaatttttcaggtataacataagatttctagccaaaggaaaattttgttgtattaattctaacatttgctgtgatttggtattatgtggtatttcttttgtgctctaaccaaaatcatgctagatttagatgccaataaatgcacaatttgaattgaaaacagtctttttacctcccaaataattta

SEQ ID NO: 1249 - DNA, 4375 bp, Homo sapiens
gtgttgtcccggaagtgccttctctcctcccgggtctgcgcggacgcggcctccttacctcatttgtcctcgcccctccccgtccctctacgcgttttggtccctgtttggtgctttctgtttgcagctacggcagtgagtatgtatgtgacggaccccgagtcacccgcggcctgggacccctgcctaccctccgtctcgccagccgagctgtggaactagcgcgtgccccctcgccgacctcggcgtctccggtccgcccctcacttgtggtggggcgcagctcctggtccctcagctgcgcgccgccccacgcggccgggctgcgggtctagggggtccgcatctccctggctttccaagggctaaggtcgtgattctagggcggctgggcgtccagggcctcggtgggggtggcgtgtctgccctttttatctccccgcaaggcccccagtcttctagggaagccagtcagtgaagcgcggaggtccgggcgcgccgagagagagtccagtctttgaggaccgagtagtcctgggccacctcccgcctctgctgtcagaagcagcagctgccgccgtggaatccaaaatttcgggagctgtgaccctttcctcatgtaaaacgagtagtcttggacgatctgggcataggaaccaatcagaaacaatcgcttcagcaatcaagaccattgttcatcatggaggaacccatggatacctctgagcctctatctgcattaccattcactgggcagcagtcttttgagccaagtggcaaatttggacagtatccatcgatgcagatgaaccacatccaggcactggggaagtggaggacatagaacagctcaatcagtgtttgatccaacacttccatctcattaagacaagtttgatttttctttgctttttatttcatggaatacatgagaatctcttaactgttggagtttccaaggaggcatacctcatgacttcagttaatggaaagaacaaaactaaaatgctgtatggccaaagccacaaagggaaggatccacaatttacattcttggagctatcatctgtactgtactgttgtgatctactgattggcattggcatagtagtaggggtcaagtgacagaatccgtgccagcagtctccaggttcagaagcaattcaagaccctgatgatagctctccagcaaccaacacatggtgattgtgccaacttgttgctcagttataatgcagggccagtgattggtttaagtgaagaccatggttgagatcatttgtctttggtctaatagaatttgagtctagtagaatttgagtctccagggaaagagctacttgaccaaattaaactagtagcaggtagagcatgaatgacagcatattataccatcaagatgttcttagagcagtgtatggatggatcgattgtactgccatcagttgtgactgacgttgtattcaaggagaaagagaaacttgtttagaaagcactttgaaagttttttgagtacgggggtgccctgtatcaccccgttatggttgaactttctccttcaaaattaccagacttggcagcagtggcaaattattgggctaaaagacttaatcagacatattctgggttcaaggctcctaatataatacctggtgcaaacattatacttccactcattcagatggttgcatcctgccaggcatccagtgggactgggaatatggacacttgaacattaaacatcctgaagaattttggaatgacaggttacaagtgaacataatcagttctctatattaaaaaaaaaaaaagatttgggcatagattgggctcacataatctttagagagattttttcatttttgtgaaagtacagaaattcttaactgcttatgaaatgctgattgttaaacagcatccacagctattttgtgttgtttccctgaccccaccctgaagaaaagaaaaattatggcatattgaaaacagcagtatgatgtaagagaaaagatcacaaattccttgagggtgggtcttttccatactcataagcctatttataatattcagagtaatttattgacacatattaatattccctcctatcccattaattgccaaatcatcaaacatttattgagcacctactctgtgtagggtgtaagcagtactggggacttacagtgataaaagacatagttttagccttaagtgatgtactgtttcactgaagagatggaatataagaagccaagtaatttatggaattctcttctttgtttttcttttttttttttggcagtggagtcttgctctttaaatagagcaaggctagtctggaactcctgggctcatgtggtcctcccgccttagctttcagtgtagctgggactacaggtgtgaacacagcttggaaatctcttaaccatgggagttaagtctcaaaattctggtgatacaagtggttgaaacttaaaactgtatttaaaaaataggattcgtgaatttgagatagttcataagtctgcaaaaggctgtataaatacatattttacatttactattattaattttgtagtaaatttgagtacagcactctctttatctgtggaaacttcagactctcccctattactttaatttcagtgagacattattaaatataagtgggcttacacatttgttttgctttactgacaaataatacacaacttggaggcttttttttcctttctattcttcctctaaatgttcaacacttttctgattttgtgatttgaggttgtttaatagcttcctgaggctccattgagaccgtatatacgtgacacttaacagtctagccttcctcggtacatatagatatatgatggtggctttgcctgtagtaaattcatgccaaaacataggctttcagtgcctattacatatggctttcagctctctctactgagggatgtaggagtttatttctgaggtctgagcctcttttcctttacttcctttactctttcctaagccttctttataaaaactatgcatgttctattgttttcctttttgattccctttcttttattatccccagtaggagtgacttgtaattctcatatgttagaaaggcagatctcctggttgaagaaaagatccacccaagcaagtcagcatgtttaataatttttgagggggatctcaaatgtgggaaggattgttatataagacaaccaaatgatgacatgagacaataaatgctataggaattatggaggaataattagctatttattttcttggttagggaagagatattattagttgtagaagtaattactaacttctacattttttattgtggaaatcaaaaatatatatatgaaaataaaatgttataattgacttcagtgtcccataaaccagcttcaacaattaccaaattgtgaccaatctttacacacatgcacaggtgtccctcagtatctgtggggcattggttctaggaccacttatggataccaacatctatggatgctcaagtccctgatataaaatggtggactatttgcatataacctgtgtacatcccgtattatttaaatcatccctagatcacttataatacgtaatacaatgtaaatgccatgtaaataactgttatactgtattaaggaataacaacaagaaaaatgtacatgttcagtacagacgcaattttttttgtgtgtggaatattttcattccaaggtcagttgaacccatggacataggaggctgactgtgtgtgtgtgtgtgtgtgtgtgtgtgtgtgtgtgcatacagacacacatatttctgaaatgtaaatattctcttcttaaaaaaattattatcacagctaaacaaattaccagtaattcttttatcctcatatacccggtgttcagattttctagattggctcctaatttttttacagattatttgaatctgattcaattcatgtactgtaatgtttgataacttaagtaccctttataggttctcttttacctcttctttattaaattccttgtaatttgttgtactaaatagattgtcttctagaatttcctgtagtctgaattatgtagtattgtttcacatgttccagtgtcctcttatttcctgtgagttggtagttagatctagaagcttgattaaattcagattttctctctttagatcatcaactttagatcatcaacttggatcatttgtttcattttgcttttgatatgttgttttttagaattacctcttaaaattttgatttaattttataatcatgtaaaatgtttataaatttccaaattcagatcagcaaaacacaataaaatctattcagagaaggcaaaccttc

SEQ ID NO: 1250 - DNA, 2201 bp, Homo sapiens
agacattccaggacttccgggcacttcgtaaggtttaaaaaggatgcttcgcgttttctctctcctttttggagacagattcgcagtggtcgcttcttctccttggatttgttaaggattccaagtaactcttatttggagagaagacgatctgcacttcgcattttggcattgacatttaattttagggtcctttatatagaagggagagtaggtaaactgatttttttttttaacagggagggtttgacaatctttggcagacttggagcaaaagattgaggtgcatttcatgcctccttttgagagtcttgctctgtcgcccaggctgtagtgcagtggcgcaatcttggctgcaacctcagcctcccaagtagctgggattacaaacataagccaccacgcccagccctcatacctcttttaaaagtcgacctgttttgcagaaagtctgctgtttttgtactaaaggctttggaatttggcatttagctaggaatgcacattctttcacctcattcatactttaagaaccacagaagtgactctgcttggccagaaggcacactgtgttggtggttatattaaaagtccttgagtattttgcttttcatgatcttgctcactgcaacttccgcctcccaggttcaggcgattctcctgcctcagcctcccaagtagctgcgactacaggcgtgtagcaccacacctggctaatttttgtatttttagtagagatgaggtttcaccatattggccaggctgttctcaactcctgacctcgtgatccgcccacctcagcctcctaaagtgctgggattacagctgtgagccaccctgcccggccacttttgtatgatttctaatgtatttgtaatttacctaacaaattgcctaatctgctatgttaatgtatttatgaattaaaataaatacgactgcatgtttgtggttcatttttgtggaggtggctgtggtgacatcagccaagaatctgaatggtactgttgaaggaaactagcatgatagcttcagttctaaaggccctgaaacctagtctcaggtgggtcccccttgggttcactttatattggcagtttattgggaaaatggatattaggtcctgaccaataggaccgtaagtctgggttgagtgcaagatgagttagaccgattctttagcttcctgcagtgtagtggaggaaaaatcgatggtagcaacgggaggttgtatccctagctgatgagttgtatgagcctctactacctggcgcacctccgcctgaagattgccagaattgcttgcctcatgacgtgagtcacaatggaaactttgtcaagccccctgcactggctgccaacataaatgttcagtaccctgaaggatgggactgaagggggatcatctagaaggtaaagttacctactggcataggggaggtgggacagccgttaagccatttggaacttgatggagacaggtttgagggaggtgggtgagattggagtttggtggactgtagagcttgcttgccaaggtgttgaggtcagggttggtttgagaatggaagctagttactagctatgattgtgggggaacacagcttgatttttcttacaagctaagaggagtgaggcagtgtttaagagggcatgttaaatgcagccaggcttggtggctcacacccgtaatcccagcacttaggctaaggcaggcggatcacaacatctagagatcctggccaacgcggtgaaaccctgtctgtactaaaaatacaaaataactgggcatggtggtgtgcacctgtgggaggctgaggcagaattgctggaacccgggagatggaggttgtactgagctgagaccttgccactgcgctccagcctggtgacagagttaagtctcaaaaaaaaggcatcttcctaaagcaattgtatttgtgcttacctgtgccaggcactgttctaggtaagcactaagtgggctttaatacagcatattccaatggggaatcccaggaaccaaaagactaattgtccaagtccacaactagaagtggcacctctgcagaaacaagcatcaaattccctgctcaggaagaagccagatgagtcagccccattcgtctgtatgcccagtcccatccgtgtcctgctgtaactacatagatctcacctgagtaaagtgatttttttctgaa

SEQ ID NO: 1251 - DNA, 2131 bp, Homo sapiens
actggcgggactgcgcggcggcgactacagacgtgtcgggggtccggggcctgtcgcggttgccaagcgctcggcgcttggcgctggcgctggccaaggcgtggccaacagtgttgcaaacaggaacccgaggtgttcacttcactgttgaaggaacgagagggcatctgctaaagtttcagattccatttctgctcagtatccagtagtggatcatgaatttgatgcagtggtggtaggcgctggaggggcaggctttgcgagctgcatttggcctttccgaggcagagtttgatacagcatgtgttaccaagctgtttcctaccaggtcacacactgttgcagcgcaggtagaaaattatggcatgccgtttagcagaactgaagatgggaagatttatcagcgtgcatttggcggacacagcctcaagtttggaaagggcaggcaggcccatcggtgctgctgtgtggctgatcggaccggccactcaatattgcacaccttatatgggaggtctctgcgatatgataccagctgttttgtggagtattttgccttggatctcctgatggagaatggggagtgccgtggtgtcttcgcactgtgcatacaggacgggtccatccatcgcataagagcaaagaatactattgttgccacagggctacgggcgcacctacttgagctgcacgtctgcccacaccagcaccagcgacggcacggccatgatcaccagggcaggccttccttgccaggacctcgagtttgttcagttccaccccacaggcacatatggtgctggttgtctcattacggaaggatgtcgtggagagggaggcattctcattaacagtcaaggcgaaaggtttatggagcgatacgcccccatcgcgaaggacctggcgtctagagatgtggtgtctcggtggatgactctggagatccgcgaaggaagaggctgtggccctgagaaagatcacgtctacctgcagctgcaccacctacctccagagcagctggccatgcccttgcccggcatttcagagacagccatgatcttcgctggtgtggacgtcacgaaggagccgatccctgtcctccccaccgtgcattataacatggacggcattcccaccagctacgaggggcaggtcctgaggcacgggaatggccaggatcagattgtgcccagcctgtacgcctgtggggaggccgcctgtgcctctgcacatggtgtcaaccgcctcggggcaaactcgctgttggacctggttgtctggtcaggcatgtgccctgagcatcgcagagtcgtgcaggcctggagataaagtccctccaattaaaccaaatgctggggaagaatctgtcacgaatcttgacaaattgagatttgctgatggaagaagcataagaacatcggaactgcgactcagcatgcagaagtcaacgcaaaatcatgctgccgtgttccgtgtgggaagcttgttgcaagaaggttgtgggaaaatcagcaagctctatggagacctgaagcatctgaagacgtttgaccggggaatggtctggaacacggacctggtggagaccctggagctgcagaacctgatgctatgtgcgctgcagaccgtcaatggagcagaggcggggaaggagtcacggggcgcgcacgccggggaagactacaaggtgcagattgatgagtatgatcactccaagcccatccaggggcaacagaagaagccctttgaggtgcactggaggaagcacaccctgtcctatgtggacgtcggcactgggaagtgcacagccagaggacaacacatcacacacaagaaacagttgtgctcatgtgatgggggcctcagcactaggaaggagtggactgttggcgcacgcagcagcttgaataaatctgaaagtcactacgctgcgtaagagaagccaaataaagcgcatgctgtgtacagagggtgtcgagaatgcctcctacgtgacggaaagcagatccgtggttccctgcagactggcaggagcagattccaaaggcacaggaagaagcttgcaggtagaatgtgttcattaccttctgcgcattataccacaaaaaagctgggaataaaaatgctaacc

SEQ ID NO: 1252 - DNA, 2188 bp, Homo sapiens
ttgcatggcactgatggttctttgcatagagtactgtgtgtaatgagcctataggtccttatgactccctgatctagaaactaaattagagacattgtgtttgggggcaaatagatcacttcgatgcctttagtattgaactcatggagttctgggtgggtggccaggggcattgtccagtatcaaaacaactttaaaaggcagtcctttactggcaaggtacttcctgacttcaaagacaaaacagcaatggagccaatccagaaaaagggttcttgtcgtccaggccttcttgttatactgccagaagactggcagctggtgtttatcttttcccttcaagacttgggagttaacagctttatagataagtgcagtcttgatcataaacccaacagcatttgcaaaaacccatagcattagcctgtccctttctgccttaaaccctggtgctcacttctcttctttactaataaatgttctttgtggcatattattatttttccataatagggcacttctgtctgccttaagaacctgttttggtagatatgctttctcctcaatgattttcttaatggcatctgggaactcatttgctgcctcttggtcatcaggagctgcctcttctgttatcttaacatttttaaagccaaacttctttctaatattatcaagccatcctttgctggcattaaattctctagatttagatccttcaccttccttttgctttaaattgtcatataatgaccgccttttctccaatcatattagagcctataggtacgtctttcttgtagcaatactgcacccacataaaagttgcatttttaatacgagataaaaaggtatatcacaaaaagtgtaaggtttgctggtatagatgcagtaatggcttcataaattttcttaattttttttaacagtggtccttatgctggattcatttatcttgaaggatgggcaactacagctgcagaccagtacacatcaagcaatttaactttttcttgtaatgtcatgactttgctccttgggagcacttccagcgtcactagcgggacttcatatgggtcccttggtattattgcaaggtttatggttgtactaaacatgatgaaaaataactgagaaccatgagagatcactttttactacgatacacaatttactggagagatgaactgcccatgtggagatgataaacatcacatggcattttaagtgaatacagcacttgagctcacagcaacagcaacaggaggtagctctgaaattatggtagtagtgcagtatgtactatagttaatcttatccagttgtaatttagtactgcatctttatgtttgtctcaactgcaaatggctccaatgtatagtctgtgtatgcgttaagttttgataaattttaactttttttttttttgagatggagtcttgctctgttgtccaggctggagtgcagtggcaccatgccggctcactgcaacctctgtcttctgggttcaagtgattctcctgcctcagcctcccaagtagttgggattacaggcatgcatccccatgcccagctaatttttgtatttttaggagaaacagggtttcaccatgttggccaggctgctcttgaactcctgacctcaggtgatccgcctgcctcggcctcctgaagtgttgggattacaggcgtgagccactgcgcccggccaattttaacttttcataatagatttgtatatatttatggtagtaaatgataaaatagactagtgtctacatatattatatgaattcatgacacacctttttcttagtttttcagtatttctaagctacatggtgcatctgcaagttttttaaattgttgcaaatttccaaaaaaattttcaatatatttatcaaaatatgcatataagcggtcctatgcagttcaaacccgtgtttgagaatcaactttatgacttccagtgtcattctccaccatttctgcagtttatcacattttgcttcaggcagatttggtaaatcttcaatgatagttctctaggccattgttttgtaacatgatcaaatgcttaatgggaaatagaatatgtatatgtattctttgtctaccaactaccaaagaaacaaatactcctcagtttgacttgacttagtaaataaacttgtgttgggttaatgga

SEQ ID NO: 1253 - DNA, 502 bp, Homo sapiens
tatgaattgagcagaaggaaacaaagttctgcagataaacaccaatgaaacaaaaaaccacgaataagaaaaatgacagaaaaggagaaccttcccagaatcctcctgccagtgaacggtcaccagagcaagagcatggagtccctgggttttgaactgtgagataaggaagatgatgaaaacctccctagcagccagccaggtactattctagattgtcttgtgatatttacaatctaggagaaggcaggagagagaactaagaacagagagcatgttctgagatgtctgctgtgtttgcagaaactcctggagggcagagccatgcctgccattttcatcattgcattaccaccacccagcacagtgcctggtacaaaagagttgctcaataaataaatcaggatgaatggacaaatacacggataggcactttgaactacagatgagcttaaatactttgtgtttttcttagtcaaacatgtgcaattaagcatgtgat

SEQ ID NO: 1254 - DNA, 3032 bp, Homo sapiens
ctggcctgagctccggactccggggacagcgcgtcctgtcccgagggcctcccgccccccgggaaggccaaggtcatgaggtcaaaccccaacttttgggcttccgcgagagtaaagcccccggatggtcctcggagctgtgacgtcacaaaaagtgcttggggtctggtttcccgcagaatccagcctctgtccacgtgaactctgctctgtcctctgggctcataatgttctgagactcttgctgcctctttcatggattccccttctatttccctgagacgactcacaggtcacagaaagctgcctcccatccttgcggctccatcaaggtgctttggaggcaggtaaagcgcagccaaaaacaatccattgatacacttggtgacattaattgagaaaaaaacaatatggtctggccatggaggcatggtatccgtaacatcccccaaaggagctaaagaagaaatccacaatttaccatgagcatttctcgtctgaagattgccaagcgattcctccaggacattcctcaagatcaatttctgttcatccaccttgtcctgggagggacatcaatgggtttccatgtcctttggcttctggttgagttcactcagtggagaaccctggcaagaggcaggaaaaggggaggaagcagcctgaccggtttgaatttcaccttctgttcaccttggatgagagcagtaatcatcacgatcccagggaacagccaaaggaagagaaaaggcaaaagatttggacaagactcatgaagactaacagctcttggataattgagagaaggcagctgcgtgaacagttttgatgcaatcatgaaggcagggcccagtgcctgtggcatctgcctttttctggaaccaatccatatttccttgtggttttctaaggtgcagagagggcacattgggaactttgcttggggtctttttcacatcttagagggaaggtccctcaacatctgcattggcggagtgtgatcctcatgtccctctgaatgatctggacttgaggtaaccagccccttccaggaagctgtcccatgagtgaagcctcagcagcagcctctgtcagtccctcccccacagaacctttggcttccatttgaccagccttgacatccagtgtccaaacaccgataaaattgattccactaagcgtgggaaagtcctggagcatcgattgtttcctcctctgcacccccgataccctggcattagcactctcccagaatgtaccttgcttgtttgattggaggaggtcaaagccctgatgaagaatgagtggaattccacaggattggagcagtcttgataaatgacagcaggggatggtgtggggaggggaaaggatcagaggaagtgtggataaatgaatggcttaaaaaataatccacctttgcctcccccttttctaccagtctgtctagtgcttcagggtgaaaaaaaaaaaaaaaagcttgcctttctaaacatttggagtttcagaaatgatctatagagcatgtttagtttttcaagttaaaaatattaaaagaaaaaaaatgtttgagggctttactgctttcccgcaaagagctagagccacccaagcaggattgactgtcattggtttgaggtttctgtttgctttgaggctattttttccttagtgctataaactagatcagtccatttttagctgataaccctttccaatttcgctgtgaaatgaggggctggttgggtggtttttttttatgttctttccagcgttgacttttatggtctttgattccaaggtacctcgtcgactctgaagacgagagatgggtaggttctaactccagatgagccactgcaagatggtaccaggatgagatagagagtctctgtactatcttttatatgttctcaaacccagccagggatcagagtgacaatataacatggggaatcatagagatgtttatggtaattctgctatgagtcaactgagatgtcccttatggagataacttcccatactataggcagttggacaaagatgtaaatgccttgtttacaaatgctacccagatctcctaattaggaccacacatgcggagaacccaacagcttttggacttatcggccaatggtcttcttgggaaggtctctcctagtcatgggaattgtctttttattgttcaagcttttgcatagacctggaagaggcatccattgctgttacccctgagtttataatcatgctgcaagtccagtggggaactttggcacaaagcattgaatgagatgggactgcacttatgtagcctgcatttcttgagaataaagatttctgttcatttagtgcagtggttatcatctgggggaaaaccagtgagtagaggccagggatgccactaaaatccctacactgtgcaggaaagctgtcagccctttgtcccacaagagattaactggttccaaaagtcagtagtgctgtggttgagaaaccctgtttaccacctgtaggttccagagagctcggatggtggtggtcattgtgctaagtttcaaattcagtatttaggtttggtttttagcttataggcaacaaattggctgactatggggtgaaaaggaagcacctcctttatcaagattggcttcaaaagatgtctgcctccccttctggtgggtcctgtgtccattcacagtgtgagaaatggaaaggaggtcactaagagacttgcaatggatgtaataactggatgcagaaactctggatctgaagggaatgttcatgactatttcatccctcctgctgccttggagaaccaaacgcaggagccacccaaggtgaaaaccatccatttcttggagaagtgccacggtggggttgcaagtcccaggatcaagttttcgatgtgtctctttttcccgtaaagtggctgaaatctgaagctgaatctgcaagtgtcatggagtcattgaatctcacagtctcaactgataaaagttattaaaggtcgtctggttcagccttct

SEQ ID NO: 1255 - DNA, 803 bp, Homo sapiens
gacgccggggggcagggagccggggtccttggccctggccggggaccccaccgcccaccgcgcggaggacaacttttagccggcagcccagaccagcgcggcacctgtctccggagtctccaccgctcctcccgattcatcccagggaaattctcaagaatacgctctacaaatctacgtgcgcatcattttcacctcgcgtcgcgcccgggaggaaggaacgaggcaaggagctaaagcagcgtgcgttcagccctggggcattttattaatgcttttacgagttagaagagttgggataatttgccatctggagtttctctgccttgctgatctgagctcagacctgccaatttaccagagataattgataacaccctgtaacagctgagaggaaaatggaagaaacggagatacttttagtgaagcagaataaaccactgaacagtctgtttcatcttcataaaaacgctgctttcagtgcactggatttattttacaacccactaatggattaccctacagtttgaaaaacattgcgttagaccagtttgactgttgtcaagaaccaaaaaaggaaaaatgaggaagctgtgagtaccagtggaaggaacgagccaggaagagggactggaaccatctcagaagccatgcccctcaggctggaacttgccctgtctcctcgcagatgaggtaggaggctcagcacgggctggtgggagcagcccacagcagcagtgagggtcagtgggcctgtgagttaagaagaaggtggcacagagcgagggtctctggatcctgac

SEQ ID NO: 1256 - DNA, 747 bp, Homo sapiens
aaacggaggccttcagccaacagctgggagaagctgagtcccatcagccattcaaaagactgcagccccagccaagagtttgatgtaacctcaggagagaccctgagccagaaccacctagaaaagctgggatacatgaagactgccatcccttgagtcacttgccctgtagctgccactgttggaaaagggcttgcttctgtgtccttgtgcccactttgaaaatccctgggaagtccttggagtcagatgagcaggcctccgccactctgccaaaaagtctgttcagaagtttcacatcactagagaagagagaagaaggacatttgtactgggaggagtcgaccggtcccagtaaggagaaagtagctacagcgtcatgggtgagctgggtcccccaaaaaggaactttaagggaatggactgaatcaagtctgagatgtccccaaagcaagaccaaagaactgaggaagagaagcattcatcagaaaccaaaattcagctacaagtgagcatccagatggaggtattatgaagaggaactgagactgagggcaaaaggtgccagccagaatcctggataggagagcaagaaccaggacctcatttaagagacaacctgcttaaggcagagtaagcacaaatgggcactcaacatcaatgaagtaacagcaaagtcacataataaaagcatggaattaagacaagctgaagattcggatgcaataaaacaaccacccattatta

SEQ ID NO: 1257 - DNA, 899 bp, Homo sapiens
ccacatcaatgtcatacagcttcttcacagcctgtttaatctggtgcttgttggctttaacatccacaatgaacacaagtgtgttgttgtcttctatcttcttcatggcagactcagtggtcagcggaaacttgatgatagcatagtggtcaagcctgggagaggcaaaatggggtcacctggcctgggcccattcttttggagcccagagccaggagagcctaggtgcatcagacaacgaggtaccaatcactttgttcagactttggtcgctttacagtgtcatcatctgcaccctgaaatctaagggcctgaagccccaatcccaggggcagaacgttgtgcattttctttctcttgaagggctcttacaacctcaagtgattaaagaatcatctctgggccaggtgtgctggctcatggctgtattcccagcactttgggaggctgaggcaggctgatcacgagtggcttaagcacaactgtaacacagctttccccatttaaagtcacacttgattctaggtccagcttggtggcgggaggggcaggaagacagtctgtgaactgctttcctatatgaacacaatccactttttctgttaagaaagagtagaagcagcaaaaacccattggtactaactactaccatggctctactcaaatctgtgctccctaaaaagtcagttattaccgatagctcaaatactcaagtgcccaaccttctgcccattcccccccaactgttccttgagcagtatgaaaattcgggaaaatgaatggaaagaagcttctatacaccgcagcaggccataactgccaaatacagataatggaatccccactatcaatcaagaatcaatccacgttctcaccctcaaggattgttcccgatagca

SEQ ID NO: 1258 - DNA, 2400 bp, Homo sapiens
agggcttgccgatcttgttcccctagtaacctctgcgcatggggacaatggagagctaggccaggatgatggccctgtggatggcagtggccacctccttggagcacttaacacccagaccgacgtgaccgttgtagcccgcaatggccacaaacgccttgaacctggttcgctggccggctccggtctgcttctgcaccggcataatcttcaaaacctaggcctcgagagaggccccccaggaaaaaatcaatgatctcagattccgtgatgggcagggagaagagacagatctcctccagggaagtgatcttcatgtgcttgaccaggcagcccagcttgctgacgggcatccactccttatccttggccttgcctccgcgagctccgtggcttcggccccagcctggtccacggcagtgaccccggcctcggatgccactgccgaaacctccacggaagccaccatggttccccatcccagggccccggggcctccgggactccccccgcaacccaatgccggctgcgccggcgtcatccgccatttggtgttttctcggagaagaagctacatgtggaatatattaacgcaacaaattgtgcgtacttgctagacattaggcatgatagcaagtgctagggttacaaagtattgctttttggggaacccatggttgttggggagaaaccagaagatcagtcatcacagtgcggcaagatcagacttgtggtttgttcaggttctgggagccgtcactgcagtgagaatggaccccacaatgtctcataaggggatctgcaaggcagccctaaattccaagcaggacatgtaactcctcaatggacaaatggacactggaccctggttgaaggaacctgttgttcttatggtggagggcagaaacccaagagggctggagccaatccatgaaagaggtttaattgactcagagttccatatggctggggaggccttgcgatcatgcagatggcgaatgaggagcaaaaacacatcttacatggtggcagaactcaggcacgtggccacatctaacagcaagggagtctggaaaacacagttcagctgtgtgaaggatatttataaacatttagcaagatccaaaggaatggaccatagcacagccctgttttctttagacgctgactcctgctgtctgccagatcctcgtggtacaatgactggtgtagactggcttgttgaagtcactctctggatctgagcaacgctggctgagccgtgatgaagtattcctatccatccactatgcttcacagtgggaatctctcactgttcatcaccgctgccctagcagccgcaggttcaagagctgctgggatatagcagttaagagatgaaccctgcagcctgacttcctttgctagaatcctggcactgttacttattccttgtatgtctctagctggaatgagagactggatggcgttgaaatgaaatgctggagccatccatccatgtgcttccagggtggcttcctggctgtgagaacacagtgaccctgtgaggccaacatggactcggttctcctgacataacatggctggaggagctccagctctgggatgttatcttgctgttttacactggtggttcagccagcccatgggaaactgaacttgggctgggagacctggcagcaaatccaaactgaaataagaatcagcacttcgagttcaactgtgaaacaaatgtgggcccaaggcctaaatgcccgaaagacatagggaagggttgaagtggaataaagaaagcttttggtgacactatgggaagggctattgagtatcttctcaggacagtacaaaatgtcagaggcacagcatatttcgaaacctatttttaaagctgctttagattttttaacttgatggatagatatattcattttttaaaaaaagaaatggtgaccctcttaagaggcaaagtacgagcctcaagtgttgtgggatgtatccatcattggttactaagttttccaatggctcagacactcccagaagcgaagactcctgagccaaaggaagatgagagctgaaaggagcatcgagctcatccagtgcaatgcttctcagcttgtgcccactttggattcacttggaaatattttagaaatactgatgcctgggccccattccagaccagttaaatcatactatctgggagagatacccagaaagtggtatgttttaacacctccttagggattctgctgatcaaccaaggttgagaagaatcaaactagactcattttacatatgaagaaatggaaacccagatattgagataaaaaatgttgcccaagtcacgtagctagtgtcaaaacctgactcttaataaatgcccttatgtcacactaa

SEQ ID NO: 1259 - DNA, 311 bp, Homo sapiens
cctgctgccatgatgtgcaattacaggatagaggtgccaggtgaaggtcccactgtggccaaggaaagcctttgtgagacgactacttcagggtgttccccatcagaggagcacacccctgatcttgtattcctcgtcaatccaaggtccatgtgaaatggtcagatggggaattttttcttccacagacatcaggatcttctgagtttcttcatcaaagccagatttgtgcagcctgggaaaatagaaataaagtttttttttttgtttttcatttttacacagtattgcctctctacattctgatgtct

SEQ ID NO: 1260 - DNA, 550 bp, Homo sapiens
actaatcccccacaaccaccccctgctgtggacctcgcggacctcggactcaccaagtgccgagtggcagatgtgctgctgagggtgcgccggggcgcagctgcatgcctcacccagccccgggggccgcagcaacgccagcagccgcagcaacagcacccagcttggcgcgggccgagggctcccaggcatgacactgcagatccgcgactgagcctgtgagctgacactgcccacgttccctgtggtggtgaagattggccacgctcactcaggcatgggcaaggtcaaagtggaaaaccactacgacttccaggacattgccagcgtggtggctctcacccagacctatgccactgcagagcctttcattgactccaagtatgacatccgggtccagaagattggcaacaactacaaggcttacatgaggacatcgatctcagggaactggaagacgaacactggctctgcgatgctggagcagattgccatgtcagacaggtacaaactgtgggtggacacctgctctgagatgtttggcggcctg

SEQ ID NO: 1261 - DNA, 470 bp, Homo sapiens
ttgctgctctcttctggagcagtgggatattgggcagttcacttaacctctctgagctccttcctcaagcctttttttcctgactacagcgagcaacagctgtttgagatggtggagcacattcttgctggtgaaaggaagcaaggtcaacagagactcatagaggaaacattcaacaacttgaacagtaagcaagttgcagtttccgtctcagtggactgaggtgatacagcagattttgctgtggaccaagatccagttttcctcataacactcacaggtattaaatgactaatccagatccccagcaccacatcaaggtaggtgacagaagattaacaagttcctaactgttctttaagtgtaatttgttgcaacgttctgaaactgattaatatcccctccccttcttgccctgaaatgaatctggtggtattaaattaaataaaatagttccagtttgtccataa

SEQ ID NO: 1262 - DNA, 623 bp, Homo sapiens
tttgcacttccgtcttccgggcggaggccacccggggcggacgcattgcacgccgggagacaaaatgtctcaagaagccttgagaggcgggattttggaacccgggcgctgacgagcttccgccattggtgtgatcgcggacctagaaacttggtccgtcccatacaggtgtagaagtcggatttggagaatgctgacgggtgtccggtcaaggttaggccccagcctgccgagtgcctgcgattgcaggcacgcgccgccacacctgactggtcttggtggagacggggtttcgctgtgttggccgggccggtctccagcccctgaccgcgagtgatccgccagccttggcctcccgaggtgccaggattgcagacggagtctcgttcactcagtgctcaatggtgcccagactggagtgcagtggcgtgatctcggctcgctacggcctacacctcccagccgcctgccttggcctcccacggtgccgagattgcagcctctgcccggccgccaccccgtctgggaagtgaggagcgtctctgcctggctgcccatcgtctgggatgtgaggagcctctctgcctggctgcccagtctggaaagtgaggagcgtctgcgcc

SEQ ID NO: 1263 - DNA, 459 bp, Homo sapiens
gtaatgagttggccctcagtcatccccgtctagtcttactgagttgcttgttatctgtgctacgagattagaaaggttaataggacccatcctttggaagtaggaaagtggcatagaaggagaagctgagttagagatcactcacccacttgcccatcaactggaactgcaagagatcagagaataaagatatcagttggtccaaggaaaataatgaggaagagagaattggggagacagaattaatgtagactctgagggatcaactcagatctcttgagtttctatttctctttctcaaaatccagtactaacagaactgaacaagctacaggtggttatcaaggaaacttcactgtggtgtgtccaggcttaatgctacctcagggttgcccttcccatccttttcataaaataagctctaataaacagtggaagcacagatacaagttgcttcat

SEQ ID NO: 1264 - DNA, 2339 bp, Homo sapiens
cagaaatgatggtcacaaggggtaggatatcaaggagcagccagtcattcacccaattccaacacacctacatgtcacactgtcacagagtgagagccacagttccagtagttcccctaattgaccaaatctcccttgccaaatcaaaagaaatcattcctagaattctctaatccttctattgatgatgggaactccagacaccaatggctgggggaaaaaaaaagttaactcacaccaagttcctctacttattacagacaaagggccaaatcttggtcttgatctgtgccaatcgacttcaaaagttgtgacgttcttggatcagttctgctagggtgagacccgaatttggatccccaacagttctggagtatttcatcctggcagcctcattaacatcaggctcctgggactgcaaccaactcagggttattcagtccatttgaggttcacacctggaaggtaagtttctttaaaagtcatcgctaaaaagaggttagttgaacaaccactgcttgcagtcaaaattcattttaaaatgtcctagcaataccttttgaagaccacaatatatgaatttaatatttaactttgaaacataagagacaggttatctgatagatttataccagcttacttcggaagcatgtcccaccccatgctagatccagctgcattaaaagtaaaaattaatggcaaactataaattttaagatcatttgcttcacacataaacacagactagctgcatggtggtctcaagagatctcaagtcttgctgacatgcatatagggtacaacttattacaggttcataacatttgcttctcaattcacataaaagagcaaattgctgtggctttgctttttaatttttttttttttttttaagagagagaggagccactcttgcccaggctggagtgcagtggctaactgcagtctctcactcctgggctcaagggatcctccagcctcagcttcctgaatagttgggactacaggcacaagccactgtacacagctgctttgttatcttctacatatataccaaagggataagttaggaacaccagaaactcagtagtaactcactttaaccttgcttctggggctccaattcaagtgatgctcaatttcaaggtacaaggaaaaccatgagaatataaagtcataatgccatttccactcagatgaaaagatttatctatctttagatactcaaaattattcttggcattttagcacttttggtacacatttcctgatgtaggaaatagtaaaatttcagagcctatggcattggctttcaccacctatgcaattttctacacatctgaaaattaccagtttatctaactccttaaatgttcctctcttcaacaacaaaaaacacaaacaaaaattgctggaagaaacaggaagcatccaggtccaaatgacagcataacagactatgaagaaacagggcttaagtgcccatctagaacaagatggtctagattacaataaggaccccatgggacagaacatcaaaacattcaactttcaagtaaatgtcttggaagtaaacatttaaaatttataggacttcctctggcatgtaggtatgatattagaagagtttcctttgacaaaggacaatgacccaagaagtaggtttttttttttttttaaataaaggagagacagtctcactctgttgcccaggctggaatacagtggtgtgatcatagctcactgcagcctcttttaactcctgggctcaagcaatccttccaacctcagcattctgagtagctgggatcacaggtgctccccatcacaccctgctaatttaattttctttgtagagacagggtcttgctatgttgcctaggctggtcttgaactcctgggctcaagtgatcctcccgcctcagcctcccagtgttaggattacaggagtgagccactgcctctgccttcaggtagcaattttattagcaaactataagcctaaagtaatagttaaaattctcactgtgatattcattactaacccctgaacctgtacccttcagcttaccactacagtacttctgtagtagagcgagtatgggttttggtatcagacaggtccaaatttgaattctggttctacctttcatttatcaaatgactttgggcaaagtacttaacctctctgagctttagttcccttctctgtaaaagaataaaatatttcagtcttatcgtgtagatgatatacagagggcacataacaaatgttagatctctcaaatgtttttctgtaacccaaatatgcttacaactgattaaagaatgttctcact

SEQ ID NO: 1265 - DNA, 474 bp, Homo sapiens
cctcagcgcgaccctggagctgggggtgtttttaagtttggggcgaggccggtgaagccgaggcgcgggcggcaaggagcgctggagagcgacggggctcggcctccgcggctgcccaggggcccggggcattccgagaagagaaaaaaagcttgtacttaaatacttcctgcgaagttttgactgagacgctgcaacaattcccgagctgtttcatcgtggcaccttcctggtggcaggtggattagcacattgtctgcaacccaggaggacttggaggaaagtcccagctctgctgattctagctgagtaaccttggcaaaggtcacctcacttctctctgagtcttattttctcatctgtaaaatgaggaggaggaggaggatcatccaaacatcacgggacttcgttaaatcagtgcttcggggcacttagcacagcgcctggcgcaaggtaagcacttgataaatggga

SEQ ID NO: 1266 - DNA, 594 bp, Homo sapiens
tgtgagtttggattacataggtcaaggatcagtaatctatggctcatggaccaaatccagcctcctgcctgtttttgtaaacaaagttttactggaatgcattcaagctgatgtgtttacatattatctatagatgctttcacactacaccagcgtagctgagaagctgtgacacagatcacactaactgcaaaggcgaaaatattcactctcttagagaaaaactttgctttttgtagtatgtttatttaaaaaattgtagtttcctttggagaaaaagtgctttttctctaggtgagcctaagaggactcagacagggtgtttgattaactataggggcttttgttaaaaggtagaaaactatggatagcactaatctacagcattaatgaaccagcaaaactcagaacatcttcagtatcaacataccttagatacggagtctttcctgacttcttgtacagcttcagagtgtgaggctgacccaaactgagatttcggtgtcaaatacctaaaagaaaagtttaccaaagtttcaatgctttcaaagacagatggtatgtacccaacataataaagctatttataccgaa

SEQ ID NO: 1267 - DNA, 905 bp, Homo sapiens
gctctttcagaaccactggcctgtgaggcctcccctagactgcaaggcccttcaggacaagattgtgccttaatcatgttggcatcctagcatggcctggcttgtcacaagaactcgctgcaagctaatagcctgtcaggagtatggaaatatatatctgaggtttgtgattctgcatgggatcaggatttccaggagtgcctgttggagaacactctgctctgtgcttctcatgtcttaatgttggttcttaatgttaattcaaaccagctgtggcagacccagttgttcctagaagttgctatctctgtctttcacattctgcaattttatatgcacatacattctatgaaacttcatgaaatttctatgatatttgtgtttcggagaatgctccttataactctgatttcatgcaaaaagttactgccacataaatggggaggtgatatcaattatgcagtactggattcaaacatcaactctgttacttactagttgggtgagcctggaaaaatctcttaacttttatgtccttcgctttcttgatctgcaaaatgaagatgcaaatgatcttggtttggagtcttctagtggtctacagtatatggatgcaacacttttagggtctgctccagttacagtaccaggttataaggattgtaccatcttgttttaaaaatgatatgaagttaaactctgaagcacttagaacaggtctagcacataataaacttttcgtatgtattagttactacgattaccataaaaatctcaagaaaatattaattctctgcttcggatattggacagaactctaattaaatctgatatatgcctaccgtgggaagctcactttttttctgcattgctagagcaataaatacaatcaaatgttaaaaaaa

SEQ ID NO: 1268 - DNA, 1436 bp, Homo sapiens
agaaaatactttgtgtaaatttgccatatttacactccttctattaaagcatgtttacttgcaccgtgattttatcttttaagtgaaatatttcggagaacagtatagtaaaagtctatgtaccctccctcctagcataaaaattataaagttcaattcattttttcctagtcttccctaacccagagggcaatttagaccctatgttaacagtaacaaatagtatttttttaaaaaaaatctgtcccaaaggctagacaacccacaagggtttccctaattattttggggaattgcgtgagggttgctttcaaacacaaggaatttgcacaaccacatggagtacatggttctctctggctctggctctgtctcccagcagaaatatctgctgccggtagctatggaaggcacctaagggctgctactgccacaggtgccgcctgcagctgacgctcactattgaagctatacttctttgggttgttggagtggtgacagtgctcttattctctctggaggtagaaaaatccttctcctcttgttgagatacagggatcccaaattagtgtgactggtgatcacaacatctcatcaatatttggtgaaacaggcctcacagctgttcatcagacaagtgaattaactgaccgattgttgtacttagaacctttgtccctctccaggactcaagcattatctgagtcccaagctcacttttcccagagaatgggcttcttgaaggggctgctttgtttctcagtacacatacaccattggccaacttgcctgtcaatcctacaggccactctagattctagagcaaacacactttaagtcccagcttggcttactcttctaagggaagaactcatgtccatcagatttatttgatgttattttctgaacaataaaagtgttcaaatagattataggaacattgcctaggataatatggtatagctgtggtttgtgatttatggtatatccatatgatcaggtacaatgtacaattttcaaatgatgattatgaaaattatgtagcaagatagtaacatggtcattacatacttttaagtagaaaaatcaggattcaaaattatgtgtgtattatgattaaaactagtattacttgtgattacaactattattacttatgattttacttacaaaggagtaattagagaacatagccatgttagggtgaggatcataagttatatcataatgaaagaatttatttttcagaatgtttattacacaaagtaataaaatatttactatgtgctaaaaattgttaccaaatattaagtattgcataatctttctgttttgtaaaacactgtccaagcaccagtattaaaggatcttttatctgtctgattactgcaagaacctggaatcaataaaatatggtattttttcttcatctcaaa

SEQ ID NO: 1269 - DNA, 4116 bp, Homo sapiens
caggaatggaaacgaaagtggaactcggcctttccctctttctctcctgcagacgatgggccctactccaaaggaggcaaggacgcaggaggggccgacgtttccctggcgtgccgcagacagagcattccagaggagttccgagggatcactgtggtggagctgatcaagaaagaaggcagcacgctgggcctgactatctcaggtggcaccgacaaggatggaaagcccagggtctccaacctgagacctgggggacttgcagccaggagtgatctgctgaacattggtgactatattcggtctgtgaacgggatccacctgaccaggctccgccacgatgagatcatcaccctgctcaagaatgtgggcgagcgcgtggtgctggaggtggagtatgagctgcccccgcccggtgggtgcccttggacggggaactttctccactgcctcggttgcgggtggacacggctacctccccaccagggcctgggtggcagggatcatgccagatggagtgggtagaacctggagactggccacaagcatccatacctcgcctaggggctgtgcctacaaccgcagtatgctgtcaccaggaggtggtgggactctatagccaatgtcattttacatatttagtctccagatgcttttcctttagcggggagggttttggaagcattagctgaataagtcgttccctgacctaccacgcccacactccactgccctgcactaagtaacggtggtgtagggtttcacctagcttgggattttcaaagctggtctaaagtcttgaagtttgagtaactgtctggaattcagccctggcctgagcctaccagccatggactcaagcctgagttctgccgtcgtctctgtgagcatgggcaggccctttcctctctctcagtggtgggctaagtgggattaggggagaggatccctctaagcctcacttgttcgacctgtaaaatgggcaagggtttaccctccctgtaatctctgtgactgatcacccagtcctcctggaatgagctttgggcacatctaccggcctggagatgcgactgagggactcaaaggagtcctccatttctccccagctcctgagaataaccccaggatcatttcaaagacagtggacgtctccctctacaaggagggcaatagctttggctttgtccttagaggtcagtgaaagaattgcccttggtattggggcagcaagaaagaggctaatactaattccatgtgtgtgctgtttggatttgaatgtaatttatgtgtatctcagttctgactttgaagaacacaggaccgttaaggtaagtattcagtgggaaaatctgccaagcaatgaagtaggcttggttggggagagtgagaggagaaagttgtaccggaaaatgatggtgaaagctgctaccgagactgagaacaaagtctggagcttcctagagatcagggaaaaggggaaataaggtgaggtcacagaagggaggcaagccatttaacagagagaagactttggtcatgttacccaccccttgcaccatctcttgggagggcgaatttattgttggtgtctcataagagggtccatggatagcaaggacaaggtcctcaaacaggttttattgaaggagcctgctcaggggctgtgtgggagcctctggatgggaaggggtgggtggatgattcctgcttcttgtcaaatcctgtccaggaggtgcccatgaagatgggcacaagtcccgcccgcttgtcctgacctacgtgcggcccggtggccctgccgacaggtgagccgaggcagaagaaatccacacactgcactgacctgccccaactcccctgcgaagaaggtggagtggggtcaccatgccccttccccagatgaagagatcgaggccctgagggaacactccctgcccggtgtcattcagggagttgttgatggaaccgggatgtaaccccaaatgagggaaacctcgagccctttcttccccaacatactgctgtctcaggggttggggtgtttggagaggggcagccttggtgtcgttcttccctttcctgctccttggttttcccgtctgtggaatggtccctaagagttgctatgagagatttgggggcacgctgattggccactgctgtagccgtctgtgactcagtctcctgggtcctggctgatcgacccagctcggccccgcctgggcccagcccagaagggccaggaggagagaatgtggggaaagaacatgtccagttcccagcccctgatccctcggcctccccagtgggagattcctggccattttaagagaagcctggaacggccttgtcagaaatctaaatctgtccttgggacagggccctgtgatgagctattcatagaacccccgagaatagctttggccacctgttgggagaggcgttccaggctggggatgcgacccaaaccgaggtgaaccctgctggggcccctcccctggcccctgttgagttctttcccaggcgcgggttgtcatcaggccagaatcaccgctgagaaaccagggtgagggtggagcaatgggaagggaccaggacggctcagagcagcccccaatgccgtgtggcatgggcacagcttgcaccctctctgggccctggtgctgtcctttgtccctgaggcaggagttgggggtgacgcttgaagagcacccccagctcagacatttcagggttctgcactgagtctgtgaattactgcacacccagaggagtggcaggcggcagagccaccccatcctgtcttcatcccccccttgctttatgcagctccccactcctggagtggctcattccttcactcactcatgcgccccttcacccgtcccctcctccccttcctcccccacccattccctgcttcttcatcctccatgtcccgcttcccagcgccctcccagacaggctgtgcccagtgctgctgccgggccaggctggtgactggcccttccctacagggagggctccctgaaggtgggcgacaggctgctcagtgtcgatggaatcccgctgcacggggccagccatgccaccgccctggccaccctgcggcagtgcagccacgaggcactctttcaggtggagtatgatgtggccacccctggtgagttgggggcctgagtgtgtgggttggggcaggaggaggcctgggatggggggaggtggcagtggccatggatctttaccactgcaaaggctgcatgaccttatgaccttgggccagtcacagcttctctgggcagtaaatagtatgtgctaggcattgtttgatgtgctggggatccagcctagaacaacagaattgaggtgtctgttctcatggagctggcattctggtggagagaggacagtatccagaatagataagatatggtgtatgtcagttggcaataagtgctatggaaaaaagaaaagaggcaggggagagagatgggacaggctgggggatgctctctcactaggggagtgagggaatgagcgaggcatggaatgtccagggacagcattccaggagggcggaagagtaagtgcaaaggccctgaggcaggagcatggccagcatggttggtcacagtgaggaggctgccgtggttggcacaggtgagtgaaaggaggtaagggcagagcagggtgaggtggaagccgggaggccataggaagcggcagcagctgtccaagcgagagctaagggactgaaccaggctggtggctaaggaggggagaaggcacgggattcaggaaatatgatgacggtccagctggcctgatctgctgagatttagacatgggtgggcgagggcaggagctaagggtgcggccaaagttttaatttccagccactgggtgtgttaatggaggtgccatttcctgagatggggatgggttgtagtgaactttacagtttagtgctggtataccacaggctcttcataaactcaagcaaattcatttcacccagcaaagccctgggatcacagcccctcagacctgagctcctgcccctcctccactgctatcttatctgtcaaattgatataacatttggtagaagat

SEQ ID NO: 1270 - DNA, 3360 bp, Homo sapiens
tgatactgaagagtagggcattgctataaagatacctgaaaatgtgaaatcagctttggaactgggtaacaggcagaggtttgaacaatttggtgggctcagaagaagacaggaagatgagggaaaatttggaaattctcagagacttgttaaactgttatgaccaaaatgctgttaatgatatggacaatgaggtccagggtaatgagatctcagatgaaagtgaggaacttattgggaactggagcaaaggttacttttgttatgtgttagcaaagaacctggtggcattgtacccctgccctaggaatctatggaactttgaacttgagagtgatgatttggggtatctggcagaagaaatttctaagcaccaatgtgttgaagatgtggcctggctgcttctaacaacctatgctaataatgtatgagcaaagaaaggacataaaactagaacttacgtttaaaggggaagcaaaacataaacgtttgaaaaatttgcaaactagtcatgtggtagagaagaaaagcccattttccggggagcagttcagactggctgcagaaatttgtatagctaaaaggaaggcacatgctgatagccatgacaatgggggaaatgcctccaaggcatttcagagatctttgtggcagcccctcccatcacaggcctggaggcctgggaggacagaatggttttgtgggcctcacttagagcctgactaccctgtgcaggcttgggacactgctccctgcatcccagccattctcgctccagctgtggctcaaaggggcccaggtacagcttgggccactgcttcagaaggtgcaaaccataagccttggtggtttccacatgctgttaagcctgtgggtatgcagagtgcaagagttgaggcttgggaacctccacctggatttcagaggatgtgtggaaaagcctggatgtccagacagtagcctgctgaaggggcagagccctcatggagaacccctaccagggcattgcagaggggaaacgtgggactgtagctcccacacagagtctccactggagtgttgcctagtgaagctgtgagaagagggccaccttcctcaagactctggaatggtagatacactaacagcttgcacctgttgcctggaagagctacaagcactcaacatcagcctttgagagcagctctgggagctgaaccctgcaaagctgtaggggtggaactgcccaagatcttgggagcccatccgttgaatcagtgtgccctggatgtgagacatggagtcaaaggagattgttttggatctttaagatttcaggactgccctactgagtttcagacttgcatggggcctctagcccaattgttttggccaatttctcccttttggaatgggagtatttacccaatgcctatacctccattgtatcttggaagtaactaacttgttttttattttataggctcatagatggaaggggctagctttgtctcagatgagactttggactttagactttcgagttaacgttggaatgagttaagactttggggggctgttgggaaggcatgattggattttgcagtgtgagaaggacatgagatttgggaggggccaagagtggaatgataggattcggatctgtgtccccacccaaatcttatgtcaaaatgtagcactaatgtgggaggtggggcatgggaggtgattggatcatggaggcagtttttcataaatgatttagcactgtccccatgcagtggttctcatgatagtgagtgagttctcatgagatggggttgttttaaagtgtgtagcacctcccccctttctctcttcctcctgctccagccatgagaagatgcctgctctgactttgccttccactgtgaataaaagcttcctgaggcctcctcagaagcagatgctgccatgcttcctgtacagcctgtggaactgtgagccaattaaacttttctttataaattatccagtctctagccaggtgtggtggtgtgtgcctgtagtcccagctacttgggaggctgaggcaggaggattgcttgagctcaggagttcgaggctgcagtgagttataattgcaccactgtacttcagccagggcaacagagcaagaccctgtctcaaaaataaataaataaataataaattacccaatcacaggtatttctttgtagcagtgagagaatggactaatacaccctccataccacaccctactacttcacctccctttccaactactgtagaagatactcactgttatcatttactatcttataagtgcaaaaactaaagtttaaagaggttaagtaattggctcaaggtatcacagctggtaaacagaggcactgagatttgttctcttttggtttgaccctagaaccctctcctaacattttttttttattttgactcttgtttggcagaataagtagcaaggacaccatcatctttgctgaggaaagatgactattattagtagtaggcaagtggagagtcgtcagtgttccatcagcttttcccctgtgtctctcatcccatgaatgaagagcagatgtgaaaattgctgccagccactcacttgtcagatgagaactgacttggctgtgctcattacaaaattaatttttaggcttattacaaaattaataaggcatgtgaaatatagatgtcctcaagatttataaactttaatttagaagtgtctttgattctaatacaaatctatttttacttacagtaagatagcaaagaaaaaagtctctggaaagattctggatatgtctaaggaaaatttgattagatgggccagtgtttcagtaacacacacaagaagcttctgaataacttgtaaaagtgagatgatgtgccccactttgatttaaattccattacatgtatcctcaggaattagcaaaaaaatttttttttcataataaaactcattagatgattttgacttataaagaataacttgtttgagaataaaatttgtctggacacaagtattggttctgtaaaatgaaaggaaatatctaaacttctgtgcaactctccgttaaagataatcctaaggctacttcagatatatttttgttattcaggatatggaatgagcatgaacgtttgcattttaatggtcaaaagaaccattaaggagagaagctcccaaaatataataagacatgactagtttcaactctatgttgcctctgtatgtttggaattccttgtaattccatatgtatttggatgatgtttacctttgctgtatctttgatgaaatgatgtgttaaactaacttcctgcagtaaataaaggaggaaattgtaaagc

SEQ ID NO: 1271 - DNA, 2047 bp, Homo sapiens
ccctttgccgagtctttgtctggccccagccccgcggggccccgggtccctgtgccctcgggggtccctagaaggcgacaatggctcgagtccaggcgccgaggctggcgagcgcctgcttggcgcacagctgcccgttgagcggcggcggctgctccgaggagtccggctgtcggctcaccagccccgagaagccggagccaaagatggagatcaagtttgagatgttggacgcgtccggggacgagtccgggcagaagtcctcgaagcgggcgcgcttgcagggggcgaacggggcgcccccggggggctcggcccccagcccgcccgcatcctcctcgtcgtcttcctcctcctcctggccagggagccggctcaggtgtctctccctccaggaagtggggcttgtgccctttggatacctgcactccccatcaccgcactccccatcgtggcacttcccttgttgcagttttatggagtgtgcgtctggctctccaactagacttgaaccgcttgagtgcataactcgggacttgaccatttgcgtctccctacggccagctcagcctccgcacacagggacctgcagagagtggatgtagccactgccccagcgtccctgggctctgaagagaagccattgcccttcaagagccaccctcatttcctgggcactggttggaaaaaacgaagaaaaagagacacccagctcacctccaagtttgcctgcaggtgaatatcttgttgaaagagaggggactccctgagtcttgctgggttgaggaagctgattggatttccggactcagaggagggctgcagagagggaggaatgggggggatgggcagctggctttctggatgggtgcaggacaatgacattgatggggaagcttggggtggctctgccgttgcccactgcttggctggtgaacttgctacatcttggccagcactatcctcttctggcctgcaccctgccagacacaggcagtaccccaaataccctgtccctgtgccccgaagtctccatgaccttcagatcccaagggacaagtggctccacgaggcagggcctgtccctctggctcacactatggagtccacagaacctagcccggagcctagtgcacagtaggtgctcaatgtattctatttgaatgttgcatgagtgaataaatgcaggaatgtcaggctggaaaacaggtatttgtacacctgttttcatagcagtgttattcacagtagtcaaagggtggaagcatcccacgtgtctgctgatgggtgaacgagtaaacagaatgtgccccagccatacaatggaatgcgattcagccttttttttttgagacggagtctggctctgtcacccaggctggagtgcagtggcacgacctcagcttgctgcaacctctgtctcccgggttcaagtgattctcctgcttcagcctcctgagtagctgggattacaggcatgtaccaccacacctggctaatttttatatttttagcagagacagggtttcaccatgttggccaggggctggtgtcgaactcctgacctcaagtgatcctccctcttcggcctctcaaagtgctgggattacaggcgtgagccacggcgcccggccacgattcacccttaaaaaaggaaggacattctgacacatgctacgacttgggtgaaccttgagtacctgagtgaaataagcccatcaaaaaaggacaaatattagccaggtgctgtggctaatgcctgtaatctcagcactttgggaggccaaggacggaggattgcttgaggattgctcaataccagcctgggccacaaagcaagaccacccatgtgaggtgtttagagtagtcaaattcatagagacagtaggatggggagtgccaggagctggggagaagggggaatggggagttagagtttaatggggacagattttcagttttacaagatgaaaaatgttctggagatgatggtggtgatagaggcacaatgtggatatgcttcatgccactgaactggacctaacca

SEQ ID NO: 1272 - DNA, 692 bp, Homo sapiens
cagaaaccgcgagccgtttcctttctcttcggaaatggcagttttgttgtcctggatgaaggcgagcgccgctgcctccctgaatgctgagcacgctggcttcgcggtgcccggaaggaagcctttgaagaccctgactccagtgtctccagctgagaggctgagcttgccagctccatttctgactgctcatggagcagaatcagtgaccaaggagaaaagggctgagtgaagaaacaagtgtgagtgccaagatgatgccaagggctgtgatttcctggtgggaagaaagaaggaatagaagccaaaggaagggggatgaaaagcaaaaccaagaatcacaaggaatcaagttcggagagaattttggcagagattttgagaggggggctttaagtcagccatggacatactgaagcaagaggaatgaagggaaaaaagaaaaggggggaaaaaaagaagaagaatggggccaaggaggatttaagactaccattataggttacaagttgaattctttttaatattcttcaagcaatgacagtaaagattcaaataacttttaaattacctttgatttctaaaccaagtttcttggaatgtgaaagtcgccaagactgggccctgcagggcctgggttgggctactactgcctatggagattctgagggtattaaccttaataatggcat

SEQ ID NO: 1273 - DNA, 2852 bp, Homo sapiens
acgccccgcgccccgggccgtgcagccagcccttaccttgcagcgcccggctgtctcccgatcgctaaagctacttatcccgggaaagctcgcgcgggacccgggaacgaacccacagacaaaaagtgaaacttcggcagggctggagcggctgctggttggtgcctttccccctccttcctccccaccgtccccaccccctccccttggtctcccgtgcggtgccctgagcgctggaggctgacgtcaggggcctgaattcctgactttgcctgcacgcatttgtccatgtaaggtatgggaaggcgtgtgcccgcgaagccgccgcgcagagctcgcctggcgggggaggggaaacccgcagccggcagtggctttgccaaaaggtgggcgcactgagggcattgcatttcctgggaggaagaggaggagacgcgggaatgcagggagcttgcaaaggaggaagagaaagagggagatgtggagactttgcccctgctagaggaagaggaaggagacgtaggaggaagcggccgcgtcagggggctcctggaaaatggaaaagcctgcgtctactattaaggcgtcaaattagggcactgagcttgagtggaagagatccagccatgaaatccccttccaagattttcctcgtgagccccgccctggattcccagcaagactcaaaacttacaaggtgtcagagctggcaaagaccaacttccaacccgtccgcttggcacgtgaggaaactgaagctctcggaagagaaatgacttgtacagggtcgtcactcagcagatcgaggagcgggcccaggcgctctgcctcccacttgggttcccgcctccaggaagggccctggctcccttttagccctgagccttgaagcaggttagatgcccgcgagctgtgcggaccacccagtgatttctactgctcttggcccagagccagttcctggaaggtcctggttgacagcgagccctgaatatcaatgacaatcagttgcttcagggcaacttcctctgtcctgtgctcaaataaatgaatccctggagtttaacgtttacttctgagccccgcccagaaagcttgctctgtgcttatagcttcaaaaaagtctgcgaacgagatgaactggtttgaatacagacaagcctgtcattggaagttttgagttggatttttctttcccctctgacatctgtaagggtgaacgacgatgagaaccaccacttaactgtgttaggggattatgacgcgcagcagccatggccaggaaagcattccataccctgagacttcctttccttgcacttctctcctattaatatctaaagtaatccctcacgttagcacataatgaaagcagtctctcacccggctattgcatcttcaggtgagttagataggacagagcgtagtcccccctttacacctcagacaaaaacttaagaaacgttactcgcccaacacaaaacaactgactgaccaagcacctgtcttcccctcctcccatccaggtctcctgactaatcccttcatctttccatacctggccctgacctctagcaggacctaattccattcataactgttgagagtacaccatgagctactgattcataaaaactccaaaaagtggttcttctgaggatggactttagtgggattcttttgaccaggaattaaggaaataatgtaaaaacacatgttattggatttattaagcaccttccttgtgcttaataagtgtttgaattcagacatttcaggggtaagactacttaacctctgtgttcctctcaactatctaatgtacacatacaaaaatatgaacatggctgggcgcggtggcttacacctgtaattccagcactttgggacgccgaggcgggcaaatcacctgaggtcaggagctcgagccagcctggccaacatggcaaaaccccatctctaccaaaaatacaaaaaactagctgggcgtggcggcgagcgcctgtaatcccaggtattccggaagctgaggcaggagaattgcctgaacccgggaggcaaaggttttagtgagccgagattgcgccactgcactccagcctgggggacagagcaagactgttgtcaaaaaaaaaaaatatatatatatacaaacacatatatatacacatatatatacatatatacacatatatatacatatatatacacatatatatacatatatatatacacacacacatatatatatacacacatacatatatatatatgaaggcagtaacagagagataaggtcgagaataaccacccattccacagactaataaagaatttatctctttgcaactaacatagtttgaaatgggagatacgggctcttggagagagttttttctggggttctgaaaaggtcagatcctatcaaaacacaatccactcactcaaacatttcagcgtactcacattctgagtactactgtttagtatgaaaagaattccagtgttacatgaagtaaaaatggattatctcaatcctcatggaatataacgggacttgaccagcatttcctttttttttttccttcagtaactcacttataaggaataatagggtcctaatgaggattaagatttaataaggtgtaattagagttgttcatttcttccatcatatacattataagagtactgtgccggatccagaaatgctactaattatgttgaaactgttgtatgggtgtgttggggaagtcactgtgtttctcctcctgaaatgtttatgaattgctcaggtgagcatggtgagcatggtgttagcatgaacatcatataaagttaactacaaaaga

SEQ ID NO: 1274 - DNA, 2051 bp, Homo sapiens
ctataaagagcaagagagtgtcctttcaacctcaagcccttctcatgaatgagtgttaatctcattcatgagagaagggtggagacttcataattaaatcacctcccaaaggtcacaccttttaatgctgttgaattggggattaagtttcaacaaaaatgttgaagggaacatcatcattcaaaccattgaaatcctccatcccagagtgatatatcttgaaaattcacttcatttgagagtcatttgtttcttgataactgttttccagttgctacatacttcattaaattgatgcaaaggaaaatctgttcattgcgctcaaaattttagagaaagacatgagaaatgatgaagaagtggatgattgacagagagttcagctgagtttcagtttggtgagaggatgtctaatatagagggcactccaggagtgggcctagcagccttagctggatgagggggtcccatggaagaggattgcctaacacatgattctgaacttcatccttacagacccgcgaatgtgtttctcaacgacctggggaccatatccgaaatgtcatcatcaatggagatggcacctacctacctctcagtttctgtgggagggtagcagcctaactttggaaggtcttcgtggacaatatgtccatgcagctgtgtcatctcctataataacaccacctcctgctggaatacctcctgaagaacctgcttgaggctgtttaaaatggttaactttttttatttttaatatatatgtagaagcagactctaaaataatgacaaaagtatggtgtagtaaatgcataaaccagaaacatggtcatttattatcagtattaagtattatgtactgtataaaattgtactgctatacttttatactactactaacacagtaggtttgtttacaccagcatcaccacaaacacataagtaatgcattgggctaggacattaagatagcttgtcacctattctatcaatatgtgataaaaatttttcagttccattttaatcttatggaaccactgctgtctatgcggcctgtcgttgacccaaatgtcattatgtagtgcataactgtactaatactaagaaaaactgagtgtttgtattttagagttaagcactgatacgtttacaaataaaataatatctgacgtttgtttcaaaggaatctggataagaggatatggtaagaacatatatgaagtaagattgaccatgggttaataatgtttgaagctaagtggtaaataatctttgtcccaacctttgtgcatagtggttctcaaagatgatccctgcactggcagcaacaggatcatttgagatcttgtttgaaaagcaaactctgaggaaaccacatattttgtaaccaaaactctgcacatgaggcccattagcctgtggtttcacaagccctttaggtaattttgatccaagctaatgtttctgaatcactgctccagtataaataacatagaatattgcatgtatttgtagagacatgacatttgtatatttttaagttatccataatacaacgaaaaataatgaaaacacccaggacaaatgtttcactggaaaaatttgaataaagtttgcagacataattctaatcttaaacacttccaaaagacagaaaaggatctattccccaacccagtctgagagtagaaaatcttagccctggaagtgaacaaagagtatgaaagaactattaaagccagtctcacttatgaacaaaagatccagtaatcttaagaagttaagtaaatctagcattatgtaaaaataataaaaatacatcagaacgaagttgtatttatcctagaaaatgaaagttgatttaacattagaaacactttaaaaagcagggaggattaaaggagtttgtttattcttaatatattctgtttgtttatttcagtgtttttatatgagtatccttaaatttttaaactgtgttaagatgcatgcttatacttgttttacttttctgactggaagataaacctaaataaaggttgtgaaaaaga

SEQ ID NO: 1275 - DNA, 3152 bp, Homo sapiens
agaactggtgagtccctgtagcaggtgacaccaagaaccaatgagccatatttgctcttcacacctcaacaaagatgctgcttccaggagatctgcaagaactctgaactcatagattatgtccaaactgagaagcactggacagtcattttgcttatctgcggtttctcatttctgagaagaatctccatatggacattatcacttttgttataatctcgaggatggttaaggtagctttgatcgccactttcatatctcctgtgataatcagcaccaatggaatgtgcagaaatccatccctattcctaaggactcctgatgtcatctcaccaggtgggacggtttgtcctgctcgagtctgcacgcccagctccaacagcttcgcccaagtttggggacaggcttcacccaacacccagaatctgtgcagttatttggcccctcattgaaaagcctctcacggttacagacaaaattaacttggtcatccctgcagcgccggagggatacttctggactctctgtttggggagtgtacgctcaaaccgtttcaagaagagatttaaacctcttcttggagaagactgaggctggcacaaggctaacaaatcaaataactgcaccgaggcaaagctgccgtctctcccgggctgtaccctgcctgcttctcccatccctgccttctggccgatttgtctttaaggttttagcattatccctctgttgacaaatgaatgcttttctggaagatgaggtatttccagaagcaggcagacactggctggagcgccgtaagagctctgcctccctcgattcgttatgtgaacgggagaggcctggaggttttgcgcgagcattacgttcaaggtgatgataaatggagtctggccggggtggtaataagggaatttctagccagatcctgtctagaccacggtttgttatggagggaaagccacaaaagggggctatagtaccccgttcctcagagaaattgtcctcagggagagccaagcacatttccagtccgaaccttcgtccggcccctcactggggccgctgtaaataacattagcctgtctttcagcaagctctgggaagcttataaaccgaacacggtttttgttgtctgtagttgtgcattaagctcagtactgtcaagtctaattattctcattaaggcctgaaagttttagggattaattaagcagagagccaaagcttatgcagaacagcaatattttccccctgaaggattagcccgtcattctgatggggttttccttgagcgttgcccattactttataagatagcaaagtgtggagctcatataatatggattagaaatcgcctacatttcacatgtgctattcagccatgaaaataagtcctggcccttgtgcctgtaacccggaaggctcactaatgagaaccaggcagtggggctaatgagaaattcaatacgtgccgtctctccttcccgtttcctttcaatttactttctacaggagccaatatgtgtaggaaaagtctgagtggatgctggtattctcctctttacctggtagggatcttagaaattatctgattctagtccttcttgctatagaagtgaaaactgggattcagcaacctgcttaaagggacccagttaatggcaaagctacttgaagagaaggtgacaggaaacttcaggaggtgtagacaatcattaggtacattaggatggtgagggtacttagtcttaggttttggtgtgatggaaaatgccgcagaaatgagaaggtcccacaatgaaaggaggatgctggtgaggacctaatttgcagacgagccccaggaactctggtgccctgcttggcaaaggatttcaaggcttcctggagaaatgggggtagggggagggatcgttaagccctggcaccccagatataaaaaggaaagtcagacgtgggtaatcaccctgtcttcacccagcagctccagttttcagcaaggcagaggggacacttctgccttcagtctcccctacttcacatcaaggcgccgttgcatttgatggctcgggacgcggccttcctgcctcccacactcccaaatccatgccttgtttatctttttagaatggatctctgatgcctgcccaccacgcggctggagtggcgccagcatccccagggcacgtctgtgatgaccgatgaggtccaccacctctaccccagaccctcccatacccaaaggctccctctgcccagtgaagtccccttcgccccagcattcctgcaccaggcacatcccaagggtggccccgtgtcctgcaggtggcaggagagtgcaccctcctcagacaccagtctgatatgtcaccaggagagagcgggcggtcctcagtgtatgctcttttcttgtctctggggagcttgttttggctcctcaagaagaccttggaaaaagcacaggttgtagaggcggcattcgccgggcagaaccatgtcccaagacaactggttagtgaggccaggcgtgacaatcataatcggagcagcaactgtgcaatggcataggcaaagggggccgaaggcgcagcagccaccaccattatagtcagactgggcaccgtttcctaaatgtcacacatccttccagccccttgatctttgcttatgaaaagggtcattccctctacaatcctctagaactctttgtaggtttttgtttgttttccaaacactgtacttgcttctttatctgtctctctatgaaccgtgagtcccagaggacctcgtggtcctcaattatccttgcttctctgtggcctgtgccatggggctgaatgtttgtagcccccagaatccatatgtggaagccctaatccccactgtgctggtattaggaggtggggcctttgggatgtgattagggttagatgagggcatgagggtggggccctcataatgagattagtgaccttatcaagaggatgagacactagatcccttgctccctctctgcctgcaatcaccagtgaaaggccaagtgaggacataatagaagccatcccttcccagaacccagccatgctggcaccctgatctctagcttctcagcctccagaactgtgagaaataaatgtctgttgtctactcca

SEQ ID NO: 1276 - DNA, 739 bp, Homo sapiens
ggaggccccgggcctggtgttccgcacgttctaaaccgcctgtccccgaggaagtcgggcagggtcgggccggactcagcgccgctggcgggagcgccgtccgccccgaggaccctgcgggcccggaagccgagacagggccgcccacgtcagcgcctggcgcgggcccgaacgtaaatggcgctcctccgcgccgcagccgcagccgccccgctcccttcccgctccgccagctgccgccctcccgcgctcgcttctcgccccgcggcctggcccgtgcgcctccgaggctggccaggggcaccgaggccgcgggccccccatcgcccccacccgagccctgatttaccgtccgagagccggcggcacatgggaccccgagaggagaagcgcgcctgccccaaaaccacggcatggagacggaatgatgcagactcctatccgcgagatacctgctgtaatttcgctgtggttcgtgaggacgcgtcctgggctgccctgagaagcctacgtctccccttcgaggcccgggaagacctccaaccccgctgacaatgctgggccctcagccagacctgccctgcgtgccacgttctgttctaagatcgggctgccgagctgtggcctggaggaaacctggcaggtgtcaccagagctttggggagggtgaggccctgtcggggaagcccagtgggagtcatgaaggagggaacacgtgtggagcccttgtagggggagg

SEQ ID NO: 1277 - DNA, 1072 bp, Homo sapiens
gaggcaggctgggtccgcctggcagcctacgggaggaggcgggagccgggaaggaggggagcctaggcccggcgtggggaggccggcaggaagggcctcgagcccagtgcggacctttcttcagcctctgtgcgaccgagccgcgcgccaggctcctgtgcgaggaggacgcgctgactccctccgacctgggctccgatggagcagaaatagcgggacctggacttgtggcgcgcctggtgccacatctcgggctctgcgagcgtcctggcgcgggatcctgccgtttgcatccaagagaggggaggacaggggcaaaaggatgcagggaggctgctgatttccactgaagagctaatttcctgtgagacattaacagtgatttaagaaaaagattcctgtaactgtaatgtcttacaataacagaatgcaggagagcacatatcaatgaagaaaagacaaaatgtacttatccatgaagctgaggttaagaaaccagtgtcttcaagagccagggacagcactgggtctgtgcagagttgagagatggtgatgacatgtgacagagctccttgctgctcaaattttatgccagataaaatattcaccttctcggactccctggcaccaggcatggccatgtaatcctacagcacagctgatgaaagagaagacatcttgctgctatttgacaagcaagaagataaaagctttcctataaagatgatggagcaaaaaaatagaaggggcctagactccctaccttcacacttcctgctataaaagcattgctattataaggttaatctgcagaaacagacttctatgtcatatgcttaaatgcatcaaaattcatacaatatccattaaattggtaaaagtatccattttaaaggattaatctgagggacccacagacacttaacacaatcaaatctcagaaaaaaaatcagttatttcattgtgattttgaggctgatcttttatgatcttttagttatcaaactgttaaatacattttaactttcaaattttatgaataaaggagatgaatcctgttattttctcagtg

SEQ ID NO: 1278 - DNA, 2428 bp, Homo sapiens
caaaagctgattggaagtctattcttccacccttgccagcctgccaggatggtgtcagaaaggccatgtagaaagcagagtttcatccccactgagtggtgagaagattttctcaatggatatcatatgaagagtcagaacttcaccatgtcacccctcaatttggcagtaaagaagtacctgtcccctctcagcagggtagtgtcagaagaagcctactggagagtcaggactttcaccaccactcaattgccacaggccacccccatggtgtcaatagaggatgagtggggagctggaaaccccgcttccacccggcaataatgaggttccctcccctccccgacttgagtgtcaacagatgctgagggggaactgaaagaaaaaaatagattaacccacaattatagttagaaacttctctactcttttctcaacaactgatagagcaactagacagaaaatcagcaaagatataaaagaactcaatgaaagcatcaatcaaaaggatttaattgactttaatagaacatgctacctaataacagcaagatgtacattatttttatacatatccaagatagactatatgctgggccataaaacctcaacaaatttaaaataatcgaagtcatgcaaagtgtattctgcttccacccaccaagtcttacattagcccatttgcacactgctataaagaattacctgagactgggtaatttataaagaaaacaggtttaattgatttacagttccacatggcttggaaggcctcaggaaacttacaatcatggcagaaggcaaagggaaagcaaggcacgttttacatggcagcaggagacaatgaaagggaagagccatgcacttatcaaaaaaccagatcttgtgagaattctgtcatgagaacagcaaggcagaagtccgtccccatgattcaatcacctcccacaaggccactctgccaacacatggggattacaatttgagatgggatgtgggtggggacacagaaccaaactatgtcaagtcttttccataggccttcaccaagtgtccccagaaatactggaagcaaggcaggagagctgcaaatggtccctcatatacacatacacacagagccaggcacaggcattgaatgcctggtagtctgaggatggagaggagaagggaagaaactcttctggcactctgtcttacagtgagtgcaaccagtgggctcctattgttggaagtaggtaaaagagctcaaggagtttccccatattaagtataggtgtgtgggacctgctgagtgaagaatgaaggcaatgcaagagaactgagaaaatgactccagacacacaactccaaagccctcggaaagggaatgcattaaacctacccttaatcatttgaagactctgctgaattaaatcttgctagagtaacaatatggcccaaacctggctcaattcaaaatagtttgactcagtgcccacactagcagtgtgacagaagaagggaaaaacactcctcttggcacaaatattatttatgtaggtctctacatttatcttacacagaatatacagcattccgtcaaaactatacgacatgcaaagaaacaagacccatcatttaaaaaaagaaagagtcaaaagaaccagattcacatatgatccaaatgtcagaataatcagaaaattttttaaaaagaatagtcacaataagacattaaaggatctagcagtgaaagatacagatgagcaaatggaaaatgtcattagtgcaatggaaactgtataaaagatccaagtggaaattctagaactaaaacagataataacaaagtccatcagaattctttccatacacttatcagcagaccagacacagaggaagaaaacaccagtgaacttaaagacatgccaataaaattatccaaactgtaatgcaaagagaaaaaatctgtgaaaaaatacagcatctaaaaatctgaggagcaatatcaaatggtttaacaaaaacataattggagttccaaataaataagagagaaaatggagcaaaaaaattgatgaataatgattgagaattttgctaaattgataaacacatttatctgcagttccaagaagctcattaagccccaagcaggataaatacaaagaaaaccacaccaatatgcatcatagtcaaagtgctaaaagtcaaatataatcttgaaagcagcctgaagaaaaaagtcacactttatactcaagtgaacaacaatcagaatgaagtaagactattcatcagaaacagtggagaacagaagaaaatgaactaacattttcaaattctaatagaaaaaactgtcaacctagatactaaatccagtgaaaatattctttatgaaggaagaaaaaataaagaaattgtcagacgacgaaggctgaaaaaa

SEQ ID NO: 1279 - DNA, 517 bp, Homo sapiens
gccttctcctgtctgccaccacgtgagatgtgcctttcaccttccactatgattgtgaggcctcaccagccatgtggaactagttcaagatttcaacattttaagataatctgaaaaaaattggaatgtgcccccagctgcgctactggtgacttcttcaacagttgagaaactgaactatgtgttcatgaaaatactccatcattaaagtttatgcaatactctctcaacactgtttatcaaaggaaccaatatggaaggaaaaacattgctttgaagggaagatggatggatcccctagtaaactacagcttgaggtgcaatttcctaaagttcaaatgcctgaaaaaggaaacgaaagaaagaaactcaactcttgagacagcttcaatgctagctttgatctcaattatagagttatttatgaaaagtgcatttttacaactaaaaataaattaggatcaaaagcttctagaggctatactatggagtgcttaataaaaagttgagtaaagag

SEQ ID NO: 1280 - DNA, 1628 bp, Homo sapiens
agggcagtgaacctaagccaggagctgcttaggcattaaggcttctatacccagaatcgtgtgctaagctttctctccaagtcagcacaacaaagcaaaccagagcatcgtaccaacaacctgaaaggtcacctgactccttccttctcactcccattctgtacttctgcatacgtgggcaggcaagtgaatggtaagtaagcctgcaaacagcctttctttgtatagggaatgacaggcatttcatcagcaactccaggatggcaggccgttatcctgaaacctatcagaacagctcctgcttggcttccaaaatatcacaattttggaaatgtacaaaggttagttttcacagtccttgaagcctctttccaccctggccatagcccatgtcagcagtaacctatgtctttgttttacatatcatgttgttttactcacctggtgcctccagtgccctatagggtccctgagctgtcctgatactctttcttagatcctgtcaaaacactcacttcaacaaattctgcccttggactctgatgggaggttctgataaagaaaattattgaaaaccgcattatttaaatgtggttatatttcagctggacctggaaataaagacgaaatactgcttcgtgactgtgctttaaggaatttttgcttctaggagatgattgtgagccaggcagaggtgaaggagcaggagcaaatagccaaggcacagttcacagtgctggattttcttgtggatatagctgcattgttgttccttctgccttgtccaactgcttcctggtatccctaccctcaccttttcgttatcttttcatctctctaatcattgagaaaaagagtacaaaaagccagattttgcagttccctattttgtattccaggttgaagagtgctctggctgtagagggtccccacgatctgtcatctagtaactcaccagatacataagatattttgcctgctatgaagccattggagaatcaggtccagctgtgtcctacagatttataccctcactttggatgcactgtgaatcttgaaacaattcattttatacttaaccctttaagtataaagtatatacttcaagtataaagtgtaaggttgcttcatttcatgggcccacccaggatttaaaggtgtattccctgaaagaattggttccttccggtgggttcctggctgacttcaagaatgaagctgcagacacttatggactgggaggaggcccacgagaaaaacaggaagaacaagagaaaggctgaggctctagtggctgctttgcagacttgcagagtccaggatcccccaggaacttccactgattgctacctgttaccagtgttaaagccagggcactttaagaagaattgcccaagccacaagaaaaagccaccttgaccacttttgtggtgaagaccactggagattgcactactgaccaccaagacagagacacaatagcgaatctagaagtggaagtgtgagagatacctgcagctgttaagatgtctgggaatagacacacaaactctctctcccagataagcaacacaaagcagcacagagcaacagagactgaaagtctgcctacctgatcagggaataag

SEQ ID NO: 1281 - DNA, 2465 bp, Homo sapiens
aagtttgcactgggaaactctcccttttaaaaccatcagatctcctgagactttttcgccatcacaagaacagcacaggaaagacttgcccccatgattcaattacctcccaccggctccctcccgcaacaagtgggaattcaagatgaaatttgggtggggacacagccaaaccatatcaaatgttttatgctaactgaaaaaaaaaaaaaaaaaacagattcaaaagtctatatccaatgcgattctatttatgtgacatttgggaaaagtccaaaatttaagaaccaaacacagatcagtggttgcctggtggtggaattagggaaggccttcactaaattcacagggaattttggggggctgatggaactgttctatgtctcaattatagtgatagttatattactgcatacatttgtcaaaactcatagaattgtacactaaaaagtgtgaatttactgcatataaattttgtctaagtgattttgatattaaaatttattacaagataaagctaattatacaagaccaaaatgtttaaaaagcagggtttttaaatatgaccatacaaacgagaaatgtaagggtactaataaagggggcacattttcttactaaatctcgggatatgctatattacataattcttatcgtcactacattttacaaagcaatctcaaacagtatatttttattttcacaatggcacactaatataagctaggatagtttatttaaaatacattctccccttaaatatgacaccaaaagcacaggaaaccaaataaatattagataaactggacttcatcaaaatttaaaacttttgtgcctttagagtaccataaagaaagtgaaagacaacccactgtaggggaaaactatttgcaaaatatacctgataagggacttgtatctaaacacataaagaacttaaaagttcttattattcagtaattttttcaaatccaatttaaaaaatgggcaaagaccttaacagacatttctccaaagaaaatatacaaatgccaataagcacatgaaaagatgttcaacatcattagttattagggaaatgcaaatcaaaaccacaatgaggtaacccttttacacttgcagtatggctataatcaaaaagataatctagcagatgttggtgaggatgtgtagaaattaggagcttcatgcactactggtaggaatgtaaaatggtacaggcaggttggaaaacagtcagcaattcctcaaaaggtcaacataggatttccatatgacccagcaattccattcctggctatataaccaagagaaatagaaacatacgtgcacacaaaaacttgtacatgaatattcaaagtatttaaaattgtcagacagtagaaacaacccaaataacctaaagctacgaactgataaacagataaattaaatgtgttatatccatataacagaatgttacttgccaataaaaagaaataaaatactgataggggctgcaacatgaatgaaccttgaaaatatcttaagtaaaagtcagtcacaaaagaccacatattatatgattccacgtatatgtgatttccagaatagacaaatttattgagacataaaatagaatagtggttgcctagggctgtaagggattgaggggagcagggtcagggtgtggtggctaaagggtatgaagtatcttttagggattatgaaaatggttgtggtgatagttgcacaattctatgaatacaccaaaagccattgaattgcatactttaaaagggtgaattacatctcaataaagttgttaaaaatattctatgtaaggggaaagagttttcagtaaatactaataaaataactgaactgtcaaaatggcatctatacaaatgtgtaaccttaataattttcttgtatctgtggcattaagttaggaaaaataccaaataattaccctttctactgaagacaactgttgctgtaatccatcatactttttgtttgcttcttcgaaaagagttttgtatttttctacttgagactgttgcatattaattgttcgctgctgtctcataaaatcttcttcaaaattttttacttgagactttaaattctgaatttcatcctcctatagttataaagttatagattatgtgaaaaaatatgtaagatttgttatcaaaacaaagcagaaaaaaagacgtttcatatgttctttgatatttatacacgtttcatgaaaaacaaattagtctatttttatcttcaaaaatggaagtcaaatgttttatttgcatttaatagcttacactacatttgtaagactaatatagagaattctaattgtagcaagaatttaagatatttcagctctgtgaaaattcaacatctcagaataaagttcagtacttatatacaatttttgaattcaaaatttaactatgatttatatctaaataaagtaattc

SEQ ID NO: 1282 - DNA, 1741 bp, Homo sapiens
tttccactccagaagacatcagccagtatgcttaggccgtttttagtaattctgttgtacaggaagtgtggtatcagcatttgcttctggtgagggcctcaggaaccttacaatcatggcgaaaggtcttctttctgatccaggagtgaattaacagagtttggcaccttaaagaaacacaatctatttattttaaagcctgctacctggagacttcatctgcattataagatccttggtctgcacgaccccttaccttagcccagatactctcttctactgatttcaggtctttcattaagatctcccaaccaactgccaatcagaaaacctttgaatccacctatgaccaggaaacctcttctttgagttgcatgagggggaactttatgtgttcaaaatgacaataggaaaaaaaagtaaatttttgtcctaaggtaagatgccaatataaaaaggaaatacaggacaaaactggcgccttaagcaaattttagaaaatctgtggaaaactcatcttgtgaaaggaattttgtttgtgatcaagttggctaaaattagaattatttttctaaaaattgagccataggagcactaatgggcatagagactgccaggcccgtacccaccagtgccctgtccccatgacaacattgctgccagtgcaaaactgtgcgggagaccactagacccatccccacccccagcagcagctgccggctgcacagagggtacacagagtttcatgcctaccagcacccacccttgtgctaacaccagccctggagcaaacacatgcacagacactggggggacccctggctggccacactatcctgccaccatcaccactgtgaacacccacacagaagttggcacccctgaacctaccagcacctcactgcagaatgagtgtgcaccctgccatgctacccatactgctggcacatgcaaacaaggatggatcccattgccacttccctacaaagttctgtggctggcaccacccatcagactcttgtgaacactgcttcaggaacaacttggcccttccagcatggcaggttcctaacttccagggaccacagaacaaagccagaggtctgaaatcaacaccccagagttagaacacacagtccaggagttctgagctgagccttggttccctaaaatcctccagaaacaaacccagtcaattgaacccaccttataccacaattaaatctcccagaacataaaatggaattaaagaaaaaaaaacttatctaaaagtcagcaactacaaagattgaaggaatattagcccacaaagatgagaaagaaccagtgcaaaaactctggcaactcaaaaagccatagtgtcttgttacctccaaaggattggactagttcccaaacaggctgagatggccaaaattacagaaatagaattcagattctggacagaaatgaagattattgagatacaggagaaggttgaaatctaatcaaaggaatctaaggattacaataaactgaacaggaacttatagacaaaatggccattagaacaaagaaccaaatttatctggtagagctgtaaaacattctatgagaatttcacaatgcaatcccaagtattaacagcagaaccgaccaagctaaggaaagaatctcagagcttgaagacctctttgaagacctctgaaataactctatcagagtaaaagagaggaaaaacaataaacaagaaggaacaacc

SEQ ID NO: 1283 - DNA, 72 bp, Homo sapiens
actccatgatgaacacaaaatgacaagcatatggctgaactttcaagtgatgtcatcttactactgagaagt

SEQ ID NO: 1284 - DNA, 496 bp, Homo sapiens
gcagagtgaagggccgggaacagtggagggtgcgaggaagacaatgggggaggaccctgaggcggcctctgtgagccgacaggaacacgtggtcgatcagagagagactctatttaaagtcatttccgcagttaattgcttcatgctgatgtagtttctgaaaacttcacaagcacacaaaaatcctagaacatggtgtcttttaggaggttcgtgaacggatggggaggaccctgaaaagcactgtggaatacaggtttctagtaacttcaaaatcacatcatttggactgggtaagaattgctgaaactttaatgaaaagactgactggcttataaaactgctaacccaaatagaataaaaattaattgaataccgaggaaatgcttcaccaggtttgcatacttaatcagcctatactgaaattgtttagatatacaatttgaatgaactccatggtctaagtcaaattacctgtgataacccatcagttatc

SEQ ID NO: 1285 - DNA, 1831 bp, Homo sapiens
acattacaggttttgcaaaagcagaaacttcaacacaggaaaacttttaaagtaaatagactagcgcggcacttacctctctctaatggtgggataaagaccctgccagtttggggccgggataaggttgttgttactgagattctgctggtggtactgctggacgctggtgctgctggagttggctggctttttacgggggaatatatcagcagccatcttcttctttttagtcttcaaggtaattatttcataacaaactggtggcaacttgctgctgttgctactgctgctgctggtatttgctttctttgagcttttcttggacctgttctttaccgtctctggaagcatcaagaagaaggtatggcaactggtgtcagaagtataaggggtttgtgaaaattccacagtaaagaagtggggcaacacctggactacgaggcggatctcctggcttgtcatgttgtttgcttcattcactctaatattcactcacagtaattacctcacacacttacagaatgctcaattgtcatatttctaatctactttaaaagaagagctttcttttaaagtttacaaagatgaaaaccatgaacatatgtagtctgcacccctgtaggggcacactacaggcaagaatgctgaaaggatacttgtggaatgagatggaaggaaggaactgcagtgaggacgctgctcaaaaacagaagaggctctccaggtacttgaaaatagtctatccaaagaaaagtaaaatcaaggctcaggaggtccctttcaaaaaggcctgaatggggctgttccaacaaaggacttcaatcaatcctactgggaatgctggaatggaacaacctcacccaaccattgctgtggctttctccaggtcatttgttggctttaaataacagaagaagaaaataatatgtttcggtcaaagaaaaaggaaagtgtttccaaagatatgttttactttggctagtattagttttttttgtttttttttctgatattcgaaagatagtcaccaagaacatctcctccatcagatcatcaaagtccaaaagcttctctcacatattaaccaaagagtatcttgttctatttgggaaaaacaccttttccaagaacacatgggacgggaagaaagaatccagacaactcccaaatcaccagatattctacatcagtcctgattattagtgaggttccaagtatcacagccaaatttccccaacatccacaactaagttctatacctttagtcactcagtgcttagaaataaacactgctctcctgtccttcaatttactgcctccccgccatcaacaccaaacacctgaattatatcaattatcttagattttaaattgtgctcactgtaaaatgaacaggacaggttgggaaaggcaaggccagaaaaagctttttattttgttgttttgttttgttttgttttgttttgcaaaaccacatagaaaagaccagttacaatttcacattttgacaaacactatacacatatccagaaggtctcaattaattactatttaatgaaatgctatcctttgttttacaatgtatgcgaccagaatgaaatatagttattttgggcaaacaatacaagatctaacattaagaggtctgctatgctgagtgaaatctgagaaatcttgctgtgggaaaacttaaacatacatgaagttacaaagtagcttaacactcaatttctaacataccttctctcgagtagataccaccaaataaaaatgaaaaaaggcacctacatttctaaaataaataacaataatattccctaacaaaaaa

SEQ ID NO: 1286 - DNA, 382 bp, Homo sapiens
ttgagcccagaagtcactggaggagttcaagggtgcccagagtgcaagcaagatccaagaatatccagaactattcctaagccacatcgtgtattattatcaaatggcctgtgaagcagattctcttgctgggacagtttttaagacctctctatactgaattgggacactgcctggaagttgtccaaactctgccttttgaaagaatattgatgactaagaaaacttgccctgaataaactaatgttaggacacaggaaagcaccctcacttcaagtcatgttcattccacaatctcatatttcagatgtcatggttgcaggattggtcgtgttgtgttggagctgagaagaggcagtgcccatcaatcagcagttcctgc

SEQ ID NO: 1287 - DNA, 5079 bp, Homo sapiens
gttcgcttatttaagaaacgacaagatcttaaggccgagggaagtgtctgtctgcctttggggacgggaggaggccgagggtccaggatggggttgggcttgccccacatgcacttgagacccgcacacacgtttaggtgattataacaaaatcaaagcctaaaagtcaactctggtttttttttgttttttttcttttgttttttttatgtttttgagacagggtcttgctctgtcgcccaggctgcagtgcagtggcgaggtcacgactcactgcaacctcggcctcccaggcttaggcaatcctcccacctcagcctgttgggtagctgggacctcaggcatgtgccaccatgcccagctaatttttgtattttgtgtgtctttttgttttttcactgtgagtatacgttagtcatttttcttaacaattgaaactgggaactctggggattcagaattaacagccttggctgtgagcttcttatcgataccagaaaaagtttggaccttgcgttccacgttgttctgctgggctttgtccgaatgaacccttgtgagctgctgtgtccatttcacgcggattctcctgcccacaatttcacctgggaagaccgagtcctcgaggattgcgacgtgcgcagctgtcggagcgtggatcctgggacgcttttgcttattttttgtacaccttttttgagttggtttaggcagaattttcctctaagcaatagacgacatacttaccagtgaactttttctccaattcacgtactagccagacttggatgttctggaattatttcagtggcagaagaagaacaaagattatgataacttccttttttttttttttctttctttctttcttttttttttttttttttgagacagagtgtcgccttgtcgcccaggctggagttcagtggctcagtattggctcactgcaacctctgcctcccaggtgcaaacgattctcctgcctcagactcccaagtagctggcactacagctgtctgccaccacacccagctaattctgttgtattttagtagagacagggtttcaccctgttggccaggctgctctcgaactcctgacctcaagtgatctgcccgccttggcctccctaagtgctgggattacagacgtgagccattgcgcctggcctttttctttttttctttttttgagacggagtcttgctctctcgcccgggctggagtgcagtggtgcgatctcggctcactgcaagctccatctcccgggttctcgccattctcctgcttcagcctcctgagtagttgggactacaggcgcccaccaccacatccggctaattttttgtatttttagtagagactgggtttcattgtgttagccaggatggtctcgatctcctgacctcgttgatccgcccgcctcagcctcccaaagtgctgggattacaggtgttagccaccacagccggccctctttttttttgagatggagtctcgctttgttgcccaggctggagtgcagtggcgcaatcttggctcactgcagcctctgcctcccgggttcaagcgattctcctgcttcggccccctgagtagctgggattacaggcacgtgccaccacacccagctaatttttgtatttttagtagagacggggtttcaccatgttggccacgctggtcttgagctcctgacctcgtgatcttcccgcctcagctccccacagtgctgggattccaggcgtgagctgctgtacctgcccatgataactttctcaccaccaccaacttcagtttccctcgctgctgtaataatcagttccctgagctgggccttgaggtccgagttcatctccagctccagaagaatctaagaaggcaagaacaccagggtcaaccctcagtgcgtgtatgagcacccccagcctcatttttgtgttttctatagagatggggtctcgctgtgttgcccatgctggtcctgaactccttatctcaagtgatcctcctgcctcggcctcctaaagtgctgggattacagccatcagccgccgtgtccggctttaaaaagcaatcctaaaaatcgtaaacaaaatgacacagaggaaccttattgctcatcgagccatgcaagaaaggaaccgtttatttccagcaagtttaaaacatcgatttgacctccagccatggtcgatgagatgttagaaaaccaactctcttgctgacaacaacgagaaaatcttgataccatttagcaaaaagaagtctgtgggggaggcgttggagagtgacggaactgccacggcctgaggcacccggcttccggagcctctggcagcccagagaagtctctgtcttgtcgcccaggctggggtacagtggtgccatctcagctgactgcaacctccgcctccgggttcaagtgattgtcctgcctcagcctcctgagtagctgggattacaggcgcccaccaccatgcctggacgtcccagtgatcgggaggagcgggaagagcttcagctacaaccaggacgtggtgctgctgcttctgacagacggagtcctgttccaccttcagagcgtcacggcgtacgccctcatggggaaaatctccccggtgactttcagtgttttaactcaaatgggtgatgaaaaggactcttggaaagtgaaaactttagatgaaattcttcaggaaaagaaacgaaggaaggaacaagaggagaaagcagagataaaacgcttaaaaaatgtaagccatatttttttaagtaagtggttttcttaaaggagatttaatttctttgccctcatttttccattagaacaacgcttcttcggtgaagttcttttgtacttccaaatgtcgcagtctgatgaccgggattccaagcgggattcccttgaggagggggagctgagagatcactgcatggagatcacaataaggaactccccgtatagaagagaagactcaatggaagacagaggagaagaagatgattctttggccatcaaaccaccccagcaaatgtctcggaaagaaaaagttcatcacagaaaagatgaaaagagaaaagaaaaatggaagcatgctagagtgaaagaaagagagcacgaacgtcggaaacgacatcgagaagaacaggataaagctcgccgggaatgggaaagacagaagagaagggaaatggcaagggagcattccaggagagaaagggaccgcttggagcagttagaaaggaagcgggagcgggagcgcaagatgcgggagcagcagaaggagcagcgggagcagaaggagcgcgagcggcgggcggaggagcggcgcaaggagcgggaggcccgcagggaagtgtctgcacatcaccgaacgatgagagaggactacagcgacaaagtgaaagccagccactggagtcgcagcccgcctcggccgccgcgggagcggttcgagttgggagacggccggaagccagtaaaagaagagaaaatggaagaaagggacctgctgtccgacttacaggacatcagcgacagcgagaggaagaccagctcggccgagtcctcgtcagcggaatcaggctcaggttctgaggaagaagaggaggaggaggaagaggaggaggaggaagggagcaccagtgaagaatcagaggaggaggaggaggaagaggaagaggaggaggaggagaccggcagcaactctgaggaggcatcagagcagtctgccgaagaagtaagtgaggaagaaatgagtgaagatgaagaacgagaaaatgaaaaccacctcttggttgttccagagtcacggttcgaccgagattccggggagagtgaagaagcagaggaagaagtggggctgccggagcgtcgaggagttccagtgcctgaacaggatcgaggagggcacctatggagtggtctacagagcaaaagacaagaaaacagatgaaattgtggctctaaagcggctgaagatggagaaggagaaggagggcttcccgatcacgtccctgagggagatcaacaccatcctcaaggcccagcatcccaacattgtcaccgttagagagattgtggtgggcagcaacatggacaagatctacatcgtgatgaactacgtggagcacgacctcaagagcctgatggagaccatgaaacagcccttcctgccaggggaggtgaagaccctgatgatccagctgctgcggggggtgaaacacctgcacgacaactggatcctgcaccgtgacctcaagacgtccaacctgctgctgagccacgccggcatcctcaagcctcccacagcttcgcgggcactggccttcctgaacacctctcctggcgtcttaggaatactccacggccgtggacatgtggtcagtgggctgcatcttcggggagctgctgactcagaagcctctgttccccgggaattcggaaatcgatcagatcaacaaagtgttcaaggagctggggacccccagtgagaaaatctggcccggctacagtgagctcccagtagtcaaaaagatgaccttcagcgagcacccctacaacaacctccgcaagcgcttcggggctctgctctcagaccagggcttcgacctcatgaacaagttcctgacctacttccccgggaggaggatcagcgctgaggacggcctcaagcatgagtatttccgcgagacccccctccccatcgacccctccatgttccccacgtggcccgccaagagcgagcagcagcgtgtgaagcggggcaccagcccgaggccccctgagggaggcctgggctacagccagctgggtgacgacgacctgaaggagacgggcttccaccttaccaccacgaaccagggggcctctgccgcgggccccggcttcagcctcaagttctgaaggtcagagtggaccccgtcatggggagaactcagccgggaccacaggcgtggctactgcggctggagctgcgatgagactcggaactcctcgtcttactttgtgctccatgttttgtttttgtattttggtttgtaaatttgtagaattaaatcattttccttgttgtgg

SEQ ID NO: 1288 - DNA, 845 bp, Homo sapiens
gtctcagccagcagggttgcccagtgccccttgtcaccccccgagcaacacaagccaggctgcggttactctgggtctgtgcgtctgggatcatagtttttaaatctgccccagggtcctccagtcccagctgtggaaagtcaccctcagagggtgaggcgggcggcgcgcctctgtgtgagtggccccatccttcacagcgagtttgtgtctactgaatcgcagactctgggaggctgaagggttacaggaggtcgtgtgtctcacgtcgccacttcacggttgaggaccccgtgacccgctttgctcagtggctgcgcaagatgagtaatgacctgaaacagggaaaatgtcttggatacatcttgcgtaatgaggagaaaaatgcagccatgttgcagcctgataaaatactctgccagtgtcctgccataaaatgacaggcgaattttcagtagcagattctctaatagttctgtggtcttctaggtgctaaactgtttaagtatctacattttctaagcccgcctaatgcaaatattctcaaaaaacataaacccttcattctttctcaaataggttacattagttatacactctggaggtgacttgacctgtcattgtgaacaattattgctcttggacgacccaggacataggccagccagtacgtaccccagtgtgttggagaatcgcgctcggcttcttcctctgtgctgagtcatgaaagttgccggagcaggtgcagttacacaacctccaggtatgatcctgtttaaggactggatttaggataactacttagaggttaaaagtcacaagggtgtatggatgaggctggagtg

SEQ ID NO: 1289 - DNA, 875 bp, Homo sapiens
ggtggtcatcctggtcacggatgtctctgtggattcagtggatgcagcagctgatgccgccaggtccaacagagtgacagtgttccctgttggaattggagatcgctacgatgcagcccagctacggatcttggccggcccagcaggcgactccaacatggtgaagctccagcaaatcgaagacctccctaccatggtcaccttgggcaattccttcctccacaaactgtgctctcgatttgttaggattcgcatggatgaggatgggaatgagaagaggcccggggacgtctggaccttgccagaccagtgccacaccgtgacttgccagccagatggccagaccttgctgaagagtcatcgggtcaactgtgaccgggggccgaggccttcatgccctaacagccagtcccctgttaaagtggaagacacctgtggctgccgctggacctgcccctattttgttaacctatcgaaaatcaagaatgcaacagctgcatgtgaaagatcaatagaggataaaaagtgttactgtgaacgacttaaaagtaaaatttcaaaaaatgaaaaataatattagcatactacaaaaggtactatctgaaacagacaaaaccaaatcacagagcatcagaatcttgaaaggaaaaaaaaagctctatttatcttacaacaacaagaagaagaaagaataaaggctgaagagttgtatgaaaaagatacagaagagttaaaaataatggaagagcaatataggacacaaactgaagtgaaaaaacaatctaaactgactctcaaatcattggaagtggaattgaagactgtaagaagtaactcaaatcagacttctcatactcatgaaaaagaaagagacc

SEQ ID NO: 1290 - DNA, 2850 bp, Homo sapiens
aggaaaactgaatcaaagtaaaaatctgtaaggctttgtagtttatggggaaaataatcactagatacataaaatatttacttttttttagcctttttttccccccacagaacatatagaggacagggctttgctctgccttctcactttctccccactcacccccaacctccagagtgtgttttccaagtaaaattttaggccatagagaaattcgcaattgataggccaaggtgactgataaaactctagaggtcaggattggtaatagtggagcgaggaccagatggaatttttgtttaatactgtatctgaaattgaggatgggatagataggaaatgacctatcatttcatgaggagatgacttttctgtgataatgggacagagatgagcttagatgaatgaatatatattttagcacttacctttttccataaaacacaaatagacttggtgcaaaattaccagtctcactccatggtatttctgatgagatcggtaaataatagagagagacatacttctttaggagctagctgactttaacatatgctggagtacaattgacttacaactatttggcgttagaaatgatttttctagggcttggtgggggaaaaatactcgtgaaatacctgccttgacttaaacttcaacatattttaaagtcattttattatcccacaactcagaatgtcttcaattaaaggtaagaaaataaggtgatgggctacagtggcttaatcaggtgttcagttaatgaagtagaagaaggatacagattctaataattcacagttgtagaggttctagactgttcttagtatgaagtcctggcagtgtatgtggcagagtgaataatgtttcacgacctggtgagtcatgtgaggactgtgagtaacttttatcttctgtgtgtcccacatagcatataacagtactatgctagtgatttgcttgacagttattgaatgaatgctaagtttcaaatatttatttgatagtcacttgattaccaagtaatcaaataattacttatagtgttttagggagttttcagaagatatttgtgattaaataaatgattatatatgtatattagcatactgtatgcatttgtcagttgggaaagaggggaatatggagaagtggggaactgcattcagtttttattttataggcaactaatatggtcctttggttttattttaaaatgaaactgagccttgagcattttgagctttcatgtcaaatgccttgaatggaagagtaggaatttcatgtaagtagcttacatctgccctgtatgttggagaatgtgattagatatacttgcttttctgcccaaggcactatttttgtatttatattgctttttgcaggtttacttctgttaacaggggtctgtgagaaataaggcttaaaatatcaatacttctcatttttccacagccttccaaggcttccatctttgtgccagtgtgtggctctgggtgccatctaaccgcaaaagcagcagttgggtttggatgagctgtgtgacatttggcctacacgtaggtctactcaccaccctggtcagggaacctggaacaatcctaaaactcacctactctaatgcaggccatattttttaattaaaattgaaattgtcactgagtattggaataagaagggactttggggtggagtgggtgagcagggcattgtcttacagaggaggtgtggggaccggtaagttttaactttcatcctttcaatctctcagtttcagcaaagatcttataaagaattttgttgctttcttaaattcatgaaagaaatgtaagcaattgaggtgtgtaattttcttgcccgtattctctatattaaaaaaaaataagaatatggttctatgaatttcttgtgctatttttgctttccttgaattattaaaatatgttgcatagaactaatattgttttcttttttatttttatacaggaaggagagaaatattgttcatgtaatgtgttacctttttttgtctgtgtgatctacaagagcatggctgaaatgttaccatttttaactagtgttttgactgaagattattatgaaaagttttacttttgttagattcctaattaaaaatgcctatactcttttataggagtttcaacttttgcaatttggtaataacagatttaggtaagtaaaaaatgagaatctcatacagttctgaagatctaagtttggttgagaatttaatgtttcatcaccagtaaattcaattaaagacttttgattcaattaaagactcagttctgcctacacctgcaagaactgagttgatctgtacatcaacatttctgatgtttctttggtagttgctgctggagtcagaagttaggaacaaatctaatggcctttgtaatgtcctctgtcatttcacggaggaatgacttagaggaacaaagctttcctgtgatttctttcttcaacagatggctaatggcacagcattgcagttagaatcttgtttaagatactaggagcacgtcctggactaaaaatttctacataagctttagcaacaaccttatagcttcctttgacttttttgtagagcttacagaatgtatggctgcctaagtaatagtctctgaattaatgggtaaaaaatatattatgagttttttatcctcacgtatggtgctaggctatactggatttgggctaacaaaagcttgttaacttttttttgtctcattgacagaagtattttatatctcatattttacattacataggtgtgtgtgtgtgtatgaaataaaagtttgaaaataaagtgatatactctttttt

SEQ ID NO: 1291 - DNA, 1235 bp, Homo sapiens
ccctagtccttccccgcccctcagggtgccccgcctccagctgccacccactgggatgccgcgcgccctctcacggcccccggtttgctgggagtcttgtcaatcaccgctccccctccccgtgctgctccctcggcacctccgtacttcgtttaccccgcccacccggccccgcctctgggtttctaatttcccattgggcatcagtggctactttcaataggcaaggtcagctgtccatcaaacaccgcccactaagtgagacccaaccctttattaccatttactttattcggccccgcctccgctaggtcctacctcccgaacgtcagggaccagcccccgctaccagccataagtagagccctccgtcaatcaaataacgcccacctgcgctcctcctagcaaagccccggccccagcgattgtcttttcttattggtccaactcgtgatccgaacccccagtcactggctttcttgcgggtcagtcactgagccaatttccaagtccgtcacaccggcttttttcaaatgaacgcgcaaaaggcggggaagtatctggaaagcgattggttcgtcctagaaaacggtcaaacccggagagtctgtacggatcctttccgttctgtgaggaccgtgcccccttgtatttgacctctaagcctcgcgtaaaagaagcgccataagggaccaacgagcagtccagctataggtgtggacgcctggtcccacccggaattgcaggggcttggctactgattggctaagaaagtcctcctaggccctcattggaggatctaaacgcctctcttcggcgtggagacgggaagggacgactcagacgaggacaagaagtgggcaggggagaggcggttgttttgcttcagccgcgggtggggcgcaggcgagagtgggaaactgggaaggccgggctctggggaggtgttgcggggaggggaaaggcccggatgttccctaacaatgaaatcatcgccgacctatcagagccgccgagctgggatacctgcctgacctgtaccccggagggagaagagtgggcgggaaattggggtgtcggaagaacctggaaagcaacgtgagaaagtgggacaggtgttcccttcaggaggattttgtgctattagagattatttttataccagcccttgacatttccgtattttgtttctcagtcggcattgatattaaaactcccagcctagtctcttgaca

SEQ ID NO: 1292 - DNA, 73 bp, Homo sapiens
aaatgatgaaatcacccaaaatagctggaattaccggcagattgtgtagtggtgaacctatggttttctgaag

SEQ ID NO: 1293 - DNA, 898 bp, Homo sapiens
aaagttcttggtgaaggttccgaagatgaaggtggagaaaacaaaaagagacagctgagagaggggtcagaaccaggcaaggggacgaatgagagtgaacctgagacactcaagctttaaggagaggaactgtctccatgaaggccccacatttgagaacactgggtaacagcctaagtggtctcctacggattccttcttttgagcagcttgttcctagcctggcattcaatgaacttgccaccaacagagaagcaggggatgagggccaaagaaaggaggagaagagctctcagaatttccaattagcacatttaagcagtgaaaatgtatcagacctgaccagaatacaatacattgtatgattaggaccacaattccaattagtggcagatacaaaagctcagctctcaatgtgaaaaccaaccagaaagaaaagaaaaaagaaactgtttgcagagaacgagcagagatcttgggaataccatcctccattgagagccagcccctcaaaagctcattcgtagggctgggtaaacacacaccttttgcactctatttttgaaattatgttcaggagtctacagactgttatctgtagaagaagccacttttgaaattttagtttatgtaaagtgttccaaaatgcatgaacagagtaattattttaaaagtctataaatgcatgcatttgctctaaaattttgtaattatcagtagattacaagttctctataggaagagagagctgtctcatattagttttgcacttataccttttttaatagttctgaacttcactcttgtgtattcttttattttaaaagctataatgactaatcctgatcttctgctggaatatgtttaaataggattccattaaaaacaagagctagaa

SEQ ID NO: 1294 - DNA, 492 bp, Homo sapiens
agtcgaagaggctaattccgggcctcttataaaaataagaaagaaaagcctcgtttcctctagatcagagagatggcttctggattcatctttccctgcaatccagcttctcctcctggggccctcataatggagactgggatcatcatccaggcttttgcactgggttaggaatttgggagtcatcctggatccatctgcccctgtcaacctttctctgtcaacagatatttactgggcatctccaacagccaggccctgttcatggtgctgaagaacagcatgtataaaacaaccctgccctcacagggcgatcaccagtgacctgtggtgtggagtctccttttacctctgtctcctccttcccactgtcaccatccttggtcctcctctgtcacctggaatactccacttggtaaccagcatgatcttctaacactagttttacccttgtcagcactttgccgaaaacctcaaataaagacttttttt

SEQ ID NO: 1295 - DNA, 618 bp, Homo sapiens
acagcttccagcatgtgttgtgaaacatttcttctaatttctaaaattgaaacaattactatgatctacaaaatttgaagaacaactatgaatcaataatttactgctataatcaacaaaggataaattaacttcatctgacacatgctgaataatctacataaatatgattgcaagtcatggcaagtattcgtaagtgatttgagaaagtccatgcatgggagcaggacaaagagaaataatctgatcatccctaagaggtttcaaggttttggtatcaggatgatgctggcctcatggagtaagttaaggagtctctccttttcaatcttttgaaatagtttcagtaagaatggtaccctctcttctttatatttctggtagaatttgactgtaaatgtatatttggctggtcctaagttttttgtggttggtaggctttttattactgatttgatttcagaactcattatttgttagttcagggattcaatttctcccttgttcagccttgggaaattgtttgtttctaggaatttattaatttcttctagattttgtcctttgtgtgcatagaggtgttcatagtagactctgagaggtgtatatatatatata

SEQ ID NO: 1296 - DNA, 1216 bp, Homo sapiens
agtcgccaggcaccggccacggcgcacgccaacatccaggataattctcctttccaagcccgggagttccggggcaggcgaaaaaggggggatgggagacccacagtccctttaaccctcccccctggcctgccaaccttttccgaacccccatgtcacacaacttcctcatcatggaaacttccactgggttcggcgctgaggatgccaaactccatttcacaaggaacatgtcaacagctgggcttggggtttgaggaacagagccgctgcgattggaacagagcccggccaccctgttccaccactgtccactccgtagctcccagcctgccgccgcgcggtgcccgaacacgagagggcacctcctcccagatccggggcgcagaagccccgcggaggcaggtagaagattctgaggccctgggcgggaactagtaagccacaatctggaagagtcttttaccaccatgtggaggagaactagagcactcatgttgaactattaccgagaaaagtaatcaacttcttttgtgttaagtcactgaaaggcaagtgttgatttgttgcagtaattggtgctcccttaacacacctgtcagccgggccaaactctatcacagcataaataatcttttccttaaataaatacaggtaaaagaataaagtagacctaaatgcattaatatgaatataggctcaaagcaaaatgttgggctataaatgttcagagtgataattttttaagttgatgtgtaatttagtacagtaaaatagataaaacctaaatgttcagttcaatgaatttttacatgttcatgcccctgtataatcacctcccagaacaacatagaaaatacttcatataaatggaatcatacagtgtgttttctcttgtgtctggtttctttcactcaatgtttttgaggtgaatccacattattgtgtggattagaaagttgttctcttaaaatttctgtttgacattacgttatatgaatatgccacaatttgtttattcattctccaattgatggacatttgggttgtttccaatttgggactatgacaaatgaagcagctatgaacattcttgaacaattatttttgtggtacacgcactcatatctcctgggcatatgcataggagtgaaattgatggtcatatatttatctgagttattctattaaagctcaaaatgatcaatattcaaaa

SEQ ID NO: 1297 - DNA, 3026 bp, Homo sapiens
agtagggggcggagcccgccgcgtgcccggaagcgctcgattccccccgctgccttgatgtggcgcgtgcggagggctaggagcgcgcggctcaggggtgtctcgttggtcgctgggtccttttccccacccagagcctccccggccgccgccgcgagctgcgcgaggcagaacgagagcgagtccgtgagggttggcttcgcagccgccatcttggctcgggcctcagactccgccccgcttctcgccgctgatcccagggagcggaactggaagacagggaaatcgtcgggcaccgcctcgctgacgctgtttagcgccaccgcagtgatgcaagtcggaagttgtagttctcgaccccggaagtctgtccttgcacacgaggcgcggcagtaccttaatcgcagcgcatcctgggacgtgcgggcggtgcatgagggagatgtggtccgcgtcgagcttctcacgcctacctcgggaagcgctggaaactcttccagggccctccaggtgggccagggcctccgaacagcccagaagtccgaccacggagccttcgtgccgtgccccgcccccggcgtgcactcggcggggaccgccttttctcctctaggctcgcttcgctgccccccagcggtggtgcggcccggccttgggacggactccgagaaccccgagccgggccgaaagtgcggggtcctgaccgcgccgcagacggggagccctcgctcggtcagaggaagaagagggttaaacctaccgagaacgttcgctgccgcttcctagagtgacgggcttgtggaattttccgtttccggagctggaccccggtgtcccgagtgtcctccgctctggacgtgctcgtgagctcaggagctggcatctaggaaacggggagttcttcactcgcagcgcagtcggccgcgccagaagaggcgagggagaatccggacggggcggggcggcgggggagcgggacattcgcgtcccggggagcccccaggtcacccctggattgcgaggtggctccgcctgagcagcccttcctggtgtggtcggggcagctgcccgcccggaaaatggtcaggctctagccctggggaggaagaagcctttgccaagagcaaccgtctacaagccccaaaacctgcgagtgccggaaatgtggactgaccacagcctgcctccccggcttcattcaccaccaaggcagcccctctggtgacaagccttaccgttgtccgggttatggcagaagcttccgatgtggctctgatctggttaagcaccactgggtacacaccggtgaaaagccgtactcctgccccgagtgtgaccatcgcttcggccctatgcctgtgcctagtgtggtaagactttcagcgtcagctccaacctgatccagcaccagcgcgctcacaccgctaaaagccttaccgctgaggggactgcggcaagagtctcagccttggctccaccctgttgcagcacctgcgctccacatgggtgagaaggcctctaagtgccttgtttgtagtaagagttttgtgcacagttggaatctgctgcggcaccagcacagtcacaaagtccggaaacctgatgcttggtggtgagtgtggccagaccttcggccacagctcccacctgcccatccactaggcggcccacagcagcacccctgcgtctgcctgcagtgtggcagggccctagcgcaaagctccaacctgggccagcaccagcggacgcactagggcggcagcctctgcaaatagccctggcttcaattttagctgaaacttcagctctgactttggttcggacttcaaggaaatggaaggaaccaggatctctaagcagacccccttctgctcccttagggctgttgattttagagctaatgatgggattcggttggggcgagggggtctccacatctttttgcccaaccctttgctaagtcaaggaaccccagtctgggctgggcatggtggctcatgcctgtaatcccagcactttgggaggccaaggttagcggatcactggaggccaggagttcgagaccagcctggccaacatattgaaaccctgtctctactaaaaaaaaaatgctaggcgtgttggctctcgcctgtaatcccagctactcgggaggctgaggcaggagactcacttgaaccccgggaggcggaggctgcagtgagcgaagatcgtgccactgcactccagcctgggcgacagagagtgtctcaaaaaaataacaaatttaaaaattgtttttaacaaaggagccccagtctggaagaatcagaacactagatctgtgatcactgccttcaaagagcccagtcagctgagagggcttaggtttgttctttgaagttacaaagacagaacgtcgaccagctgaagggagagttttggaatggcgggagctatccagcgtggacccagctgcctgcagatctggcagtagctgacacagtcccttcacaggcctagggagtgatggggttaatcacacctagaacaacagctacctcttcccagaggaatgggaccagaaatcaggcaagcccctgtgaggagttccatggcagcgcgcaggcggggcattcctaacctccagagggaaccatgagggatcctgtgttctggcagatgggccagagaatttgaacttgggaccattgtgtgagccctgggtgtgtgagcccttcaaaagtcctctcagcacgtgagaactatcattatggatgatgctagggtggtgggggccccagaacagacctgtatgttgagttcaggggttgctttgttgcatttctgggcaggggcaagaggcccagggtttgtcatctgccccttcccctgccttatccccttcccttccaagttccccaggctccttttctgccagtctgtcaagagagggaagagtggcgaagagtcctttgtgcctggacattggggactgaacatggcccttttgcctgggcattgcccaaacatatatttctactggc

SEQ ID NO: 1298 - DNA, 516 bp, Homo sapiens
gagatgactatgttgtcaaagacaaatcgtgggtcaagattgaaatgggggacagtctggaatttacgaggatgagatagaatggacagccctgtgacatcaacttggaagaggttggactccagatttggatactcagatcccggaacaggctgattggaaagagaagaatggacaaaagaagtcaaccacacacaggtacatagtcttaccagacttggaagattgggctggatgaatgtattgcacattgggaaactggcgtatcttgaaattggcgagggaagctttggagaaatggcttgagaaagacatgttgaagaggaaaaatacgttaaggcttgccaatcagctgactgcagcagcagcagcagcagcagcagcagcagtgatgcacagatctgatctgcgttggcaatatacttgtaattcggacatgcatctccaggacaccagccttagcaggaaggggagccaatcaaggggaaacaattatgcaaatttaaaatgtaaact

SEQ ID NO: 1299 - DNA, 670 bp, Homo sapiens
aaccactctggaatatgagaagtgctctgagccagggaagaagtacctgctcctcctacaaggcccagcagtatcagcgacagattatgcttttgcaaaactaggtttacaatatcacgaatagtttgcgggcggagaatatttccacagaacaggaaggatgatttcttcagacagacaaagctttgctggagcgtttctgccgtcaacagtcaagtggaggaaagacagtgacagtggataaactgcagaagctgctccaggatctgggagcacagcctcctgaccatgcagggagaggtgtcaggagaggccccgcaagacacccagaggagacccttcagttgtaaaggctgaggaggaacttccatctgggcttttctgaggatgagtgaactagctcatctagcaaccgggaattggtaagaactcacaacaaatgaacgggaggtgagctgggactcaattctgccttatagagtagcccctgtgcagaactcatggacccaggtgaaaacagcctccctgctcacatggcctcccctctccctaaccttgccccggccctgaaatctgggtggcataaatggtgcagtgtacaaacaaaaagggagccctgtggagggtagacggaggaactggaccctccccagcccccagccctgctcct

SEQ ID NO: 1300 - DNA, 538 bp, Homo sapiens
agacagtgtaaatgtgtgaaggcctgacacttacacatacattgcttttttctctatgtaaggtggcagttgctggagtaccagggcaccaagtggaggatgtggtagacagcctctaagatgcgccccctgccaatgatctctgcctccagggaggagctagaaggcagagagaaagccactcaggacttcccatcccagaagataaaggtgaggaaagcagcagcagcagccacaggccagtattccagagcagctttgggttcctgtcaagacctgctttgagaaggaggtggctgtggggctggagggctgggcctgttcctgagctggctgctggcagcacagcaatgaggcaacattgagaactgcgacacgaggcccagtcctgctactaaaccaactgtgtggacttgcatagtcacttcacccctcgggcctccatttctccactttggaaagcagtgttgggacgatgttaagggtttgcaaccttccaacatgaagacttatttttaaaagcaaaacatttcaaaga

SEQ ID NO: 1301 - DNA, 417 bp, Homo sapiens
ccatcctgctttccttttctttcttttcaacaaatattgatggagcacctcctcggtgccaggcgctgctgcagcctctaggaaatcaaccgtggaaacacacggaccctgccctcccggcgccagtgttctggtggtcaggaggtgaagaaaaccagcaagaaccagcacaggaatccgacggtggcagcgccgagagaaacaagcttggaggggaaggagagctacagaggctgcatggatgtgatggttggagtggaagctgacattgtgggccaggagaccctgggagtacaggccaagatgaaaagagcctcaatccagagcgttctgtgaagcagtcaccacggccaccctgggccatcagcttctggacttttacaacatagaaattaaatttccattgaatttgttgga

SEQ ID NO: 1302 - DNA, 1262 bp, Homo sapiens
actaaatctggatccctttgcttcttccctgctggctactcttcatatagatgctcttggagcctgtgcattccatgatgcatgtcagaactctcaccttgttcagcctggtgtgccttaacctcaggagtaaagggaatcatgtcggaaacacgtcgttaaagtagaatggtacaaacattggcttcttagtgccattagcacttttaccaggaaatgcaaaagatgcaaccacataatgttttcactttgttttatgctgttcttcaatcgctctttttgtttatttgtttgtttgctttcattaaccaaactcaggggaatgtcatgatgtcaccaaggccaatgggtagagaaataaaaaccagccatccataattgaatctgtaaagtcagtgaacttagccttttcaggttcaaaattacacaaacacaaggattttcttatctttcacctttcaaaggttttctttttattttgccacctgttttccaaataagaagtgggaagcctcttagataaattgtgataaaaatgtctctttgtttggcgtgagctatcaaattagctttgtgtgtccactgagccatcaaattaggctttggctgctggaggcctaggttctagctttggtcacctatcagaatcttactgttacgctgggcatggtggcatgtgcctacacggctcacacctgtaatcccagctctttgggaggctggggtgggaggatcactggagcccaggagttcaagacaagtctgggcaagatagcgagaccctcatctctttgaaaaatatatatatatacttttttttttaaaggagagaaaatgcttaggttgcaaatggagagtattgaacgtggtgatgtaaaaaacttctgcaaaacttgttctgtagctcctgggtcaggtctatgccattttttcttatatctgctcacacagtacagaaatgactaaaattttgggtctgggctgttatatcactttgtgttaagttatttgtagtagctaatgtgctaacttatatatgtgttctttctgttttttggattttaccttttgttttggcataacttatctatatttttgtttacattattttaaaaatatcagtaactgtaataatataaaattgaagttgtattgttgacaatacctctagtttttaaggtcatctgtcacataatttaagtgcaccagttcctaatgtataaagttctctctctctctctctcaataaacaatgcagaaaa

SEQ ID NO: 1303 - DNA, 664 bp, Homo sapiens
agaactgcttcttgctgccgccatatgaagaaggacgtgttcgcttccccttcctccatgattgtaagtttcctgagacctcgccagccatgctgaactgttataaacatcttgagagcaaggactaaatcttacttatctttattaagaactaacagtggaacacacagaaaatccatggatatactgtcagactgtcaccaaatatacattcaacatttttcttacttgtgagactgattttgagaaaatttgctatcacagaatcactaaactttagagcaggtaaagactcctgcaatgattttatttacttgctatattttaccaataagaaaaccgaggcatagagaagttgagactttctacacaccagtgcctagtcttcatgatgcttatgcccaaccctgagtcctttcctctatataatcctgcctcattacatttctgaaagacggagaagttttataacaacaagatgaaagactttggaagtttacagaggctatcaggctatcttctcatagacccatcatttgtccagcagaaagagactaaaaaggcttataagaatatcaagaccccaatgttgtacttatggtttgactttatatctctgactaattacagaatttgattattaaaaaaggttttttatatcaaa

SEQ ID NO: 1304 - DNA, 805 bp, Homo sapiens
cagggctccagagggctgaactatccacacatatgggctcgtggaggcagctcggggcagcggctcctgcagtgggagcatcgctgagcactgtccctgggagaggacgaccccaggctccacagccaagctgccctgaggctaagtgtcccggggcccagggagccccagcagcagccccgcacggtcaggcctgggccacggtgctgctcagtggtccctgcgcggtcagcacctgaatggctgctcgcctggcttggcgtgccttctcctcccgggccttcctcctggctgcctctttctgctggtgcaggtccaagagggtcccctcgcctgaccgctgccgctgctcctgccaaagaagccggtgccatgtggcgtttacatctggaagacggaatccagacccagaccagaggtttccccacaacgccctggagtcccctagagttcgtggaatctcagggccagcagggaaagtgaaaccccaccaggaccttgaacctgccatttctctgctctacagaggatgagccctacgtcgcaggtggccaacagttctggcgtgggggagacagctctgcccccacagaacgtcctcctgagactctccagcctgggatggacccagcaggcgtttcctgacacccaggccctgaggaccgccagtgaggaccaccctgactgtccgcggggacccagggtcaagaaggatgctgcacccagagacggggcccacgagcaatcctaggctttgattccacctgtcccagaaactcaaacccctgggattctgggccagacc

SEQ ID NO: 1305 - DNA, 443 bp, Homo sapiens
gttttgttttgttttttttaattttggacagctaatctctgtagtgaggaacccagaactttcggtaatgtaagggatattagtctggttgtcagaaaaatgggctggagtatttgtgctgtgtccctgaccataattcctgctcagttgcttagctccctggcaactatgtctgagggctaaacaggagttggtgtgatcttccagaaaaagaacaggcttcttgtcttgcagaggcaggaagtcagaaaacaagagtgtgtgtgtgtgtgtcagggggtggggggtgtcaggcctccttcccttcagtttgggacttaaaacttccaccaataacgtgagtatgtgcacccatgcagcagcctgtccgaggactcacaactggagacacctccctgcttggcgctgcccagaaaactatgtagatggccaagaaaccgact

SEQ ID NO: 1306 - DNA, 537 bp, Homo sapiens
agtataaaaaacagagcagagtgtttttggggttcctcagttgcagtgagatgtgaggcacttgcagagactcagtccaccaccctgggcagctttcaccaccctgggcagcttttccgagacgtagggactggcttgccgtaattcatagcttctgctgtcccttgctacatacctcctgtttggtcacaaactaggattgcagcatctgcttgtaggctcaaaataaagggatggagaaaaatcgaccaagcaaatggaaaacagaaaagagcaacttgcttcctgaaaattcacgctccagctccctgccacctccacatctcccagtcagcctcttgttggcacactgaatcactctggggccatatgtttcaggcttcgtattaagtgtcaaagatcccatgacaagacagctcccctgcttgctgggaggacgtggtgaggacagggtacatctgaaacctctggtgtgtctggcagagttgcaaacgactagattccatccaagatcaaatgaatcagaatctgtggtga

SEQ ID NO: 1307 - DNA, 656 bp, Homo sapiens
gtaggtaacaggtaccagctactgtcagcagggaggaaggtatgtggtgaccacgagtccagacctgagggtcctgaccctctaatgcggcctctcaccagtgttcgcagaaacccacccgctgattcaatacggggaccaggaacctgccatgacagtcacgactcagtctgcctgcacctacatgattaaaaagctttattgctcacacaaagcctgtttggtggtctcttcatatggatgcgcataacatttggtgccgaagaccccggacagggtgactccttcgggagattggtcccctctcctcaccctcactccatgagaagatccacctacgacctcaggtcctcagaccagcccaaggaacatctcaccaatttcaaaccgggcttccctcttgtctggaggaaaaagaaaaaagagaaccagacttagacacaacttcttgtgggcacatattcagaaggcatctcactggagagggtttagttctccttagcagaagataagatttcaagatttcagctaagactcatctctctgcaaatctttcttttgagagcatcttcaccaggaggagattccatctcaagagaccactttcactgctcatatgtaagaagcaactcttcatctgttcaagtttgatcatg

SEQ ID NO: 1308 - DNA, 289 bp, Homo sapiens
attcaattctcataattctcctgacaacattctctccaagcctcagttctctccttcaaaatcattatgattattcccatttttcagataaggagcctgagtcccagagagcagaaatgacttcataacttcacatggccactaggaggcagagcccagacttgaacctaagctcagttccaagtgccacctaacacttgaactctgatcctggggaaccaagacacaatagggaggccataaaaactgtggaatgaatcagtgaacaaataaatcctatttctaaaga

SEQ ID NO: 1309 - DNA, 600 bp, Homo sapiens
gattatgggttttctaattacataagtcagaagtagaaaaagggacacaaactaagaagggtgctgagcgctcgtcacctggagggacttgtgcctctctcagtggtagtagaggggctacttcttcctgccacggtcatgattgagaggcaacgggtggcgagtctacaggggacgtcgtcgagcagacatgggataactttaagggagaagacagacaaggggaggggctcctgtgatgggatcagtcagatgcctgcctggccgctccccctgaggggacttgggctcctcttaacattggcaggctggtataaacttccggctcagatcaagctatgcctgatgctgccttaagccttatgaggtcgccacggaaccgcagaaactcctggagggcagagctgtgtctgccatcttcatcattgcattaccaccaccaagcacagtgcctggcacaaaagagttgctcaataaataaatcaggatgaatggataaatacatggataggcactttgagctacagatgagtttaaatactttgtgtttttcttagtcaaacatgtgcaattaagcatgtgataaatgatatgatgacc

SEQ ID NO: 1310 - DNA, 1313 bp, Homo sapiens
agtccaggtaatggagcagagactggagcagagacaagttgttcccactgagctctcctcagattacagattgggagtggcaaatcaaaggcattgcagcctctttcatcactgccgattgctgatgccaaccatgtgccaagtgcttaatacgtcaccttaaatcttctcatccaccctcagagtagctgcagcatcaacccagtgccctgactttcaagacgactatgaaaacaccccaactgctgctaaattaccagcaacaaggatctgacattcttattcaaaagaaagaacaccgaaattgaccttaccctgacaatatgatggctgaaggatttatgatcacttataacatttgaaattgaggcggaacctgaagaataagactctggtgaaaggtcctatttatgcttttgatgtctttcacttggacatttaccacatgcctattggtaggtttgttacataggtcagttaaggtgatacaagaataaataaaacactatccctatcctttaatatcatttatttatggggtcaatcacagattttcatttttcaaaatctttgataaatgtcagaattatgttttttaatatttttacagaattattacaatatatggtagaggatggaaggcaaggtagtatgaaacggaaaagatattttgaattaaggtatttggacctggattaatatttttgctttggtctttattagctgagtgaccttgagaaagttcttctactaaaaaagaacaaagataataattacttcatgaaattgctgtaaaaaacacataacaagtatatccagactcaacagtgtatgctcaaaaatgcagatcctttttcccttacctgcaaataaagtcttacagtaatacagtgggggtaaaggtttaaactggtggattcaagaagggctatagaaagaggtagcatcttaataggggaaggagaggatccaagaaatcagatccattttctacaaaaagaaatgggaagacagataattcaagaagaaaagtttacatgattaaagacccgaagttagaaatagtgatgtgtctcaatagtaagttaggaattggggtggacacaattgttggaagaaggatggtttcagcaaaggcccaagttaggtgacaatttcaagtgtttgtgaagatatatgaacaaaattataaagtagttagggtataagaaatagggaggagggaatgaattaacatttatggagtgtcttgcatgttccaagcactgtactacttgccttataaacctttcttcaataaacgcctacaacaa

SEQ ID NO: 1311 - DNA, 515 bp, Homo sapiens
cggggtcggggcgtccctgggtccagcagggagtggcctcccggaagacgccggcgagggaggcccaagtgcctgctccgagaaatctcagcgaggcctccttgggagaaaagtgcaaggcggtgacgtccagtctgtaaaatgtgaaaaacgcccaggccgaaaccacccagaacccgttcctgcagggaggagggtgggtgggaccaacaggggatcagtcactgcgccaaggcagggactagggccatggtggacaacgggggtctacctcagtgttccccagacacagacgggttcctactgtctggccccacttatgtgaagttctagaacaagccccacattttctggtgacagcaaacaggtggcattatttatagatgtaggggcaggtatttatgggagggggcacagagaagagcatgagctgggggtggaggggggcatccactgattctgagatcctatatttctttgagaaaacaactgaataaaacatagcaaaataataa

SEQ ID NO: 1312 - DNA, 742 bp, Homo sapiens
aagccaagtgggaagatccttgctggtttctccctctgaggaagaaggaaaatgccatgactcccactatggcctctcttggaaccatattttgaggttcatctcaaagatctctctttgcataatgtgtgtgtggacctgcctacagatacattgggtggaagccctaggagcctcaagcaagtctgaagattggccctgagaaccactgttctcattatcagcaaggattttatccagagacctctaggaatacattcactaaaatgtgactgtggtcctgtggttgtatgaactctggctcttctcgtgaattacatttcactggagtcaggtgttttctgtaaacatcgttaaaccacgagaccaactgcattgaacattttttgcactacattgttttatttcttgctcgtcttttccttgcagagctggggctggggtgaggtgtgtggtgtacctagcactcaaaatgtaaggattctcagagtcatacaggtgcacggtcagcacctgagagtgagccaccctttaacattttgccttctaggtgcttcacttgccttgcccaagcactagccctagattaaataatatgtttctattagttttttaaaattataatattaacaataactagcacttattgagcactcccttatgtgccagcaaatgtgacttacatgtatctgcttatttttccttacatgaaaccctctgaagtagatacaatgggtatcat

SEQ ID NO: 1313 - DNA, 547 bp, Homo sapiens
ctccccagagcgtgcaaggtagaactctgcagtacaaacctttacagctgctgggcataggagaccttctagtagaggacaggaggcttgggttctagttacagttctgccacagtgtcaccttaggtgacacaggcccaggcttcgctgctgggcctgttacttcatctgcacaatggaaactcaattctatttaaattactttctaaagggcctcagtctgcagagacacagaagcaaatgattgtatgaagctcctgactgtatgaagttctcagtcaaacaaaatagtacctcttctgcccatctcagaggtggataaggataaagtgaaataatggaaagcacaaggaacagtaaaaggcaaatgtcaagaagctgtttgcaaagttaccaagatgtaaaattagattttacttattaataatcatgtcacttgtcattctgtttataatggtcaattcactgctgatattcaagtggaccgtttaaactgtatttttgctcagctatccctccaaataaatatctcaaaatcttgactgtt

SEQ ID NO: 1314 - DNA, 727 bp, Homo sapiens
cagaaagaaggaacagaaggagctcttgcttgagtaaggcactggtcatgcctcaattagaacccatcaactcatcctttggaccacccaaacctgtcagaagagtgtctccgtctccatttttgactttccagagaggtctgaagccacctccacacagtgaggtggcagacttgtggacaggtcctgaagccataccaggagctgaccagccccagaaaatgaggacatggctgcagggatagaaagccaaactgtgggtcaaggggacttcagcctgtccatctgggggcacgcttaaaggtctatgatggggccaaaaagaaaggtgcaggctaaggacagaaggacagctcagcctgaacagccccatcctgcagcccaccccagccctgagcctctggaactctatcactgcatcctggggcacctgccccccaagcccccaccccaggaagagtatctatgctgtcagaggctgcagacggtgccagcagaaggtggagaggaagcttggggcctttggtgggtgggacgcatcaacacacacagccgcagcagctgcacatagatcaacaggccatccgtgcctcgaacacctacatcaacggccaaggccttggccaccctgcccagctccgtgcaccgctagttgccttggtggatcacagccgctccacgctccacaggaagaatcccaaacccggtgaccggctgccccagcatt

SEQ ID NO: 1315 - DNA, 348 bp, Homo sapiens
ctaaatgtgttctgaagataacatagatgaaacttccatcaacactgccaatcgaaaaaaaaaaagcacatgccaacataatacaatttttcctcagaaggattttggtaatttgagaaacctgaattccaagttcctttctccttttcaagttacaaaatgcttcccaaccaacatgcacagcactgcaaacatatattaaagcatcacaaaacaaaaactgtaattaaaattgaaactctgtgactcatgttcattatgtcaaatatacagatggctggtgttgaacatagctcaaatcgttttctaaccataatcatgtataataaaagattaatatggagtgaa

SEQ ID NO: 1316 - DNA, 505 bp, Homo sapiens
cacaaccagattgcaatcaacactgttgcacaatgaacttctctgcacacatgtgagtctctgagggtactggaagatcataaggttatgttgctattcaactctggaaaacagtttaaaacacctagaaaagtggaggttcttgaaattcccacagtcctggaagaaccagaatcctaggagcatggaagacttaattcattcaacagtaaccacctctttttagcctaagactttggcagccgaacaacagaacaggaattatgtcagcttttctgcttagcatgagctctgccccagaaccaatgacataaaatacgtatgtttgctttccctgccacaaagttgcgacacattatcaaagctttacaaagtcactctatcttaggacacccctagacaacttgtttccatcttacttctgggacaaaaatatttactgtatcctgctttcattgtctttgtgaatattacattaaatgttgacatgtgcttggcaattcaa

SEQ ID NO: 1317 - DNA, 733 bp, Homo sapiens
ggtaaaatatgggtgaaacaataggagtttagaaaatgcttaataataagggtaattcttattatacatcttgtaatgttactctcccaaagtaaaatctggtaatagaaagtaggatttaatactttgagcatttaatactttgagaaggcttatggtatgctcattaaaaatgaatcaatgaaatatttatttaaacacttttatttaaaacatgttatacccttgaatggcgtgccccctgttgacattttcaaacagacattccaaatcatttccaagtacagtcatccctctgtatcagcccggagattggttctagtatccccttggataccaaaattcacacatactatttttcctctgcttttaagaattgaagtttgattgtaaaactgttttaatttgaataaaatgatactgaggtagacaagttctctggtaggaatcttcttttattctctttctccattcaaagccacttctagtgaggttttctctgatctcaggttatattaccttgatagcatatgataaagggtccttaacgtagtctgtgagataactatttttgaagtaggcatatttattccttagttttgttttgcatataaaaaaattagaatcacgtgatataattttataagtttgttttcccctgtaacatatatattatgtattttaaatgttattaacattttaaaataaaatacataataaggtaaacttttta

SEQ ID NO: 1318 - DNA, 2917 bp, Homo sapiens
tactgatctatttctgtgccaataccacctactgtaactttaaaataggtttttgtttataccaagtaagaataagttaccattatttttccattaatttttttttttttttttgagacaaggtctcactctgtcactctgttgcccaggctggagtgcagtggcatgatctcagctcactgtaacctctgcctccctgcttcaagctattctcccacctcatcctcccgagtaactgggactacagatgcgtgccaccacacctgactaatctttatatttttagtagagaggggggtttcaccgtgttggccaggctagtctcgagctcgtgacctcacgtgatcctcccgtctccgcctcccaaagtgctggaattactggcatgagccaccgaggctggcctgagtattctagtttataacttacaaggtcattcatatgtatatgttgttgtgcttgtctagctattttatattttgttattctgaactcttggcctctatctcagctccagcccctgaaagtgcaggagtgcttttgctctgccagtcggccttttttgggaaatcatatcaagatggcttttccagcacaattacttcctagagtgtctgcttgatgcatggaaactcatagatttttggcatgccaaacagagggttttcctgccgtcactgctggctccagccacagacttcagttttcttacctgttagagcctttgtcctctgactggtggaaatggagcttgcttctttttgttttgcctgccactagtctggcagcctccacctcttgacccttgggtttcttatccttggaatcagatacgaggccctgtgtcttctgttgctgtagaggacacaagtcatattctctgagtggagatctctctgaagctcctctttccaggcttgtactgagggacctctggaccctctaccacgtggtgtcaaagctgccaagagctgtcatatgctgggtctgtaaattgactttctcacctctgaccagatgcattcacttgagcggcacagagatttgggggagtgaaagggcactgtttctttgggtccgtgggcttgtgtcccatcccctagccttggggttagcaggattcagaatttatgagtgtggtctgcaaaagtctacctctaccagatgggggagaacctagtgtgtggacctgaagggttagctctgtgctttagtccctgggagtggccatcttgagtcttggtgggcttggcaagtaaggagacattgaccagattcaaagcttccagaggtggtgagaactccagggccgagtaatggagagtacaaaggtccttcttggcccccatgacccttccaagccaagaacttggcagtagctgtgagaagcagagatagggagaggaggtgaggggcacctatagctcttagccatgagttatgactccctccatccaagggagacccaaggacatgaaaggggactcagttccaaggatcagagggaacttgggttgttttgggataatgactgtggcttgggatgtcacggagatgaacaccagaattggtgtgcaacagatgagctccagtacccctgatagtttgcatgggttttgctctgctgatgatggtcagggacagcagtgaggccctctacaatgccgccttctgcctaaacacaggcagtgcccacaaaaggggagctgtcattatggagcctaggaatggatagtcagagagcagcggctgggcagtgcaactcctgcattggacaaggtcctggctagagaatgtcaatgtccacactgcatgtagccctatcgaggagatgatgtagggggctgtcagccttggagactctagcctaagtaccccaccaccactctggctggcttccaagggcacaaatcagctttctgaatctgacttggcttcctgtgatctgcattcatgaacattcttactagagttctcatggaaaatgaatacacaactatttggtctgaatgtgtctgagtttggtgtctccaaaacaattctctggattagatggagaatgaagaaacttcacaaaggcaaaaggacaggtccccatctcgacccccagagaccacttctcagagtctctatctgttcgtctctggtgttagccacgttcctttactttccctcatttctgtggccactcctgtggcttcctctctttcaacctgcaggctgctgctgccctgcctcagacccttgtaggcttctgtagagatgctactcagatgggggtggagctagatgcagagctgaaacccacctaggagatctagcttggagagcttgtgaatcttaggagagctaggcatagaatgactaaagtttgtcaccgcatgagataaaataaatgaaaagccacttctggagggaatgaggcagtctgcctttattggagagatacatattgttgaacagctctgggcagttgattgtgtgcctgggagagctaaccatgtttactctacacttgacctgtgatggtctgtattgattgtatcacacgcttagctttctaaggctaaccaggtcatcgtcctcagtccctgcctgcaactaggttgccaactggcccttgatttcccacccaacttgttcagtttgccctcaatcctggggcctcactaatttcccaaaaagatatggttggtaccacctgtagtttgctgttgcatgttaacctgacttttgggaaactcaaataaacacttttcaaacgcattgaccatttttactctatgacttctgctttgcatgatcgctagcttggtcacccatcatgctgctttctggtgagctgaaaggaaaataaatggtctaaattgagcaacaagaaagtaaacttttaagcaggtactttccaagtgaaatg

SEQ ID NO: 1319 - DNA, 1541 bp, Homo sapiens
atcaacattcttcccccacgtcttgacgctgggttccggcctagggttctggctttcctcctgggctagtgaacgcggcgaagtcctcctctttctaatctccagagccgcagttccatcctctgggtcagcggcttaccctgactgggctgcggtatctgccttccttcccccaacaaggcgacaggtagtcggggctggggccggaactgactgagtgggccgcaactgactgagtgggccgcggctcccgcctgaggaggctaggaaggactgaacagcagccgacttcccaggctctaaaaatcgtgcctctgagttagagctacctcaaaagcaagaccaagcatgagaaatggagtcttttggccagtattggggtgttcggaattcaagcgtatgagagagtggacggtagcgttgagaattttcatttgaagatctcgtcttaaccaccccaagtgtagtcagaggcggcgttttccctgcgagagtgccctggaacaaagcaaggatagcgtgggttagacatacctgaaatgaaagcgtcttactttatctaggtacatatttgcgtcagtaaggcgcaacgccatttctctcttggaattcagaagtgaaatatggtgactgggacgcctgtacattgctttgacttaaaaattgaagtccattattctgaccgaaagttaatctgatgattaattggttaaacatactatcgttgctaattagcataattattatttacaataaagtgagctaaatagctacaactaaaatatatttaaattactgtgatattgtgatgctaaagatgtgttgaaattaatatcttgaatttctcaaccctgcctaaatgcctctgagagtaattagtataattaaaagtcactagagaaagtgaatgactctaataacaggataacaaattcttttcaagtcagatggtttccagttctttgctttcaacaaaattaatggtggcccatgaattgtcagctgatgaaggaacactatttggtttttggcatgcaactcggaaagaaaccaaacgattgattgacatgcttacaacaaaactactagcattctcacctatttatgtaaaaccatttctcagcacttgtatctgtgaaaacaacagaattgaaaatgaaccctgttaatctaccagtaggaactattcatccagataaatgaattaattggtgggtcagccccatctatctcactaagagatgtgttcccaatagaatttcaccttttataactgtgtgttatcaatatttgcaatcgtgtcattttgatccattatatactaaagatgattgtgatgattactcacttcagaagaattccagcgtagagccataaagttacacgaaattttttaaggtttactacatatgtcatatttttattgcgaagaagtgatcaagaaaaggttgttcaaacatcaaagtactatatttgaataacattttttgttagagtacaatctaaatatgttagagataataaaagaacaatgttgaaga

SEQ ID NO: 1320 - DNA, 623 bp, Homo sapiens
gcctgccgacccgggtccgggggcccagttggcgcccggaccagctctccggtctgcgtcctgtagatgggaaaactgaggcctgagagggcgcgagggcggggacgaggccgaggactcgggttcgaatctcgaggacgccagtagcccgctctgaggccgcgtggggctggtggaggagccaccggtcgggcccccaagaccggctgacgtgggcctcgcctcgggcgactcccgccgggctagtggctggccgtgtggtgaccttgggcgagttacttcgcacagccacccaggggcctcttctccaacacgatagcactgcacccggagggccttcagacctgagctgaaatctacaccaccggctctctgactatcaggctttggactatactttgggctttcctgggtctcttacctggcagacagcagattttggaacttttcagcctccataatcatttcccagaagaaccacaaagcataaatttccccaaaaggggaattttgttgatggctttagtctattccctcctaaaagaccagctacaaccaaatgaagtgaacataacctcaagggtgtattgtcttcataataaaagatgaagcttagaactgga

SEQ ID NO: 1321 - DNA, 746 bp, Homo sapiens
tattttggaaaaccagtgaaatagtggattggctactggttctgtgctaatagtgtttataagtggaatgggactttttttaatatgaagtcacccaaggaatttgctttttctggaggctgaggcaggagaactgctcgaacccgggaggcggaggttacagtcagccaaagatcgcgccattgcacttcagcctgggtgacagagcaagactcacacacacacacacacacacacacacacacaaaaggagtgaaaaggattgaaagcaacaaaatagtatgtagtcatcttctcaaaggaaccaaagtaatgggctgattatcttcagcttcctgaagaagctgaatgtttgtatgtaggaagtcccatgtgttatcttggcaggaagtagaaaatatgagtaatttggggacgcagaatctttcgtcacttccctccatcgcgtctcatgtccaggatcttcccaggagtcgtaggaaatgtagcatccatgcagttagtcgtttacctcctaggaaacctttgtgctcttaggagacagtggcttcccattgtggttaagtgtaaccctgtttggctgacccctggatagagcttcataccctcagcactgcatagtcacctttgacttgtggttagaaagatcagccatatagtccatcatgatgatatgttatgatggtttatacaagaaactgggactttttatctcagccaaaacgctactcttgctttaggattag

SEQ ID NO: 1322 - DNA, 935 bp, Homo sapiens
gtaattatccagttgatatttatcttgttccagtcacctttagaaagctgtttggcaagggcagtgactggaagctgggagagagggtcaacagctgaatctcagcctgatggaggccaccatttaataagtaaatacatgcacggctatttagatcctgcatcagacaggtcatcagaaaacatgaagctaaatgcagtaaagaattactctcttgaactcttgaaaatatcaaaaacatgaagctaaatgcagtaaagaattagtctcttgaactcttgaaaatatcattttcttatagaaatggtttaaaaatttcttttttattatttctaattttccttcagaaaattgtgagttttaacctacaacacatacactccaaggtaatgccactctaatgctgtctagttgatctgaataactaactggtcaattatcagatccaccaaactgtctctctggagattaacttctgccagcatattggtttctgttcattttcacaagattgacaggctcattacagcaatattaacatcttcctttgagcactcacactgtgcaattgtaattttgcatatgttgatgagcaggcaattacatcaaagagtgaacactgggctgatgtgcaaggcactatttaattataaaaacagtataggattgagccctgtcactgagtcttccattccttctatctcgcctgtttctaatttatttctctatttcttcatttcttccttgactgtcttcattctttgctttttatttctttctccttaaatgacagaccttttcttagatgccatttctctatgtctgcgcttaagacaagaatttttttcctcctagttgttggttaatgtctgcaaatgtgagagcatgttaacatgacaaacaacaaggaatttgaaataaacttaaatgaaaca

SEQ ID NO: 1323 - DNA, 399 bp, Homo sapiens
cctgtctgtcaaccccacacacgctttcccagtttcattttagacgtctcctgaaagctgagcatttgttatcttaaagcctcttaccagtttggatagatatggatcttccaaaattaatgagctccttaatatcgacactgtttatcaacataaaggatcaatttaggaagattataaaaactgaagtttccggaacaataaatgggagaattaatcttctgaatcaaggacgtatccctgaatctggggagctctctatcaaaatatacatgctggaaccctaccaaaggaataataaatctggaatgaggctctgactgtctaattaggaaaagactccttcctggaattctgcacatctccctacaccttagtgacggttaaataaataattat

SEQ ID NO: 1324 - DNA, 463 bp, Homo sapiens
gtttagaaatattgtttccatattacaagtttaaggaaaagtttatctgccaaaataataacatggatttctagagcaccccataccataaggaggagccagaatattttccagctgaattccagtcttactcattttccttgaatgatactgaaatctaaattatccttgaacacaaacaatgacaaagaaatacaaatgttcatgcagtgtaattttcaacaatcaaattggccaatctgattctaattctaagctttgctgaggatgccaagcagaagccacgtgagcacactgctgaacacccaggatctttccatgtatggcagccttcatgtgagttctcttctcaccatacaatgttgtggatacagaagggaaggaattggatttggatgagtactgagcaccgatcacaggacagagcctcaaagttgctttttggaataaatttcttatagta

SEQ ID NO: 1325 - DNA, 380 bp, Homo sapiens
gatacctcacttgaggttgacaggagtggccagcagttagtgcctatggtcatgtaatacactaagtcaatacctgtggagtgaaatccggtctctataaaaaatacaaaaaaaatggcgtgagccaccgtgcccagcatggtatttatgattctaagtgccatttcaaaaatctgtttgctcttttttattctctggtccactaaagagtaatctttactgtgggctttatttcatatttttatttgtcctaatactaagtggtagcttctcatttctctgtttcttgattttggagagcaagtctatgcttatctatagaaataatcagtttgtaaacttatgttctccttgaagagtttttgaattttcatgtggca

SEQ ID NO: 1326 - DNA, 2549 bp, Homo sapiens
taaagaaggccaaggctcaggggttaagtgacttactggaggttatcagagaggaagttgccaaacccaggctaggaactgaatggttggtttaaatccacccctctggcaggagactggggaatacacatgagccgtgcagacagcagagggcagtcctgggggtgggggcgccagagggtttccggtacttttcagggcaattgaagttccggtcactactcccccccagagcaataagccacatccggcgacgtgtggcaccccaccctggctgctacagatggggctggatgcagaagagaactccagctggtccttagggacacggcggccttggcgctgaaggccactcgctcccaccttgtcctcacggtccagttttcccaggaatcccttagatgctaagatggggattcctggaaatactgttcttgaggtcatggtttcacagctggatttgcctccttcccaccccacagttgccccccaatggggcctcggctggctcacaggatgagggttcaagaagaaggctgtccctggaggtaagagggcttatgaaccatgttccaaacctttgcgttgcttttctttccatcgtgtctatttcataacatccctgtgaggctggatgtgggaacttcagcactgccgtactcttgggaaatttgtccaaggccacccggctgagcagcggttgaaccaggacaccatcaggcatgcgtttcttgtctccaccacaccctcaacccacttcccaacgcgccttgcgacaggggctgcggtattgcatccacatgactgataaactagtaaacacacatgaattcattttaaaagtgtattcaatcagttaggtaaactaaaaaccttaagtcttcgttcgatttggaatgcagccagagaacaaatggaaaatttttcaaggtagagaagatgaaaactcagaacgccctcttgtggcatctctacccaccctaggaacactatggctcttcccctacacatggtgattgctaaccttgctacaagacgttggacacacacacacacacacacacacacacacacacactgaggttccttttgccccctcacttttgagccagtgactactgaaaccctctccattgttgcaccaccagcaatgcccccatcacttcctctcatttacttccacaggctggttcatcctcaaagccctccttacgtagatctgtgggatcagtgaggctcagagaggtaaagtggccagcccaaggtcgcccagacagcaaaaggcagggccagcgctgatttcaagtccaatggcctatggcaatttcttagccaaaagcaaaatctacaaaaataaaaagtcaggcacagtggtgagtgcctacagtcccagctactgaggaggccgacgggggaggaccacttgagcttgggagttcctggctgcagagagctatgattgtgcctgtgaatagccaatgcactccagcctgagcaagatagggagaccctgtctctaaaaaatacctaaataattttaaaagtcagcctctctgactgcctatagagaatgctaactaactgaatgacagaagacctaatgtaatccaggtgcaaaatcagaactttccggccgggcgcggtggctcacacctgtaatcccaacactttgggaggcccaggcgggtggatcacgaggtcaggagttcaagaccggcctgcccaacatggcaaaaccccgtctctactaaaaatacaaaaaattagctgggcatggtggtggccacctataatctcagctactcaggaggctgaggcaggagaattgcttggacccgggaggcagaggttgcagtgagctgagatcgcgccactgcactccagcgtgggggacaaaagcgaaactctgtctcaaaaaaaaaaaaattagaactttccccgtactcttgctagggcttttcatggagatgtagaaatggtagtaagtgccaaggccccagaaccctcatgtttgggtccgactcccacattgccagagactaggcagctcacacaggtgtcccaagctgtctttctcacaggccgcattgaaggcatttatgaaatgagaccccctcttcctcatccgtagtgacagggctggcctgaccgtggagaaatcagatttgatcatgatagcttccactccgtgactggtcacgatctgccaggcgctgtgctaaacactttcataggccttgtccccctccatcctgataacaccccagtgaagcaggccctgctcttcactccactccacaaagccaaggctgagagaggttaacagacttacctaaggtcacacagctaagaagtcgtgaagctgggatcgaatcaagtctgtgtttatgggtttaactatcatgttgtggccccaaccccatttgacctagcctggctggtgggccttcttgcagtagcttcccctggagaagaggaaaagcaaaccttcattgagacccaagcggtctctcctgtgctctgtgacaataataaagttccagcccttg

SEQ ID NO: 1327 - DNA, 2571 bp, Homo sapiens
agttcccgaccacgcctttccctccacacctccctgcaagctgagggagccggctccggcctctgccagcccaggaacgggctcccacagtgcagcagcaggctgaagggctcttcaagcgtggccagagtgggcgccgaggccgaggaggcgccgagagcaagcgaggctgccagcacgctgtcacctctcgctgcctcagactctggagtagctgggattacagtcacgcgccaccacgcccggctaatttttgtacttttaatagagacgcggtttcgccatgttggccaggcttgtctcaatctcctgacctcgtgatctgcctacctcggcctcccaaagtgctgggattacaggcgtgagccaccgcgcctggccgatctgatggttttataaggggcttttcgccgcttcacttagcactcctctgtcctgccgccatgtaaaggacgtgtttgcttccacttctgctttgattgtaactttctgtaaaaaattacagcagtgcagaaggtctactggattatggcctccagttccatccatgttgctgcagaagctataattttattcttttgaatgttctttctggctgtaagtctctgatgttggcaagtgacagacccctatggccaatgaatcacaacttaaatgagtaccaagttcccagctgatatgtgaaaaggagctcagtgagaggaatcaatgattttatatcaatcatatggaaagaggtaaaagtgcatgcttcatgttatgttactttcttttgcttgagaatgctaaatttgtaaaactatataatatgacatacttgtgactgaattgtaagagattttatctaatattgctttagaatacagaagtaattgtttcaaaggataaaggatggaagattctgataaagcttgcttactttttgggggaaggcgtggggggaaatgtctcagtgcccaaggtcagtggccttcctgactgaagactttcccagagtagaggataagagtgggaacaggaagagcagtttaaagtcatcttcacaacattctggtgagtgactgattgcttcagcagcaaacaggcacatggtaaaaatattggtaatgtgaatttagtgttgttactgtcatttttttctttattaactatgattttgcttacagatagcagtcagagtagtagtatattgataataatgaacctcttagggttgctggtttggtgtttcaaagtttttcagttatccatattaaacttttaaagatatcttgtgtgaaaattcatttcaaattacatagaattaagatactatgttatttaggatagacaaattaagtgtgtttgtcatgattctataaattgatcttatttgctatcaaatattttaattcatgaatgtagtgtgataaaatttgttaaaaataataggcacacatattttcattgtatttaaattgcaatctggcctattcaaaattaacatagattgattttgaccaaagaggtctagaaagcaagaccttttgtaagagaagtggaaaacagagtcatttcttagtttcattccactaaccaagatgaagctgggtcacagattgctgtagacatttttaagtaactccgtggatccctctccttccacccacttttctctgctatattcacagataattctctacatatttatcgtttgggagggaaaatgactctccaagagttaacttcaattacacattggtgggcagtaactgtgctgagtgccagtcagaactgtatgtcaaaaatgccaccttctctcttattaatgctgacttagcaaaaacagagggaatttagggcaagtcagaattcttgtttcattgtcctattttcagtaagagaaggaatttaggacaacttagaattttttctcctgccctattttattgcacgtatgtttattcatattcagcaaaaagaatcccaattttagcctttgttgtcttcatgtccaaaaagtattttcccaattaatttaatttttttattttaaaattaatatatctggctaaagacattagaaaaattatatcaactgaacaaaatttttaaatgactcatagttccaccggcaaaggaataaactcggctttgagtaaactcttgaaatgttcctttgaaatatgcttaacctttaatgttcgtttgattgattgtgattctaatacatatataagtttgcttctttattattcatttttatatcacaaactcttttcattattataaattttatggtaataatatgttagataatttccaacctatggtaggaatgtccctagtttatttgacctttatgtggtaaacattcattgtcttttaaagtcttgtgtattacaatgatacgttatttctaatttttatctcccctccatttgtattaatttagcagaaaataaacttccagaaataaaatcaatttgtcaaattttaggaatatttataggctgaaatgtagagcatattgggatgcatatattggttggaatttagagagaagtaaaaataaaataaaaatgattctga

SEQ ID NO: 1328 - DNA, 837 bp, Homo sapiens
aaaccccattttggggttgtcagtgtcctcacttagtcattgatgtgacatgcttacctcatactcaatttgagttttgcagaactcccacacattgtgtgcccacagggattctgtgcttatggggcaacaagaatgctatgtgtgagtggaacaagtaaagaatggcagcagctatgcatgttatctgtatttcctctgttcatgcacatgctccattgtcccatcagccttcatttacaaaacaaaagttcaaagataaaattattaggaatttcattacggtgacaacagagcattaaatgaagtgccaggcctcaagcaccaagcccttcccagcatgggttgtatgcagctgtccagatcacatgcccatgaagctggccatggggaaaaaacttgatcctttattgtggtagaagcatagggcatgttggagatgcagtagacatgctggcatggctggttatagcaaggagtacataacatagctaacatgtattagacatgtattatgttttacgtactgtcctaaatatttcatacatcttttaaagtttgccagaggaccctgtgaaacagtattattatgtacttcattttccagatgttaaaaattaggaagatcaaataatctgctcaagctcaggcctgggtactgggtgacagagggtatactcttaaccagctcatcatgctacctgcatgcaacacaaggagttattggataggcacatgaggctggaaaaggtagaagattctgaggccctgggcgggaactagtaagccacaatctggaagagtcttttaccaccatgtggaggagaactagagcac

SEQ ID NO: 1329 - DNA, 1001 bp, Homo sapiens
cttctcctggccatggttgtgaggcctccccagctatgtggaactatgttgagaaggaacaacatgatctaagtctttagaaaccaagagccacgactagctgaggacacaagaattttcacaaaacaaagtagagtgattccatagatcactattatagctgcattaccagtcctaggacagaatatggatgctgaaaaatgattctttcaaagtgctgagttgttgcctcacgcccagttgtctggcatctcttcactgaaactattacagttagatctcatctctatgggtggaagatttttctctgttgcccaggctagagtgcagtggtgcgatctcagctcactgcgacctcctccaccagggttcaggggattctcatgcctcagcctccagagtagctgggattatgatcatgtgccaccacacctggcttatttttgtaattatagtagtgatggtgttttgccatgttggcccagctggtctcgaactcctgaactcaagtgatccaccctcctcggcctcccaaagtgctgggattataggcatgagccaccgtgcccagctgttttttactcactttttgtctcacagtcattaggcattcatttctgccattatgttgaaattgtcaatattaccaaagacctagttgccccaaacaatcaacacctctatgtttatattaattgataattctatatttttcactattaacctaccatagtatccactcctataaacttcccttttcattgtttttttgtaaatacagatcaactttgctatcctcttacatctgtgcctgcttctttgtctatctcctttgagatctttctttttactgagagcaaaatttgtcctagtttcccaatgtttctctccaaaccttttttttttttttttttgagacagagccttgctttgtcgcccaggctgtagtgcagtggcacaatcttggctcactgcgacgacctctgctccccagttttttt

SEQ ID NO: 1330 - DNA, 531 bp, Homo sapiens
acagcaaatatcttccactgagatcgtgtggttttaatcatacaaggagagtggcagaagaacagaaagattgaaaccaaggacagagaacacctgaaattgcttcagggtcatatgtcacagcgctgggcatttcatttgggtatctatcatcattcccattctgcaatgaggaaatgctgtcagagtgattaagtaatttgcccatggtctcacatagaagcctgtcttctccagggaacacagcactcagaatcgtctcggcccctgcataagcctgcatgagcctgggctctggggacccatcctggtgcatcattcgttggctctgtgacaatgggcacatcgtttaacctctcttggcttcattctccttactggaatgatggagagagttttgcctatttcagaggcttgctcttctatacgtgagcctataagtaacttgtcttaagaatttccactccttctgtactctgatttaaatttgaaggcatcaaaacaaaaacaatcaagatttcagattccaaa

SEQ ID NO: 1331 - DNA, 867 bp, Homo sapiens
aagccgccaccgccgccgctgctgcatggcactaggctcccggcggggcaggttccgcagccggcaccgctctggctaggcgcacggaggcgccttgcttagtctgacccttatttggccaggcgtaaaacttgtcctgcctaaaagcctactgagacctcctaactggtctaatccgcgggagacgccaaaggcggcggccgtttgtgcgcacaggatttttcttggagctgtagcagtctaggaagccagggtggaacttttgctaagctcccgttgtaagcccagagctgtaataactgctgagacacaaccagcagtatacaggctccagttggaaatcgagaactttccagggctgtcacccaggctggagtgcagtggtgccatcacagctcactgcagcctcgacctcctaggctaaagtgatcctcccaactcagcctcccgtagctgggactacaggaatgtgccacgcccaggtctatccagctgaagtcaaaaatgcccctctcaggctgcccccagtgactccagtttcctagcagagcctaaccaggttaagaaatttgtccatgggtgcctgaaccgaaagtcatatttctttttaccacaatgtgctgccttagaggaacaattgcatacaatgggatcaagtgcattgtaggctctatttataacatgcatatgagaaagagagcccattgagatctgcctcaagctgaagatgaaaagggggcctctggagtcgcttgatcgagcagagtctgatagagttatcaggcttttgcagatagaatgcctaccaccgtaggatacattgtcataatcagtgtttaggcaaaacacctggacttctgcaaggac

SEQ ID NO: 1332 - DNA, 328 bp, Homo sapiens
tcacccaggtgcaagcccagaggcagtctataccccaactcaactggctggtcctcaatgctgcctgcttccgtgcccaacttagaactacacatctgctgcctcttggtaacatgtcattataagtctgaagattgccatttgaaatgctctttgagggatgcgaagtcaaccctggatccaaagtagctttgatgtttgtcaggaaaatgctggaattctatacactacagtttctacagagcatgaagaactccaacttcagacaacctgcaaaaaaagtcagagagcaattaaatataaaaataaattcctttgataaaacaaa

SEQ ID NO: 1333 - DNA, 1432 bp, Homo sapiens
gcatgcgcggtctgcctcccgcggcgggccgggtctccagggaggacctgagttttcttcacccatggtcagggaagcgccatcgccctggctttgaggctggggcctccggggaggttccggtaggggctttgaagaggccgctgtttttgcaaggccgagacggcgggccctgcgcaggccgccctattccgcgccctcagggcgtcagtatccgcctgaggccggataccccctctgggcccggatgcccccgctggccccggagcatcctcggcgctgccctcccagagccccgcagaggctgaggtggcgcgggggcggccccggctccgcgagaagcggcggcagcgagggctggaggacccgggctacggggctccggggcgtctggcctggttgggactgagcccatccagggactgggactctgggattctggtgtaggtggatccggggcaggctcaggaccaagtccctctccttccaccaaggagcgcccagaggccggcgggagctccaggttcacctcctcctcctccaggaaatctcacttccaactggatgtctggatgaactactgaaagctgctgagtgtcctgcagcagcttgactaccacacaaatgaatccactcaaatgttggcaagtggagcagagtcccaggacaggtacagaaacacccccagttcaaggatcttcacacctggatttaggcctactcctgcaactaccccagaacctggaatttatatgttcaacatggagccatcccagccatgacaacagagaatgtaccactctcacggggtaatatcgagttccagaaggcaaggattaacattcagaaaaataggaaaaacaacctgcagagttactatgaattattatattgtggctacttacaccaagatgaagataatttattagttcaggaagaacctgcattctgaaggcaaatggaagttccagctacagatgggcagacacatgccccctcaattcctgatggacctccttgtgcctcatggacctaaggggcctccctcaatgtttcaagatgccaccaaggcagggatcagctagtgcattcctgagaacatccaggatgaattgaggctctggaaaaatgcaagagtttccacataatcccaaaaaaccctacaggtgaactggatgccacagaaagaggagtggtctttgtcacaacaaaatcaacaaaattatttcgaagtcaattaggaaactcagaaatcactcttgctgccattaagaggaagaacagcagcctgtgaatggcatccctggccttcccgagactccacagatatttctatgtggcttcagacaccagaaatctctgtgattttcagaaaggcagggacagctcatgcaagcccatccctctgcagaatgtgtcccagcagatcagt

SEQ ID NO: 1334 - DNA, 548 bp, Homo sapiens
tagccacagggttctttagaggccactttcttcaagtctctaattttgcatatgagaaacactaagactcagcagataaggatggaggcgactcaacatcacactgagacaggtcatctgggacccatggtttctaacttctagaccgaatctctttctttcgaatgtccagatcatctctccttcttctaaaaaccaaagaggcctctgcatgcctctccctggatatgagccctgcatttctgaatgccttgaaagaaaaaccagcaagttgggagggccgtgtctccttatcatcttccaggaattcaaaaccgtgatttccagtttccaaatgcaactcaagctccatcaccctgtacatcttgcacggtttctccagcatatcctgatcgccacctccagacccttctgatagattcattacctgaatctatttgatcctgaactcctgctctcccttggctcaacctcatcacagccagaaaggatgagagctctttaatgaagtgcatacatgtcagtttcccaggacacaaaccaaagta

SEQ ID NO: 1335 - DNA, 697 bp, Homo sapiens
aaccactctggaatatgagaagtgctctgagccagggaagaagtacctgctcctcctacaaggcccagcagtatcagcgacagattatgcttttgcaaaactaggtttacaatatcacgaatagtttgcgggcggagaatatttccacagaacaggaaggatgatttcttcagacagacaaagctttgctggagcgtttctgccgtcaacagtcaagtggaggaaagacagtgacagtggataaactgcagaagctgctccaggatctgggagcacagcctcctgaccatgcagggagaggtgtcaggagaggccccgcaagacacccagaggagacccttcagttgtaaaggctgaggaggaacttccatctgggcttttctgaggatgagtgaactagctcatctagcaaccgggaattggtgtgcaacactggccaagtcctaaacctctctaagcctcagtttcatctcctatgagtggtactgggattctgatgaggttttaatgagtgaagaataagtacaatgcctggcacatggttctgcctttgtcacccacgctggagtacagtggctcgatcatgggccactgcaacctctgcctccagggctcaagctattctcccacctcagcctcctgagtagctgagactacaggcatgtgccaccacgcccagctaatttttgcatttttt

SEQ ID NO: 1336 - DNA, 439 bp, Homo sapiens
ttccccctcgacggacgtgcgctcgcctctgctgcctccacccgcggctgccttatgtaacctgcgaggaaagccccgcgcccgcgttcgttggggcaagcgggatgggctccctcccgcccttaagtctgtcctgtcggggctgacccgcaagaaagcactctttcacagccgctgagggaatcctctccacagcccaggaaggctggaatcagtgatttccttatatgatggacaaggagactgaggctcagagaggtggagcgtatgtcccaaagtcccaagctgcactgagctcctagatgctgtgacccaccctgcacgcctgacacatggaccgacttgaatgcccaggagtggacctgcctgggggccataagggatacatacaactaaatgcagcagagataatcctaataaaagtttttaatgtactgga

SEQ ID NO: 1337 - DNA, 519 bp, Homo sapiens
aggttgggggctggggacatgccaggccaggacctgcaacagaaaccgccgccccacctttcctttctgtgccccaccccatcctgcctaaaaagttgctttccatgagggcttggtgctgagtgtggcccccacagggatgtctgtgtggtcacagagtacctgtgggagggcaattctgaccccaaggtaggaagcagtgatccggtaattccaggcaccaaggcagataaaaagaccaagccacagcctcctcaagaagtttgaagtctgcattgaactcattaatttccagcttttggccgggcgtggtggctcatgactataattccagcactttaggaggccaagatggggcccatgagtgaggaggacaagagagaaaggagaagtttgggtgtaaatcccagagattgttcatcatgtgagaggagccgtgcatgcatttcatgccatactcacaccatggatggagaaaaaaaatcaagcttcactttctgagaatggccctgggggcac

SEQ ID NO: 1338 - DNA, 3047 bp, Homo sapiens
actcctcggcgcaccgccccgcgaccgagctccgccctcatctgcgcggcccctcaccttcccgccgggcctcctcgaggaactggccgccgtcagtcagggcgcagatggccgcagaagcgcgccgcagacactcgccgcgccagccacttacccccagaggagaggggtctctcccgccacctcagcctctctggtagtggaagaagccgccggtccagatccctcctgcctgtgggaccgctgtttccctggcaaccagatgcgcgatgcttccggtctcgcgatagcggaaagggctgtaccatccggaaatgggaccggggccggcggctgttggagccctgcgagctgggacggccggcgtgtgtccttccgtcttcgctgccgacggtgggggttgggagcgatttttcgtctttaggttggattcggaacgcggacgtctggatgcttgtgtatctctgtccctcatattgctgtgatgccttacaggtcagttatcctctccgagcacagtttcctcctccgtaaaatgggaacaataataattcccttcttacaagacttgtgcagctcaaaaagaccatgtatgtgaagctctagtaaatttggggtgctatggaaattttaaaaatatgagttttgcacagattcggctacagtccaaaaagagttataattgctttttgcaccttctttcatttcgtagtttctctaattctcagtgcacgaaaattatttccctacgtccacaaactgattttcctcacctccattgccatcatttctcctgctttccagtctgaacagcacattaccgtttacagggcattttcacattcatggcccctttgtcctcattgttttaactaggtacgatgtggttttttttcagcgaagcaaatagtcgtaggctgagttgccgaaagaacacagctgcagtctaggcgagtgctgggtataaaaacctggctataaatgccatccctatgctcctgaatcctgcatcttatcaccagcccagacttccctgaactccagactcctttacctaactgcctatttggcatatccacttagatgtgtaagcatctcaaacttaacacgggaaaaaacaacttctccagagtcccccacccactttctatccatctcagcaaatggtaatttcagcctgccatgcctagaccaaaaaccttggagtcatcctcaattcttcttcctctctcactctacaatctatttgtcctatcagctcaacattcaaaatatattcagaatccaaacattcgtcacaacttcagtgcttccattcaggttcatactgacatcatctctaaatgataaggctttctgttggctctctgacctccactcctacctactgctttcccctggtaaacctggttccagcctcactgtcctcattgttagtgtttctgtgcagggatttcttcccagcatttctcagggaatttatgtggctttccaaatctcaaaagaaaaaaagttgcaaactgaagaaaatgggagaaagtatcctaatcctcctatgagaattaaaacttagcagccgacctagagatgttactgaagaaattcaccaatgtcaagttgaaaaccagcacaggaaatgctgagttcgaggttgaggtgaacattttcaggaaccaggtcaggagcacttgggagagacatggccacaatctcatcagtcagtcttgtttgtagttggtgccatgaaagcctatgttcctggccctgtgtgccgctggcagtgagtcattcttgcaaataaaatataaataggttgatactcattgtatactttatacaaattctatgagcagtgttcaaaaaagtaacgggttttggattcaaagtaaatccttaaattgacagtttccaacccatgattctgggtagtacagttaaccctgctaggagatctattatttgaatactcctcaataatgttctctgtgttttccagcatttgaatatttgctataaaccccacttcttgtaaacacttctaaatttaatagttctcattttttaaacaaaggcttcagatacttgtaataatgagtaaagaatatgaagaaggtagagaatattttaagaataagattttgagaacagctggtaattctgatttcctgtttctgcatcccaaagatcagtatctgtcaggaatttggaaacacttgttgttcctccagtccaaatacacacacacacacaccagcctgaaatacagtttcccagctatccacctggtttgctcctctctttcctcaggcgtccgcttcctcaggagggcctttcccaaccaccctgtataaaataattatccccatctccacactccctaccctctgtcccctcaaccctgctttatttttttatgaagaagagagatgacattatttggattttgatattaaacagctaggttatcttaggtaaatacataagcttttgtgggccacagtttcttcatttgaaaaatgaagttggactagttttgcagtgcttaactgcacagagcattagaatcacctggggagacttcataaactacacaaccaggggtgtacctgagatcaaatgaatctaggccttctcaactttaatgtgcagacaaatcaccgaggaatcttgttaaaaatgctgattcaaaaaaaaaaatgttgattcagtatcaggtgagacctgagactaacaggctcctagatgatgccaatgctccccgtccaccgaccgctgtttacctagcggcaagacgagatcattgccaagtgcctgcacggttctcatacaccataaacgaaggccattctttccagtttttaatttggtgactaatagtgtccactaagaaaacaataccttcccaatttctcggggggggaaggggctgaactaagaaaaagcggacctatgattactgctgttttcatttttttaactgttgtttttaaaatgcaacataagatgcatataaagcaagtgaaaataaaattcgggttccacgtaaa

SEQ ID NO: 1339 - DNA, 345 bp, Homo sapiens
tgaggatgaggaacatggtgttgcagttcaaaccagttccagccaaaatggactctagtcacaaacaaatagtaataacaatccaaacttgtggctgaatagagttctgaagttttgagaaagagaaattttagagacacagacaaagggaaataaggccatgtggtggaggcagagattggagttatgcagccacaagccaaagaaggccaagaattgccaacaactaccggaagctagaagtgacaaggaagcattcttccctagagcccttggagagatcgtggccctgcaacatcttaaagttaggacttccagcttccagaaatgtgagagaataaattt

SEQ ID NO: 1340 - DNA, 388 bp, Homo sapiens
atttcccgcaggaacaatggcgctgtcttcagtggcacagtggagcagctctgaagatgcaaagatacacgaaaaaacttccagaacatctgggagaatatttaatggaaaatcgcttggttaaaacctgacacttttaacagtgaacagcgttctgagtgtggacgagtagccagtgaagataatgaatgtcgaatgtgactgactagcagcttcattttgaatgagggtcgctgtctgcccattgatagaggccagattgtcttggaagttccaaagttgcaacgatttctgtaagtggagtttttctgtttgcttagagatcagtgaatattgtgtccttggtcttatctgtgatgatcttatcccgaacctgaacttctgttga

SEQ ID NO: 1341 - DNA, 790 bp, Homo sapiens
ggccgaggcccgtcctgccccgcgcggcgggagtggttggagccggagggcggatctgtgcctggccgagggtgtccgtcggcgtcactcaccgtcctcggcccgcctctgcgtccactaggagcggcctgaaagaggcccgcacgcgggctcgagccgcgtggaatgcacctagagctgcattccatgtattccttggcttttcgtcctttcctccatcatcaagtaactggatctgtgagcatgatgaactttgttttcctgagcttgtcctgtgtctcctcttctggccacacctgactgagcagaacataaaagcgacagaacaccaggagggctgctgcttggggaaattgtgtgagaagagtcctgggggactaggggcagggcaagcactgctctccctctcctggaggctggggagagcatcaaggagactaccaggtaggaggaaccatgggcagggcctccctcatcaggatgctttccccacaacagagggatttaagcccctggtgggtgagtcctggattaaccaagacctgagccttttggggggtgcagaggacagaggacactgtgaggtgagtttctcctgggtggattccccaggggcctctgaggctggtttcaggccctgccctttggctgccccactggaagctctgagcatctacccttcagggacgctttccctggtctgaccttggcaagggcaaataagaggtactccatggagggtcaccaaggtctggggcgtaaacggtgcccatctgcacagtagcatgag

SEQ ID NO: 1342 - DNA, 976 bp, Homo sapiens
tcagacgtccgtgtgtccagccatcaaaagtgacctgaaaagcagcattgacagtgaccaggtgctcaggaagtttatgcttgtaagacccaatgactccccaccaagaatcctaccagtttccttggaacctttgctcatgaccattcaagatgagcattacacactggcgaaagagatctgcatctggggccttcaactgagcaacccagagattgccagacttgctttgcttctggaattgaaggggcacaccacctgcccgtttaccaccctagaaatcattgattgcaagatggatctgtggtctctagagcgacttgggaaggctctgcggttcagtagtttgcattctcttgtcctcgattactgcaaatttggaaatgaagaacttgagagcattttctcaggcctggagaacaaccaaaggcttcaaggcctcagtctgcgttactgtggtctgggacctcagagcgggctaaggctgggttcggtcatcagccagagtgccatttgcgagctgttccttgatggcaattacttggaatgttccggagcactggctcttctcaggcccatagcaggctttgcggagacacagggggaagaccagccagccccaggctcaccagacactggaaatccccctcagcggctccaagccaaacagagaggaagttcaactatgaaccagattacaaaatcgtctgaagctgtaacagtgaaaactacttcagggaagaaaaagagaaaaaaaggaatcaagaagaaaattgaaggtctgatggaaagtggtccttggttagtgaagttgcattaggcagataatggcatagatggaaaaggaagagaaggagaaaatggtttattggaattcattcaaactttaacatgcctgatcaaatactctgcctacttaagggaaattgaccttggaaacaatgttctgggagaaatggctgctgctaacatactt

SEQ ID NO: 1343 - DNA, 334 bp, Homo sapiens
agattaaaaggagcccaagccccatctcatcctagcacaccctcctccactgtcctggcagtagcagtccctgcactaggtcagacaatcccctttggggtacaggaaacaaagcaggaggagtttgaggtccctacactgcagcagaagaagaggaaggagtggggcctgaattgaccataaaggatgtaggggccacgttgttccactgtaatgtcaaggagggggtggccattgtttgtcccagcctggggctccccctctggtttcctatttgtagttactagaatgaaaaaaaaacatgatagataaataaataatccactggcagaga

SEQ ID NO: 1344 - DNA, 2737 bp, Homo sapiens
acccacgcggcgcagctcccaaagttgcagacagcccggcgaaccgcgcaatgcgcttcttctgcctgcagcagagaaaaggaaagaaaactccgcaggggctccgttggcttctccacgagtgacaaccatgttttcccagatagaagaccggagccctgctcctttgcgatccgccgagggctgcagagagcatcctcatccatttgggcacccctgcccaggaagagcccggccatccctttccggactggatccttaagaggtgaattttcttccgtggattccgatttgctccgtctgaccagcctaggcaatccagcatcgcgtggtaccagtgccgctgggcacactggcttcacgccggctccgcctcaccagcaagcgcattcccaggtggtcaggctcaggatggaccatgagctttcaaaaaggaaaaaggtggaaatcctcaactatgctgccatctgaataagtgtttctttgtagatgcacagagtcaaggaaaattacatccctgcattatgtaatgtaccaacaacgcacttacccactgttttaatctaggttattcttgaaagcagagcctgagacaaaggtagacacattctatttatgagtctaacacccaggagcaggaatgagagataggggagtgaactggggaaaagggaaactaagtccgagcaaaaccagatactgctcttatcaagtggtccacccctattaatggctacataatgcagaactttctcaggattcttcttaaactttatctcagaactgtctgcctcagggagaaaggagaagtatttctccatcagcagccacctcctgtgtgttgagggctgctcctttggggcattaacccactgcctccaccaccccaaccctctgggctgcaaagagctagctgacagtccagctggtaccttagcatcacacattgctgcatcagagaggtcttaagacaggaagctagagtcttggtgcatgctcgaagtgagacggtgtcagcacagagcagggtaaaatcttcccgttaactcttcaccagagctatgactggaatcagaggttgaaaagatgtgagactgtacccaagaagcatcttataagcctacgtaatatactgttagactcatcgaaatctatttcctcccttctttataatcaaaacttcagtgtccagaataaagttggcagaagggttaaattggaaagttaaatgtactagaaggtgtacatttataagttttgaccttgagtcgtgttcaaggagaaagtgacattggaacttggaaaatttaaaaatgattctacttgaaaaatttgaccattgcatagaaatattagctatcgtctaatcttttgtaatcttagaaacaatcgtgaattgtttggtgaaaaatgaaaaaataaccatttcttatgtctccgtgacctttatagaccaatgtcaccaacttttcctaaggtaattgtttcctactgtcaaatagctctagtgatataaatcttaacaatcaatgaagggaaaactggtggaaacataggaggaaaaatactgggataattttcatcacaaagtattggcattaacattggttagaataggggagaaactgcatgacttgacaactggacattcctgtatgttgtatgaggccctgtcttaacagaaatagtgatgtcatcatcatcctctcttatttggtcttgaattgccaccaatcggataaaacctttgaattatttaactcaatatatgttaagtttctactatgtgctgtgtattggtactataaatatgaataagacataagatattacattcaaaaacatcagaatacatgttcttttaaagtataccccaaaacatttaccatgtgttctggggcgcatgttaggctggatcacaaatcaagtctcaagaatttcaaaagattgaaatcatatagagtatgaattaaaccagaaatcaagtacataaaggtaacaaaaaatttccaaaatgcattaatttaaggaacatacacctcatgacccatgagccaaaaaataaatcacggcaaaattgcaaaaatattttgaaatgaattttaaagaaaatacttagcatattaaatacttagcatattaaagctctaagtacatatgttagaaattttaccgaaaggttggctatcagtgtttccagaagccagggaaaaagtttatacaatttgatcgctgaggcagggaaacaaagtgagacctccgatcgccctgcctttctgaggtgagcactctggatcccatcgcaggagatcagagtcttgctgagttgaggagaggaagattggagttgatactgagatagcttgaattttcaggacaaagtatcaacaaggaggaaggtagacaaaaaaatccagaaatctatgtagagaccccattgtgtacattgcggaacactaagcctaacaattctcaaaattagcgtgagattgggaaatatctaatttccatccagccacagtggagagtcctgactgaaaaccaggcattcgctaaagatcccagaaaggttgtgtgttacatacgtagggctaaactatcctgactaaaaactacactacacttgctcctcacccccacaaaaagcttaaaaacaagcctcaatagtataaagctgatctgtaagtaactaaactacctgcagaacaaagtccaaatttattagttccagtactcc

SEQ ID NO: 1345 - DNA, 489 bp, Homo sapiens
gtttccaaggaagactaagaaaactgcaaaattaaagtgcactgcaacatgaaatgctgctggtggccaggcgagatcgtggtgtcaaaaaggcaagatggaatctcacgctatcacccaggatggagcgcaggggtgtgatcatagcttactgcagcctccacatcctgggctcaagagattcttccatctcaacctcccagattactgggattataggtatgaaccactgcatctggcctggagagacattttttaaagagaaaaatcaattgctgagggctttggatatactacatatgctattatctgtaaatggatgattttctgtgttatacatattattttagaatcaaaataagtctggccaataactgcactcaattctcttgcctcataaatgtaacatgtccaaaactgaacttttgttttctgccacaaaaacctgttccttcttcagcacatgacattgctattcacccagacatc

SEQ ID NO: 1346 - DNA, 708 bp, Homo sapiens
agcgttgcggctcgaggcaaagctggtcctgtgcctgctgtccattgccgctaaggcctgctgctgccattcaggcgtgtctctctctctctctctctttcatgccgctctctccaccccatcttgggacggccagctctaagaattcctgctacgacactgaattcaaccaggaggtgatgccacactcaatcagaaactatgctactgctgaagaggtatattgagccctgcctggttaacctccagtgaggttattagagaattgggagaggctcaaatcagcatcctgcacctagttatcaaaccattgtgaagtcttgattcctggatggccagaaaacttgtcattggtcaagagcaacattaagatctgcctgttactcatactgatgcttcctgcccagcaagttcatcagagggcgaggatgaattacggttgccatgaatgtccttgtgaggcagttgggaagccttggctggattgtgaaggatatttgaaaagtattttagagtccaccagatcatccatgtgagtgaccatgcagcaaaagaaggagggtcctctcagtgattaaggattatgaagtattaattcttccactgatatctcaaaaggtgatctggacaaaggaacaggtatctcagattcccagttctcaatcttccttcctccttacaagatacaagcaaccttcaaccttccca

SEQ ID NO: 1347 - DNA, 356 bp, Homo sapiens
cccaactccagctgcctcacagccctacacatccaaggcttgctttaaatctcctaagtcctgaagaaaatgaagacagaaagaacagcacctactttcaaggaaaaggaggccacgcccctcagcggcttcaggagcccagacctttgggggcccaccttccgcagctttccattggccccacggtggaagcccgtaggttcaggccctccgaacacagctcgctttccacaccagcggggccgtaccagagcaagaccatgtctcacaaaataataataatacttaaaaaatggtaaattttatgttatgtatattttccacactataaataaatatttgtgcatgtatatata

SEQ ID NO: 1348 - DNA, 528 bp, Homo sapiens
aggtaagtgctgatgctgctgctttgagggccacacaccttgaggagtaggaagagtactcatactggaagagtattcagcacggactggaatcctgcatacatatctgagctctgtgttctgtagagatggggtttcaccatgttgcccaggctggtctcaaactcctgagctcaggccatctgcccgcctcggcctcccaaagtgctaggattacagaaggtgcctgcttccccttcaccttccaccatgattgtaagtttcctgaggcctccccagacatgtggaactgtgagtcaattaaatctcttttctttataaattacccagtctcaggtagtatctttatagcggtataaaaacagactaatacaaacaggtagctctaaattgtgagtttttcttaactcctttgatcttctgtgatagcgatttttcacatttcacacttccctaatgccaaaaatccacctccagcagctgttttgcctctttcttatcctgccccttggaagaatgtcatcatta

SEQ ID NO: 1349 - DNA, 544 bp, Homo sapiens
cctgagttgggtcgatgatgagaaccttatattatcctgaagagaggtgatgacttaaaaatcatgctcaataggattacgctgaggcccagtctaggtgagagttttggaagaggatgctgggatcctgaggtcccctggtagagccaattgtattttgggctggagacctggaagccctgaagggcatctgggaggcccaaccctgtctctgtgctcctccatgaggcagccctggctccccatgtaggcttggtgatggccttcctgttccctgggggtggggcacatgggtagctcctccctgacccccattctctcctgtgtctttcagtgagctcttccccacaggtgggccccctggcattgactagcatcgtgagctcttctgcccagcagcctccctggcagtgaccagcatagatgctgaccctggaggaagaattgcactgggcccactggccccgggaaaatgtccctcagccaggtgcttagcccctggtaatctgaagctcaggcccttcctgatgccctggtctcctgc

SEQ ID NO: 1350 - DNA, 623 bp, Homo sapiens
acgtggaacctggttctagggtgtccacaatctccacagaggcggcattgggtcaccgctggaggatgcagcaggagggaggacccgtgaggagcgccccctgtaggaccggaaccctggagggttcgcggcaagggtctccggggcataggaaacgggcatcccccaagggtagtctgagttccgcccagccccattcctggatgctcacgccgtctcccctaaactcccactgcgctcaccgggagcccatctcatcatcaccacagcccgtggctaatgggccaaaacagaagaagaaaagcaactggcggagtacaacgcgcctgcgcattatcagactcagggacaggctggaacctcgccccgtaagtaggccatttaatgacgcgcaaactgggaaggcctatgactgttgaagaggataatcagaagccaacccctacgggtccccggtagctcgccgtgatcgtatagtggttagtactctgcgttgtggccgcagcaacctcggttcgaatccgagtcacggcattgtgggaacaatggcacggcaaggggctcggtatttttttccccttttttgtaacattttatataaatcgtaattcactttcttgaaa

SEQ ID NO: 1351 - DNA, 461 bp, Homo sapiens
agataatgtttatcgatgagaaaacagaaatttgaagaggcaaagcaagttgcccaaggccaagggagaaggtcagcgtgaactgctaccgccatgttgaagttcatcttctcttcactgcgagaagctgcctggacaccagggtggaggagctgtcagggccctcactgtggaaggaaggtccacagaaaacatcctggggtcctgagctgaagtgtgatgggaggagtcctctgtatctcagtctgatcctggtctccctctcggccatggtctcacactagtgctgctgggaaaccatccctcacatccagtcctggcatcgggcagtgactctggtccaactgttgtccaactcaagggtttagctgcttagattttcctaaaacttgaatttcattttcctctagccatggaatacagattaatcctttacaattaaaatccaagttcagatttta

SEQ ID NO: 1352 - DNA, 826 bp, Homo sapiens
aaaggtggaggcggaagtgactgatcaattcaggggcgtggggttcgtttaggttttgccctgtgtatgacctcgtttggagccatgaaaccagcctcaagctttattctaggaaggtaattctgaagatacctatcttcttgagagtgaaattttatggaatcctagatttctcatacctaggaataacaatgagcaaagcagaccttggtggccagaggggagccctcaggtagagctgcagatgctggcagtttgtgttagaaggttccggggctaaacagatgcctagaattagccaccaaaaggtaaattgtagactccactcttcaagaagcagcagaaggattaggaattcaaacagtgctattttacggtggcttttctacaatataaagatggaaatgggaagaagatgttcattgcaaattaaggaagctcttccacgagttcacgaatggaaataacatcaagagtttttcatcttcttagtgtgcaaggttaaaatgaataatgaaaggaaagggagagcgtctctctttacaatgctggaacagatgtcttgagtctgcctcctgatgacttaatttatgtcatgtgctcagccctaaaccaatccctgtggcagaagtgaagtggctgtgaaaagaactgggggtagtattgagaagaaaagtagaaaatgacaggtcaaaatataacaaatgtccgctaccaaaaataatgttttcctgtcaatttttaagcatgtgtgtatggtttcaatgtattattaaaagtatgtgtgtgtatacatatacatataagaatctaatgtattctatat

SEQ ID NO: 1353 - DNA, 722 bp, Homo sapiens
gggttccgcttgactctgcattctcctacttccctgcctgcttactctctgccatcatagttttttgcttcaaccttcaaatgtagccattctttttctaaagcggtacttattctctttattagttaaaattattaattttatgcacttactgttctagctccaattttgcatttccagttccctgctgggaataaattaaattggcagaagctcagtctaagtgcctgcaacagaatttgtcccatatccatacaacttgctcctccacaacaaatgggagaatcatcctcttacctccaggttgtacaggaaacagctggggaggcctcaggaaacttacaatcatggcacaaggtgaagaggaaggagttacgttttgcacggccagagaagtaggaagagcgtaaagtgggaggtgctacacatttttggacaactagatctcgtgagaactcaatatcacaagaacagcaaggggaaaatccacgcccatgatccagtcacctcccaccaggtccctcttccaacactggggattaaaattcaacatgagattcaagaggagacacaaatccaaaccatatcaaggtctctgctgaatatgctgttattcacttaacattcatgacaagtctaccagcatcataaaagtcacgacgactcacaagaaaatcaaatttacatttttgccactaccatgttcattgagaagggtaaaa

SEQ ID NO: 1354 - DNA, 2105 bp, Homo sapiens
ttcaagagcagcctggccaacatggtgaaaccctgtctctactaaaaatacaaaagttagcctgttgtggtggcgcgcacctgtaatcccagctactcgggtggctgaggcaggagaatcgcttgaacccaggaggcggagggtgcagtgagccgggatcacgccactgcacttcagcctgggtgacagagtgtgactccatctcaagaaaaacgagggagattagaaacctatgatcaggcattggctgaaacaaatggtaaattcttttggcagccttgagcttccccaggcagggacccaaaggggcctgggttatccctgagacagggccttgagctgctagaaactatgctagtgtttgttcaagtctctccgtgtccggggtgagcaaaattgtttgtgctgaaaatcaatgatttgcagctctcaagattccagtgggcagtctgggtgggcctgagtttctgctttttttttttctttatgtacagggtcttgctctgtcacctaggctagagtgtaattagtggccccagtcatggctcactgcagctgcaaactggctgcaagctgttctggctcagcctaccaagttactgggcttacaggtggatgccaccgtacccaacagattttatttttgtagggatgggggtctccctgtattgcccaggctggtctcaaactcctggcctcccaaagtgtttagattacaggtgtaagccaccacacgtggccagcctctgcatttctaacaggttccaggtgatcttgatgttctgctggtccatgggtcacactttgagaagcatggttctaaaggactatacagattaaagtcattaatctctgtgggctttggacttgaagtttcagcagcctttgacaagcatttgcaggtttcctttttatttatttgataaactgagaatccacatgcaaagaaatgcaagaaaattcaaagaacgtaagaaaatgtccttgctgtaaagctggtggttctcaatctcggatacacagtagaatcacctggtgcgggggttgggggcggggtgcagtgtaaaaattattaaatcagaatctctggggtaggccccaagcaacttttttttttttttttttagatagaatcttgcttgtcacctaggctagagtgcagtaatgcaatcatggctcactgctgccttaacttctgggctcaagtgatatcctcccacctcagcctccctagtagctgggactacaggcgtggactaccacacccaacaaatttttaaattttttgtagaggcaagctcttatactatcttgcacaggctggtctcgaactcctgggctcaagcagtcatcctgcctcagccttccaaagctcagggattacagacatgagccacagcaccaggccaacaatatttcttaaagctcctggagtgattccaatatgcagccaaggttgaaaaccaccctttaaaaggctcggcatccagtgtggaagaccagcacactcacgtcaggagaccttacctggagccaggatgcccctgatcatctctgataactttaaaaggaaggcctcagaagcagccccagaagcaaaagtttctctctgaccttctcctgccctcttgtttctggcttttcattctcccccaaggctacccatagaaactagaatccctcttccccaaggcaggtcatcagaaaccagaaccggttttacccaaagccagccataaaacctaaaaatagtcctctcactccccattcccctttctgtgtaaaaactggttggaaagaaatgatctgacctaccgtgtttgactgtcgtaagatacccattccagagagggtcccaccccgtgcccagaaggaaggaatcctgcacagagaggccaagaagaatctagacagccttgctgggtttcccctctcagtctattactattagatcatacccttcttgtccaatcatatttctacacagtccataatctgttgaacctaaacataaaaatggacaattcccctgtatcttggggtcttcattctgagggctcacatacaattatgatcaaataaatttgtttgctttttctcctgtt

SEQ ID NO: 1355 - DNA, 1163 bp, Homo sapiens
ctctttttgcctgctgccattccagtaggatgtgacttgcttctcctggccatggttgtgaggcctccccagctatgtggaactatgttgagaaggaacaacatgatctaagtctttagaaaccaagagccacgactagctgaggacacaagaattttcacaaaacaaagtagagtgattccatagatcactattatagctgcattaccagtcctaggacagaatatggatgctgaaaaatgattctttcaaagtgctgagttgttgcctcacgcccagttgtctggcatctcttcactgaaactattacagttagatctcatctctatgggtggaaggttgttgttctcaactcagcaggaaatgtcttatgaagaaaatggcccctgctccttaggtagcaggccataggcaaatactgaccctcttgccttctgaagctaagctccagcttcagtatgcacttgcttacctccttcccctgtccacactgcttttacttgctccctgtctcctgagagcattcattaataaattgcacacatttgaatccctatctcaggtattgctcatagagagtccaacttaagaaaaactgcaatccttatttatattctgtttcattaagagatgtaattgtgaaagaactgaacatataaaaaaatcagctttatcatgttttttatccttgtcacgccatgtcacctgagcaacacagtctgaatactaaattgtgagtgtgagtgcatatatgtgatggtaggtttttgtcctgttttcaatcattcataaaaccaaacatgtgtcccttaattatgctctactacatccacaacttattttattcataaaaatattgtggggtagatattatcactgttttcttgatggggaaatttaatataaaaaagttaaatattccctccaagggcataacatttttaattggtatagtcatgattcaaatttatatcttctaactataaggccagtgtgaatggtactccactacagtagactatccttagtggcttctactttttgccttgtattccgtcatgcttgtagtacctactttctttttctgaaaatttctcctccttctactccaaaaatattgttccctatgaaaactgatattttgcattgtatctccaaactcc

SEQ ID NO: 1356 - DNA, 596 bp, Homo sapiens
gaaaatatatgggctgaatgtctttctatttgctctttaaagaccttgcacaaataatgatgatgactgggatttttttttcatggaaaaaaaaaaaacagaaatggtgagggtacctggagaggccaaggtgaaggcattacttcttaatttattgatactgagttgcatccaccccagggagctggtgctgcctatcctccgaggaccaaaacagctggaggctaaagcagctaatagcagaggcacctgtggctatagaggctgtttgaaccctgggctctggcagtaagcactgcactgatctggaaggaaaagacatggggcaggactgagactctgctgggaaagcatcaatgatttagttaagaagaactaaaacagcgaattccataatgggaggttttgcctatgactttcttctagggtgtaagttggttccgcatcataatgtaattatatatttttcacttttttaattgacagataacattttatgtttttatcatgtacaacatgatgttttgaagtacatatacaaaatgcaaaggttaaatctagctcatcaacaaatgaactcacacagttatcacttt

SEQ ID NO: 1357 - DNA, 494 bp, Homo sapiens
aaagtaacattttaatgtggagcttagtaatcgcctagaatgaatggcgatatacagtttactgcaccctccaatgcgcaaaagaggcaggatggcaaaattcatgactatcttaagcaagccaggagactgctaaaaagccaccccggcttttcctcctccaccagctgaggcacccggtctcccggtttccacacgcgttcagagacacaaactcacccgccgctgaggaaacggtactgccttcgcgaccttctgggatccaggttacgagtgcgctccactggttcgagatttctgcccgtcgctcgccagggagactgagtgcccaagcgcctactcgcacaggccgcaaatacagccgcgctgcgcggcgagctgatggaggtcttcctcttgcccggcgtgcactgcggccgggggcggggagcgcggaaccatagagaagaacgtatatagatcgtctccgctgttggctctgactcaccaagccg

SEQ ID NO: 1358 - DNA, 427 bp, Homo sapiens
ttgccctcaaggacatgcataaaaagctaacggggcatggcaacatacagaaaaatgaagcaagcaggaaaagagcagatctacccactgggtctggagacctggatggcagtggaggctcagccagcaagccaagacacattgttcaagatagttaagacagttctacctataattcagacagccaggcatctatggtgtaggagtgaggcaatgtagaaggagagaatcaaggaagaagtttagagtcagatcatcccagcttactaataagcaagaagtcagcccatctgcccattaccctgcaacagtccccacggcatcctctctgtccttaaataaatagatccaaggcaagatgaatgaatgggttcagggaaagataaatatctccagaaaaatgcaataaagagaaattttgagccaa

SEQ ID NO: 1359 - DNA, 443 bp, Homo sapiens
ggtgaatggattgtgtatgggcgtgagagtaaaactttacaaggtcgagagtcatacaaaagccaaagccgcattaaagccagtcccagccaggcttaaggagagctggaatggagaggattctcatctaacatctgggttgcagttgtatgttaacatggacttcctaggaagtaacatatcaaacaaaagggaaagtgatcaaccagcagcaggtaccagccacagttaactgcacctgctaggagctctgaaagactttttttttttttaaacgaataaagaaattctcatttcactctcctccacactggactcgctgaagaaagagctactctctgatgaagttggtggtgctgtggaagaggaccgccgcctcctggacgaggaccgggaccgctcagcattgtctgactgacaggaaaggacccagataagatcct

SEQ ID NO: 1360 - DNA, 7276 bp, Homo sapiens
ggagaccattcccagtcagcaagggcttgggaagtgcatacagttcctgctcctggtgtctactctgaagagcacagagtagacgtttgtctgccatttcaccggcagtaagatcagcagctgctggtgagcaaagaggtagtagtgggtcactggactggtgggcgccggggccgcgcgctagatggagaggtcagcggcgaacccagctccatggcctagtctcgtcagaccgagcgcggaccctgccggcctccgttctcttccgcttgtctcagatatcatctcttcttttgatcactgttcctgattgtgacattgtgcaagtgttaaattgtgtgccttttgttcctgaagaaagagatgtctcctactctttgtgttggataggtcctgggatctttgaaatgctaagattcttggataccacagtatcataaaattcctctaaatgcattggtgctagcaatcccctactctgtctggcctctggatctagcttgaagttctggattcatttccttcttccttgtacctcagcctgagccttctgtcacccaaagggctccagctggtttttcactcaggcctcactttatcttccaagatgaggaaactgaggtccagagaagttgaagttttcccaaggtcacacagcagagctggaactagagcttgcatttcctgacttccagattagtgttatttttacttcaaactattacttcttggtgagttattgtgggaaaaatcctgtatattgaagatgtctctacacagtatcgtttcctgtttaaattacagataacttcaagagttttcagaaaaaaagaaattgggacttttttggttaaatcatgccatctgaacagaaacagttattttgtgatgaaaaacaaactactttaaaaaaagattatgatgtgaaaaatgagatagttgataggtcggcacctaaaccaaaaatttcaggaagtattcattatgcactaaaaaatgtgaaaattgatttgccaaaaataaatattccaaatgaagtcctattgaaacatgaagttgacaaatacagaaaattatttcagagtaaacagcagactgcaagaaaatctatcagtataaagactgtaagctgtgtagaggagtgtacattgcttcataagtctgagagagctgaagaagagggtgtaaaaatgtctgcaaaaatactcaatttcagctgtttaaaatgccgagacaacactcgatatagcccaaatgatttgcagaaacactttcaaatgtggcaccatggcgaattaccttcatatccttgtgaaatgtgcaacttttcagcaaatgactttcaggtatttaaacaacacagacgaacccatagaagcactttagtaaaatgtgacatttgtaacaatgagagtgtatatactttactgaacttgacaaagcatttcacatccacacattgtgttaatggtaattttcaatgtgaaaagtgtaagttctccacccaggatgttggcacatttgttcagcacattcatagacataatgaaattcattataagtgtggtaaatgtcatcatgtatgttttaccaaaggagagcttcagaagcaccttcatattcattctggtacttttcccttcacttgtcaatattgtagctatggtgccaccaggagagaacaccttgtaagacatgttataactttgcacaaagaacatttatatgcaaaagaaaaactggaaaaagacaaatatgaaaaaagaatggcaaagacttctgcaggacttaagctaatactgaaaagatataaaataggtgcatcaaggaagacgttctggaaacgtaagaaaattaacagtggaagtgacagaagtatagaaaagaacactcaagtgcttaagaaaatgaacaaaacacagactaaatctgaagaccagagccatgttgttcaagagcatttaagtgaagaaaaggatgaaagactacactgtgagaataatgataaagcccctgaatcagagtcagagaagccaactcctctgtccactgggcaaggtaatagagctgaagagggaccaaacgctagttcaggtttcatgaagactgctgtactaggacctacactgaaaaatgtaatgatgaaaaataataaactagcagtttcccctaactataatgctacgtttatgggcttcaagatgatggatggaaaacagcatattgtattaaaattggtgcctatcaaacaaaatgtatgttcaccaggctcacagtcaggtgctgcaaaggacggtactgctaatttgcagccccagactttggacactaatggatttttaacaggagtaacaactgagttaaatgacacagtttatatgaaagcagctactccattttcatgttcatcttctatactttcagggaaagcaagttcagaaaaagaaatgactttgatatctcaaaggaataatatgcttcaaacaatggattatgagaaaagtgtatcttctttgtcagcaacatcagaattggttacagcatcagtgaatttgaccacaaaatttgaaacaagagataatgttgacttctggggaaatcatctcactcagagtcaccccgaggtattaggtaccaccattaaaagtccagataaagtcaactgtgttgccaaaccaaatgcatacaacagtggagatatgcataattattgcattaattatggcaactgtgagttacctgttgaatcctccaaccaaggatcattaccttttcataattactcaaaagtgaataattctaataaacgtcgtaggttttcaggaacagcagtgtatgaaaaccctcaaagagaatcttcatccagcaaaacagttgtccaacaaccaattagtgaatcatttttatcactagtgaggcaggagagctcaaaaccagatagcctattagcatctattagccttttaaatgataaagatggaactttaaaagcaaaatctgaaattgaagaacagtatgttttagaaaaaggacaaaacattgatggacaaaacctgtacagtaatgaaaatcaaaatttagagtgtgcgactgaaaaatctaaatgggaagacttttctaatgtcgattcacctatgatgcctagaatcacatctgttttctctctccagagccaacaggcatcagaatttctgccacctgaagtaaaccaattgcttcaggatgtattgaaaataaaacctgatgtaaaacaagactctagtaacactccaaataaaggcttgccacttcattgtgaccagtcatttcaaaaacacgagagagaaggcaaaattgttgaatcttcgaaagatttcaaagtgcaaggcatcttcccagttccacctggcagtgtgggtattaatgtgcctacaaatgatttgaatttgaaatttggaaaagaaaaacaagtgtcatcaataccacaagatgtgagagattcagagaagatgcctagaatttcaggttttggcacattacttaagactcagtcagatgcgataataacacagcagcttgtaaaagacaaactacgagccaccacacaaaatttaggttctttttatatgcagagtccacttttaaattcagaacaaaaaaaaactataattgttcagacttcaaaaggattcttaataccattgaacattactaacaagcctgggctaccagttattcctggaaatgcacttccattggttaattcacaaggtatccctgcttctctttttgtaaacaagaaacctgggatggttttaacacttaataatgggaaacttgaaggtgtttccgctgtcaaaaccgagggtgccccagctcgtggaactgtgactaaggagccttgcaaaacacctattttgaaggtagaaccaaacaataattgtcttacacctggactttgttccagcattggcagttgtttgagcatgaaaagtagctcagaaaatactttgccattaaaaggcccttacattttgaaaccaacgagttctgtgaaagctgttcttattcctaacatgctatctgagcaacagagcactaagttgaatatctccgattcagtaaaacagcagaatgagatttttccaaaaccacctctttataccttcttgcctgatggcaaacaagctgtttttttaaagtgtgtgatgccaaataaaactgagctgcttaagcccaaattagtccaaaatagtacttatcaaaatatacagccaaagaaacctgaaggaacaccacaaagaatattgctgaaaatttttaaccctgttttaaatgtgactgctgctaataatctgtcagtaagcaactctgcatcctcattgcaaaaagacaacgtaccatctaatcagattataggaggagagcagaaagagccagaatctagagatgccttacccttcttactagatgacttaatgccagcaaatgaaattgtgataacttctactgcaacatgcccagaatcttctgaggaaccaatatgtgtcagtgactgttcagagtccagggtattaaggtgtaaaacaaattgtagaattgagaggaacttcaatagaaaaaagacttccaaaaaaattttttcaaaaacaaaaactcatggaagtaaagactctgaaactgcctttgtatctagaaacagaaactgtaaacgaaagtgtagggatagttaccaagaacctccaagaagaaaagcaacattgcatagaaagtgtaaagaaaaggcaaaacctgaagatgtccgtgaaacatttggatttagcagacctaggctttcaaaagattccatcagaactttgcggcttttcccttttagttctaaacagcttgtgaaatgtctaggagaaaccaaccagttgtagttttgaatcatcctgacgcagatgcaccagaagtagtaagtgtaatgaaaactattgctaaatttaatggacatgtacttaaggtttcattgtcaaaaagaactataaatgctttactgaaaccagtttgttataaccctcctaaaacaacttatgatgatttttccaagaggcacaaaacatttaaacctgttagttctgtgaaagaaagatttgtgctaaaattaacactcaaaaagacaagcaaaaacaattaccagattgtgaagactacctctgaaaatattttgaaggctaaatttaactgttggttttgtggtagagtatttgacaatcaggatacttgggctggtcatgggcagagacatttaatggaagctactcgggattggaacatgttagaatagtttaccataattaccaaggaaaagaaaagtaaaattaccttagaagaaaacaacgggttcagttaccataatgcagacattttctacttcagtatagtacctgaaatcgaacattttaaaagttgattgtatttctgtggaagagtaaaagttgtatgtatgatatttgaaaatgctatccctgcactcaaaagttttgaaagaaactaatcacagcacagaagtaccttgatttaattttttaaacgtgttctcgggaagttagggctaaagaaaattttgataaaacaattttcccactttagttctttagtgactcttagtagagggtaatggctgacacccccattccctctcttcttccaccagccttatgcatctaagtgtagctcctctggagatggagagctctttcatcgtagaactgaaggagtttctcacatttgtgaagatactttgagagaacctgggtaaagaagtcactctatatctgctaaatatagttattttgaaggatattaggctccttgaaagtacatttaactcactacagttacacctcatacaatgcttgaagagtttttggcaagtaaattttttttccagttgaactctgtcacttgttagagattgggaacactctcccaaggtgattttctttttctaagtgactgtgtcaaatgttgcagtagatgggcagcttcaagagaagaatttaaactctttgtctcattgaaagtttggttaaagaacttgaacatatttctaaatttgattatattctctgatgatccctttgcacagaactatgcttatctcatgtttgtcctccataaacaaatggccatttttttcttcttggttcccatccctttaaaaagagtggaacataggagcacttccaagggagtggcttttcttgaaaattaaaattgtttaccaaaacagtattttgaagcaagatcatatttttgtctgtattcactttattatttgaacatgtccaaattaggacaaagcatttctgttagctgcttctcagtgtgactgacaacccaaaacatatatacagattgttggcatttgcaaaaggaagcatcaatagtggacccagaggcagtgcataaaaccttaggatagattcctaagggacatgcccaacagagttttaaaatggatgttttcatgatgacaacagaatcatagatttagatttttcaccttgtaagtttggatcaaattttgctggttctttggataatggagttcttgtgttaacaaattacgtgctatatgattttttgttacattgttacaagtgttaatgacattttcattaatggatgaaaacttcagggcttcttttctgtatataacaaattaagtctgtacatatttttgtaccttttatgtaaattttgcacagaaatttttggcataagtttattttctttcagtttagttcagtgcatgcactaataaaactggttgtttaatttaaaaggaatatataagactttacccatgttattttcttggtttttatttcagatgtagattttgtttttgaggtaaattcgttcttcagggattgaacactattgttagcaagtgcctaaaaaagatgtgaaacagtttacatatgtcaactgtaacagtaggtcccaaatgggcccattcccctaatagttttatttttaaagaaagccatacatagaatgcttcaagctatcttgctatgcacattatacttgtactgttttgtgcagtttgtctactttcttagtgaagtattttttgtataaaatgttacaattgtgtttcttaaattgagcctaagaatggagttaattggaaatatacagtatatattaataatgtacatggtgtttaaagaatggtaagcattgttaatttctgtaatgaacattttcaattaaatttatcttgtttgtgtttacacaataa

SEQ ID NO: 1361 - DNA, 521 bp, Homo sapiens
acttagttggaattcaccatgaactgcatctcgaggatcaagtttaggctccccagtccattgtgacatccagcaaagtggagccgggcgcccccagcatcccgtctgtctgacgctaaatggcgaggctctccaacccacttagctccaagctcaaccttctgcaaaagttcaaccttctgcaccactggggatatcgtgcagctcagacatggtcttgctctgttgcccaggctggagtgcagtggcatgatcatagcttactgcagcctcaaattcctgggctcaagtgatcctcccacctcagcctccagcatagctgagactacagacacatgccaccacacccaggtgtctgcatccgggctcttttttgtagttctggtctatgtacaagacaggaataatagagttggagaagaccctgagacgagcaactgaaacggtgaaggggacggaaagcaaggcgggatataagctatatataaaatgataactcttcatattaaaactggctaaag

SEQ ID NO: 1362 - DNA, 3563 bp, Homo sapiens
gctaaattgtgtttccccccaccgaaattcatgcgttgaatcctaatccccagtacctcaaaatgtgactgtatttggaggtagaaactttaaaaggtgattaagttaaaatgaggtcattagggtgggccctaatccaatctgactggtgtctttatgagaagaggagattaggccacatggagaaaccagggatgcctgcacacagagaaaagaccttttgaggatgtagtgagaagataccatctgcaaggcaaggaaaagggcctcagaagaaaccaaactcacaagaaagccaacaccttgatcttagacttccagcctccagaattgtgagaaaacacatttctgtttaagccacccaatctgtggtgttttgtggtggcagccctagcaaactaatacaggtagctactgtgaatgggaacttcccgtattatatattacatctctaaccagttatttgttttgtaggaaatatgatgattttgtagtttattttcctggattttctggatggaaaaatgtttttatctgcaaatgatcacagttttgctgcccactttctagtcattttgccttttgtttttttttcttttcttttttttttttttttttgagacaagagtctcgctctgtcacccaggctggagtgcagtggtgtgatctcggctcactgcaacctccatctcctgggttcaagcgattcttctgcctcagcctcctgagtagctgggactacaggcacatgccaccatgcccggctaatttttgtatttttagtagagatggggtttcaccatgttggccaggatggtctcgatctcctgacctcgtgatccacatgcctcggcctcacaaagtgctgggattacaggcatgagccaccactcctggccttttatttctttttaaatccttgctcatatatctttgagtatatctgtgaatatttctatcagacaaattcataaaagttattactagtttgtaatgttcctttttctaaagaatgggcatgcagttttattaaatatcttttagtgtccattgagatgaccatttttttccctttattctgtttttttatatgtattacattagcccatctccaatattaaactagctttgtgtttctgggataaaaactcctttgacatttgacgtgtgctgacactgacattctttgagtaaataaaataaaaaacaggagtataccagtgtacaccaacataccctgctgctttattcgggttactgactatactttctgtctgaaattgtctgctgtgtcctcagtagatgactctatttagtaactacaaaccctgagtcaggctttcagaatgcccttctttttatttattagtagagatgagatcttgctatgttgccagcgctggtctcgaactcctgggctcaagtaatcctctctcctcagcctcccaaagtgctgggattacaggcatgagccactgttcctggccagagtgaccttctaatggtgcttccatggacctctcctttgctcctattttctttctcttgcttttggagctgctcctttagaggtgagaccacccttcaagtgggtgaaatcagctgtgagtctctcattgcttctgtgtacttcccacagcctagtaaattttctctttgctcctcaagccctggaacatttgggcctccacccacctgtcttactctctgcggagagtcttgcttcatatttagagtcagattaagaccagtggaaatgaactgccttacattttctctgtttcagcatatcttcctctgtcacctattttctccaggtttggataaaaggtagtctctcctgataattctcaacacctgatggacacctattccaggagaacactctgcatcctgaagctcattctgtcctaaatggatcccatatctcctctcaacgcagagacaaaaacaaacattccttaggcctaggaccatcacttcccttgtgtctgttcatggaccacaataccttgcctgcttcaatggctgcaagtgtttatcatctctgtcttgtctgggccctgcatacaagtgacctgccctcatatccaacactccagtttagactccagtaacctcttactggtgggttctaataaccttttaataacttccctctatcttgccccttgctttatattgagatcatattcattgtttcccctccatcttgctgcctggatcatgaatgatgtctataccacagggaccaggatgccatctagggacaatggagcaatgagctgggaggaacctggatcctgaacattgtgtggagtacagctgtcataaggctgaggttgcattgtgtgtgtgtgtgtgtgtgtgtgagtgagtgtgtgtgtgtgtgtgttgtttactttaacctgagcttatgagagctctgggtaatgtaaatagaatagctcctttaggaagtgtcttagtcattttgggctgctataacaaaaatgctgtatactggtggcttaaataactatttatcataattttggaggctgggaagtccaagatccagacactggcagatctggcatcaggtgggggcctgcttcctggcttatagacagttgccttcttgctgtatcttcacatagctgatggagagatcattttgctcttatgtcttcttataagggcactcatcccatttgtgaaggctccaccctcatgacctgattacctccccaaagcactacctgctagtaccatcacattggggattaggcttcaacctatacattttatgaggaaatgaacaatcagtccatatcagggagaaataaatatatgtaactataatcacaagttaagtagttaaaataaaaaatatcaatatcttattctgtgtgtggccctgccaatttactaaaagctatcataaaggacactgatcataaaacttagccaatcattttagcctgcacaaattctatacggtatttgaaataatcaaccaaacaataattcttcaaactttgtttcgttttgttttgttttgagacagtttcgctctgtcgcccaggctggagtgcagtggcacaatctcggttcactgcaacctctgcctcccgggttcaagcagttctcttgcctcagcctcccaagtaactggtactacagtttgtcctcggctgttacagagaattgatacaaaaaatgatcatgtgaagaatttgcatcttctgcagaactaccggtatcagtcagcagtaggagattgccagacacggtggctcacgcctataatcctagcactttgggaggctgaggtgtgtggatcacttgagcccaggagttcaagaccagcctgagcaacatggtgaaaccccatctctgcaaaaaatacaaaaattagccaggcgtggtggtgtgtacctgtggtcccagctgctgggaaggctgaggtgggaggaacatttgagcccagaagttgagccgtgatcacgccactgcactccagcctggatgacacagcaagaccttgtctcaaaaaataaaataaaataaattttaaaaaa

SEQ ID NO: 1363 - DNA, 566 bp, Homo sapiens
gctgcgaagatggcggagtaaggcgtgccgctgcaaactggcctctgggccgggggcgagcagcccccgggaggccgagtgcatctgttggaccgtgcgaggagaagaaaaaaaatatcggccagaggagaggaactaaccgaacattcttcctccctaccttatagaggggagtggtcatctacactaaagcaaagtgttaggcgcgtccgtgcgaagagaccaccaaacaggctttgtgtgagtaataaagctatttatttcacctgggtgcaggcgggctgagtccaaaaaggagtcagcaaagggagttaggggtgggcagttttataggatttgggtaggtagtggaaaattacagtcaaagggggttgtgttcttgcgggcaggggtgggggtcacaaggtgctcagtgggggtgcttctgagccaggagatggaatttcacaaggtaatgtcatcagtcaaggcaggaactggccattttcacttcttttgtgattcttctgttgcttcagaccatctggatatatacgtgcaggcttgggctcagaggcctgacacaa

SEQ ID NO: 1364 - DNA, 580 bp, Homo sapiens
acatagcactcctgtctcccgtttgacttcatatagtgaaaattgtctaaaagataaggcaggagctctggttgacaccccccctgcccccgcctcatagatctctctctagaagcattggaagaggccgtctcaaaaaagaaaaataaaatagaagcattggaggaaagatgtggtttgtagtgaaacaaattggaagtcaagctcagcctcaaccacttacttgcttctgaccttggcattaggaagaggccgggtgccgtggctcacacctgtagtgccagcgctttggaaggctaagatgggcagactgcttgaactcaggagtttgagaccagcctgggcaatgtgtcaagaccccatctctacaagaaattttaaaattagccaggcattgtggaatcctgctttgtgtagttcagtgcctgctgccaagtcagagctgtgacctcaatgaaagtggcccagccacagcaaacctcagtttccataacagtcctgggatccaatgtggctttcacactacatgtcacttcactctgttatctctgacagaaaaccaactcaaactggcttaagc

SEQ ID NO: 1365 - DNA, 481 bp, Homo sapiens
gaggatcatgtctgcatcttaaaagatccctttctgtagacaatggactgaagggggtgaccagtcaggaggcagttgctgcattgcaagatgaaatgctggaagtggtagggattgatgcagacctccttctgcttggaaccaaaaggaaactcacagcattccagtggttttagttcatggtggctctgaagatcgggccagcgccacacacggcagtaaatgacatgaggcagtcccttccggtgggagacttgcagcctgccatccagagagcggggaatggtgacacagttactcggttgccctgggcagctcaaggccttttccagttcctccatggcacctttctttttcttcagttttttcaccaaagcatcaacagctttctctgcccatttttcttcttcatcgccctgtttccacccaagaagtctcttcacagctggacttgtaaaggaaaataaacttgtcacattca

SEQ ID NO: 1366 - DNA, 2308 bp, Homo sapiens
agaactgcagatagtacagcttccacaggagcaagggatgtctgagcacaagtggctgagttccgagtgactttatgaagcactttctaccttcctctccggcatgaaaacagggattctgcacctgcatcatggacagtctggcaaaagcctctgctctgcctccggggacaagaaactagagcaaataaccgttttgaaattagatcctggcaaaattaccaacaatcaatgatggaaactgaagggagattgatttaaatcttcaatgacagttgtacagaagttgaagaaacacgtcatctttccaaagaagagtgagtagcttggttggtggtaccctaaaattagggcatgattaaggtacgtcatttcttttagttcaatcaaagtgctttgctgtttccatttcagagaatttcttattctttttttcaatttctctctcttcctcttcttcctctcattagtagatgtcttttataattgatgtcatttactgtcctttcatcaaatgtatgccacatcacttaggcgaaccagcagacagggcaccaaaatacacattagaggagactggcttccatgagacgcttcgactgtctcatcggggcacttgtaataagcatcttggtgccactgaatgcaatgctgtattcaaataatagctttcatcttcactctttttaaatataaaagtaaaccttgaagccctttgaaggacctaaccaaacaacatacctatgaaaatagatcagtaaggctttgagaaacattcttaagtaaaatctgtaaagcatctttgcattttttttcaagaaagacctccaggtaaatgatggcttttaataagacacatgacaatctcaattacaagaatcattagtgtgtgtcctgtgcgccattttatgttcccagcaggatatatcttttctcgtctagggtttccagggctgtctactgttctctatgtgtaaaacgtatttaagtgttcccccaatgctgcactaatgttgaaacaaaacaaaacaaaaacgaagaaacctttgtcaagtggtcagacagactggaactagaggattataggtaagagagataaaatgaagggttgaaagctataatttctatttatgtggtggcaaccaaatcagctgttggagtcaggcaatttaaagatgtggctactggagctcagagtctgggaagaagacacttctgcgtctgacagtgaatcaggctcccagttttgaagatgtgctgtaggtagttctcgctgaatccatttcccagttggtttctattccccgccccattcctgtgtccccacactttccacttgattttacctctttgacaattctatattttactttccttcctctcattccccttttcccaccccctttttttactgtagttcttggcctctgactactgttccatgctggatgtccccagaaaatagagtatgtttagaaaggagacagtgcatctcagaagggcctccccagtccactagtccattttttaatgtgttgtgctctatgggtgtcaggaatatttgtagatgaagtaatttgtggcatgaattttgatagaagcaggatcaccaacaaaatgataaatgtaggtacctgtctaccttgcataatattcactatgatcttgagaatttcaatgtataatttgtctttattcttatttttcattagaattaacagaatctcagagctggtagaaagtatagaaactgtatatacaactctcatattcagatgaagaaaatgatgcacaaaaaatcaactgtcctaagccattcagcttgtctataagtgctgttggcttaattatagttttgcatatatttaggcaaagaaaatactttctcagaaactggttaggactgtttgagaagaaatataatcatcaaaatatatacacagtaaaatgtaaccgtccatcattcaacataggcaagaatatatattgaattgcctgagtgtattattcgtatagcaaaacttacttgaatttctaataaatcttctgacctctgtatatgtataaaatatataaaccaaccaaattctgtacataaatatatttttggataccagtacaatccctatttcacttttgtgtattccagttatttattactcacagttctgtagttttaaccagaacaaagggattacccagaagaaaagaaggtaagctatttcatcagttttggtggaaatcagaagtttttttttctattattagctttgtattcttaaaaaagaaaaaagaaggagaaaaaaaa

SEQ ID NO: 1367 - DNA, 555 bp, Homo sapiens
atggtataaattgggtttcatggattggtttcaattctgaatgcttttctggagccaaagctcacctcagcactcttgggctgcatgctgtaatcctgggggatgggggattagtcctgtggctttgctctctggccccttgagattaagcacctgctgtgctggaggtgctgaggtgttcccagttcacttgcaacaacactctggcaggggctgctggcaaaattgctccagtggggcagtgggagtctccacacacatgtgcaccaatggaggaggctgcagaaagacttcaattattttatttgatgtgccactggacagacttgtaaatggaagctcaaggaattcagtgagttgtctctggaaaagagcagagcagatgaacacaacagatgaagctattaatgcagctttaccttactgacccagagcccttcgagtctgagtttcctctggaccaagtggttatcttctctatacagactggggattctatctcccaagcatgcaattaactgccccttttgaatattctattccaagactcattgc

SEQ ID NO: 1368 - DNA, 407 bp, Homo sapiens
aacgtctcaactgtaaactctgggcacgcggctagcgccacgtcctctccagccctaacattctgtgattctaaacttgtctgatttgtctcatatgttgcaaggctcgtagcaaaaagaaaaaaatactccataactatttaacaggaattagctgaagcacagctctagagagagagacacacacacacgtttcaaataacccgaacactagaacctagtgaattttatacctttactaaactttagcgattatttgtttctttcgtaacaaaggttattgattagatttagtgctgaaaaaaaccaacaacgtgcgcttcggtcatttgtcttatggaggaaacataaatctataaatcttcctcctgtctctaagaaataaaactctcttcatttccaaagta

SEQ ID NO: 1369 - DNA, 628 bp, Homo sapiens
aaagtgcagagactatccacctcagctatagcacagggctcagcactgtatttccagttatggaatacagttatttcatatatgttatattattcttaattctgtccctagttcctgctactgaggaagtccatactcagcaggacagtctcctggtctgccatgaattcaaacacaatctgtaaagacagtgaaggaagctacatctgtgcatgggggctttagagaattattggcttgaagcaataagaggaacatctgggctgagtagtcctcgaagactctcatgtgattcaaaagtccttttcttccttattatttcctatcttgctctcaagcatctcctctggcagcagcaactggaactaaaagtgatttctctataacagcgagcaagtttctcatggcctttgctattaactctttcatgcctgctgacctgcaaaagaatcaggagggctggtgctggagcagatggcgcactgatccctggatcctcattcctgatataagactagttctagataattcaatacaagaaagaagatttgcttgggaaggtagatggggcaaagcattaccttgtgtaaaactgctgctaaaatatattcctagtgagaaaggtcaa

SEQ ID NO: 1370 - DNA, 1962 bp, Homo sapiens
caaaatggtggcgccgaggcggaggccggcgcacctgggggcgccacacgccctacgggatccccgcagaccgccgccagctggacgcgagccccgggtccaggcggcccgcactggtctgcgccaggcccagcccgcaggggccgcccacagccggtggcccgcgtcgccgctcggtgtccgcgggtctggtgctggcgggggcgcggggcccggcgcggccgtctcggcctcacccagcggtccgcgccggggagagggagcgcactcacctcagacgcgccccgggagccgctggaagagcccgggaaaggaggcggagccgcgcgaatgaatggagccggcggctgctcgctggcgacctccggccggtcccaggccgcacagctcgcggctgccagggcgagtgcggctgcctcccgctcgccccggacgcccggctcctcgtcgcgggtcggccgcggcccaccgtgccctccgacgacgtgacgcactagcgccgcagcgcctccagccttcgcttccgctccgcgcccgcgcccaccgcgaatccccccgcccgccagcgcggagcggcccctcctcggagcctgggacgccgccctgcctccctccagccccggctttcaggcgccggcccggcaggtgcgggcttggccagcccgggggcgtcacgcggcccccgcctcgccacccgcgccccctctctccgccccggccgccgtcacccggcagcgcgacgcccagctcagggcaatggcctggtattaaagagtgaccttggcttagatataaaaatagatgcggttaagccgcgggggctgcaacgctgattttgcgtattcctttaatgccgaccttcgcaggattctgttcgcatagcccggtggagttctccagccccgcgtaggccctcctgaaatttacccagagtgggcgcggccatcccggcctcgggacaggggtgcagagggcacgggcgaggaccgccggcctccgccccaccactttcatcctaaacctactgccacttaggtgcatgcaagttagaatcgtgggctgctttcacagtctacagaagtcctagagcccggactttcatctggagatgtcagggaaataccacattcctgcgctgaccttttctctttcaccgtttaaccggtacagaataaccctgacccagaaagacaacagggttccatccggctttcctcccgtgcctctcccagctctattctaccgtcttatggcctctggcgcctttgctaattacacactcctactgaaaattagccctccagcatttaaaacatgataaattgtctttaaggtaatgcgtattgtagtctaaatatatttaataactgtattgagaaacaatattgtatctaagtattaatgtcaagactttcttttactcatcatccaagaaccgtagtattatgttcagctcatccagaaaagttgaaaattgcttctttcattcctgggaaatatttagcaatcacaataccaactttcacgaatttactaatgattagcaaaattagcaagatcaaaaaatacttcaaagaatgcttgttgatatagatatatttgaccctgatttttaaaaaaagcttttctgccatataagaatctattgtttcatttgtataatatttaattagccaaaatctttactattacacatcatttaccattttaatgaaacttaatgaattagatttaatagagcaggaattttgggtagttgggttctacccatagccagtgatgaatgaaattatatgacttgtatttacatttctagagctatgtgtaagtaggagtccccagggtaatcccaaacaattgccatttggggaagctttggctaccagactatgccctacagatgttgaagcctcaggccttagtgtaaagctaaccaatacaacttgttgataatatttgaaa

SEQ ID NO: 1371 - DNA, 5425 bp, Homo sapiens
ggcagaggaaatggtgtctttgaactgtagtctgtagtcctagaaattgaataaactatttcctaaatagaggtaagagactaggatcctagcaacttctctaagttaacaaaaggggaaaaatatccccataccatttttctcttcattctattaatgagggctagagtcgtttcatagattgaatagtttcaagagcatattgagcagtgcctggctaacagctgaaagtctgccatttcatgcaactttgttaggctttagaagtgaagcaggaatatagagaaaatacagcttctcccacccacaacgtgtattttaaaccatttcttctggcccagaagacaaacttttccaaatatcttgggaaaaccacagtttctactctttggagacaagagtctcactctcacacccaggctggagtgcagtctcaactcactgcaacccctgctctcaggttcaagtggttctcctgcctcagcctcgtgagtagcactcgacaccacacctggctaatttttttgtgttttttgtagagatggggtttcgcgtgttggtcaggctggtcttgatctctggccacctcagccttccaaagtgctggtattacaggtgtgagccactgtgtctagccaagtttctactcttgatgcctgccatggactattacaagcacctggcagtgacattgcacgagttctaaagaaagacttggtctttcccacagggacattaatgtgaaagaggtccagtgacaaagattcagtcacttttgcagaccctcacaagccacaataatgaagttgcagtgaatttgggacatagccttccctccccaaaattcttgatccaagaatccacccgtcaagttcaatgactcagactccatttctagtgtggtcgttggttaacaactttactagtttccatccaggcttaacctttctatggaccataatgtcttggtgtctgctgcatttattgtccctccctgttttaaggatacttaagtttttaaagaggcataaatacttcaaagtccccattggccctcctgggggaaattacctcaaaccacagggtagtctgctaaataaccagctagagctagctgccagcccaactttgcccagatctacaatattattctcgttactttagtttactcatccccccaaacttagctttcccccagaactttatatccactctccataaaagcttctgtagcaccagcttggtcagtcccaaggtcccaggtgccactggggtctggttgacaaaattgttggtatggtttggctgtttctccacccaaatctcatctgtaattgtaatcctcataatccccgtccccaggttgagggagggactcggtgggaggtgactggatcatgggggcagtttcccccatgctgttcttgtgagagttctcatgagatctgatggctttatgaggggctcttccccctttgcgtcctacacaaaccctgtctcgcctgctgccacgtaaaacgtgcctgcttcactttctgccatgattttaagtttcctgaggcctccccagccacgcagaactgtcaaacaagatcctttataaattacccagtcttgggggggttttatacagcagtatgaaagcagcctaaacagttgttttcatacgtgctggaaatgctgtgatctgccctgccattgtccccatcctggactgaccctcagtatttttcctttgagtggtgacccagctctttgccttgagcagcaggagtagcccttggtagaatctagttccccaggggaaatcaaagcagctttatcttctcactgttagccaagcacctctggagacagccttagtgtttgctcttttatcccctctcacctgggaatacaattgcccctgcaacataatggccctactgttccctcaccaactcccccagcatggggatcagaaatatggcagtactcctcagtgaagtatatgctgctttgttttaagcactcacctgaatgtgtaaggacatctttcctcaagagcttctcacttcctgaggagtctgtagtcttcattcaaatgtcttgatggctcattttccagaaatctctgtaggtcttgagaagcattgtcctagctttggtttatctgaatagtcctatttaaacttgtcccacacagatagcagcctcttgcttgcccttctgtttgtacacttgtctattttctctttctttaaatgccttttgggtgttaatacttcattggtggttccatagccttgtccccctctcttttgcaacttgaaggcaattctcagttctcttcttgagcacattcatacttagcagcttctgaatatcccacccacaattaaggtacaatctggtcacataactttttccctaggaagaaatgtgctactcaagactaatagccaaggttaagaacgtgcatactcctgaatcggatgtaaatgcattagtctatttgttctgtttagaaataaagatggaacatattttatagctactgttagtgcccatgtgccttctaaatatcttttgaatagttttacttctctccatcttgacagctaccatgccaatccaagcttccatcaccttgctcctggcttactgcagtatcctcctgtctacccttcatccacttttatctctttccaatcacttgttcatacaacagccatattgggtttttttcaaaacacacatataatcagggcacttctcaacttaaaaccatttctggcattacttgcccttaggataatgacaaaactttttaacacagtccacaaggccagagatagcctgacccttgctgatctgtccagcctctgctatatgtccccttattttctctgttccaaccacattggactttgttcctcttactagtcatgctccccacctatttggttccctagttaacttctcttcatccttcgatttcaacttgtgtcacttcctccagaaagcctaccctttctttcttaaccaggccgataggctgtcaaaaccaggaatctcttcttcgtagcactacagtcatactcattgatacgtgtgattattaatgtgggttttttaaaaaattagaatgaaactcaagagcagggaccacatctattacttgtgattaatatattcctagtggttagcacagtgtctagacaaatatatgttgaatgaataaatagaaaagggagaggaaaaagggaaggattgaccctctgtgaggcagtcttgcaaacagcagaaatgcaaagcaaagctgaagaactaactattcaacacacacctagaggagcgttgtaatgtcttgtgcctgtctcaaatgggtgcattcttatgggtaagttttactagtccagctttcactgtaatagttcacattcctctcctagtgtcagtctccaacaaatccctcagtaattcgtaatcagtaatctcatgccaaggatgagagaggggcattatccaaaaagttgggtgtgtccatttttttttgagtcttgctctgttgcccaggctggagtccagtggcatggtcttggcttactgcaacctccgcctcccaggttcaagtaattctgcctcagcctcctgagtagctgggattacaggcgcctgctacctcgcccggcttttttgttgttgttatttttagtagagacggtgtttcaccatgttggtcaggctggtcatgaactcgtgaccttgtgatccgcccgccttggccttccaaagtgctgggattacaggcgtgagccactgtgcccggctgttcatctgtttttcaatacctttaagttcagtttcccttacaaagcccacttttttcttagtgggaatctcttgtaccacttaacacctacattccttaatttttaaagttaaaacacttatatactataaaatggacacatcttaagcatacagcttgatgaagatttacaaagtaaacatgccagttgaaacaccactctgatcaggatgtggaacataaccagcactccagaaatctctctgccatcattaccaccactggttatcctagccactcttctgacttgtatcaccatagataggttttacttgttttgaagccatctataaatggaatcatggaagtttgggcttccctgagagcagatcttcagagaaaaaaaacttgagtgcagtagtttatttggcgtttggctccaggatgcaggagtgggaaagatggtagagagacagaagaaaaatcaatagaaaggtattacggaggttggatatataatgcttcccagaattgtctgactgaacaggaggctgaaatatttatccgctggctcctgtttccaattgattgagggatgcccccaaggaagttaacttcactgcaattctgagctgtaattgactttaataagctccaacagcactgaaagacgtttggattattttcagtttgggataatactactatgaacattcctgtacatgtcttttgagaacacgcatgtgtacatttgtgatgggtatgtaatggggtggaattactggttcatagaatatgtgcatattcacctttagatatagaggctgccaaccatttttctgaagtgattatactaatttatattctcactatctgtaaatgaacatttctgttgctccacatccttgctggcacttggtattgattgatttctcttttaattttaggctttttaatacgtgtgtagtgatatctcacttgctgtttgtttgctttttggtaaattttttattgaagtataatttacatacagaaaatcacacaaattgtgtacaggtgtgatttttcacaccgtgaatacatgcaaaaactagtatgaaattaagagttggaacatcaccagtactccagaagccccatgcatgttctcttccagttactataccactatcccaaggatggtctattaattcaacagcatagatttattttgcctgtttttcaacttcaaataaatgaaataatatgcactcttgtgtctggcttctttgactcaacagtatgtctatacaactcatctgtattgttgcatgttgtagttcgttcattcatactgttgtatacagtattgaattgtataaattactcattctgttactatgcatttgggctgtttccagttttggctattatgaataaagctgctatgaacattctagaattgtcttgttgaacatatgtatttctgctgggtataaagcttaaaaaggaaattactggaaaataagagtattgcctcatgttacctacctgctattttcactgtaatttcatctattctggttgatgtgtaatagtgtcatattagcattttttctttgcttttataaaataaatgtttttatgttggaa

SEQ ID NO: 1372 - DNA, 805 bp, Homo sapiens
agctgctctagaatgtagcaatggtgggctcctttgggggccatctagaagcaccctgcccctgggcacctgcctcctcactggaggagaccagaggccacgtcccagccctgtgcttccagctctggaactgcccttgacttcactggacaggcctgagcaagtcgtgtaaccttcagggactcagctatgcccactccaggctctgtgaaaccaagacaacctcacgtgctcagttcctcagctctgcaggagccaggctgctctgggttgcaagtggatggcaagcttccttgtgacttctcatcctggcaattttctggagtgtttgtgactggactttaacatttccaaaatgtggcgacagtgactgttaagtcttcccaaagacgagggttcctgggagccccagggtaagtggcagactaaggctgcaagcatcaggacagcagagaccaaattcatcattgaatcctcaacatctagcacaatatgcctggcataaggtgaagagaagaagagtatgaactaccacgaaactcatttccctccgtccttcaatcaaatacaatgaccttcagctactctcaccattctctactgaaaacatcccaactatctggaaagaactcacctaaagttccccaacatcaaataaaccacgttccaaaagattcagagccagagagaaacaaaacgccctttgttgatgaagcatttactcatacatacatacaagtgtgtatatatatatacacatatatatgtgtgtgtgtgtgtgtgtgtgtgtgtgtgtgtgtgtgtg

SEQ ID NO: 1373 - DNA, 977 bp, Homo sapiens
atataagataaatatagtggatcatgtagatatgatattaaagtactatattttataaggaaggtggattattgtatatttaccactgttttctgcttaagaaccaaggtgatacttatataattgtttttaccctagcattttgggataattcttgagtcataaaaatctcctgatcaacttggtgattgaattggattgcattagttctgatagaaactgtttaaaaaattacctgacattctatagaaatgaaaggagccatgctgtgtaatcacaaggctttcatgacatgacatttatagattatatgaaataggtaatttcaaatgtaaattttaagttttatttactattagtcatcgttttttgattatttaaaaatttgtactatggacaactaattaattttactttttatcctctgagatttgattgtggagcggcataagggggagaaagataagttgaggacgtctctttatcttttgttaatcagaggtggtgatagagtggaaaatataacacgtttcggcattcaggagacctaccttccaataaatatgaacctcaaactgaatcctctaaaggccccatacaatgaagtagacattggtggaaacatttacacccagtcagcttgaagagtttcaaatggaccctaccactgagaaatcaagatggcagtctactatggggaattgaggaaaaatggattaatacaagagtcctgtgataatatacaaccaagacagggttcttttaacatggattccatgcagtgaatgaagacataggtttcttacccaacacaaatggacagtggatttgactttctaaagactttttttgtggacattttgacatttggagaagaaagatggcacactaacccagataatagtttttatgcctggaattttttgcagtttgatttgtatgcgtatgacctcttgaaatgttaatttttaataaaa

SEQ ID NO: 1374 - DNA, 4247 bp, Homo sapiens
cggaggcgccgccagctccgcgctccgccactgcccaggccggcgggcggcactcggacccgccgccctcggtccctcgcgaggccacggaggccaacacgcctcgcacggggggacagcgcgggggcagccgtccaaacaccaggcgtcctcggctggtcgtcccagggcgcccgcacctctccgcccgcgctctcctgccgccgcgcccccaagcccccaaactccgaggcgctgcggcggaggggccgggctgagcgcaggcagggtggcccgggcccaggagcctgacggcctgagtgcggatttctcatctgagtatctgggaatcgagaatgaattggaaggaaaccgaggcgctgccctggccaggttgctgccccgcacccttccggagcaccgaagtcctgcccggcaacgggacttggagctgccgcagagtcagcctgagcccgaggcaggggtcgcgcccgcgatgcggggtctctgcgccgccccgcgaggctcctggccttgccctccctgccctttgttgtgtaataagacctgtggcggctccactgagacccacacgtgcaactccgcgcctccgcgttaaaggaggtgaaacgcagcagccctgagaaaccccgagaccccggtgtcctagcagaggcgccccggatggggaggggcgcggggccggcgccaccccagaggaaaagcccagcggagccgggttgggcaggagctggcggcggcggtgcgctgggccttctgccttggatcctccgcggtcggcaccgcttccctgctcagattcgaacccagattcggctcccaaggctcccacggctccagggtgcccagtcttgcagccagctcgccgcccgagccccggatggaggaagcgctcactggccgctacctctgctgtttctggcaccagagattgagactgtgaacctgaactcccttgatctcctcccgttgggcccaggagggagccgaatccaggcccaaccgggctcactgagaagaacctttaaaaatccgccaacgaatgctgttgcctggatgcgctgcctatgaccttcagccgtgtgttcacgcgcgcccgcagccgtggagtggcggtccctcctgccgcccgcaaccccggggccgccggtctgcgcacaccgggagcaacttcgttacccacagcgcccgcgtcctgcggctcgcgcggaactgcgcgcgggaaggtggcagagcgacgctccagaacgctgcttgcgtagacgctgccgctgccttcagatcccaattcggccgcgcgcgggcggggccctggcagcaacgaaaatggcgagcctcgtagccttccgggcccggcggccacattccgggagtcgccaggtgggagcccgccttccgtgtccccaaacgcccagagcccgggacacgggccggcggccgggtcaccaagccagttcccggaatcggctcgcgccggaatccagactcggcttgcaaagcccgctcctgccgtctctccgcagcgcgccctgccccccactgccggccctcttagcttcaaaaccaaattttgcctttcatcctgagagattaataccccgcaggtgaaaccgtggagacggagctgcggtgggtttcttttccacgcctcagtttcctcgtctgtgaaatgggaccaggcgcgcctgtgcttctccgggagtttattgcagggctggctggagagaatggctgggtggaagctgccaggaggaggcccaaggccgcccaccccgtgggcctcgtttgctgagcgggggtcagaggcgtgcgggacagggcgcgccccacggcggctctggaggcggcccggcccgtccctgtctcctcccctcgctccccctcccccggccttcccggaactctcctcgcccgctgggtggaggaggggcgagggccgactccgccgcccctggggtctccctcctcccacccccaccgcagagtctggcccgccctgggctttcctctcaggtccctttgggtctccagaagcccggaggtttcgcgcagactcgaacctgagatgacaccacccagcaccccaaatcctgcagagtgtggaggggatctggggagaaggcaggggctgcccgggcgctctggctgctgggggtgggggacagggcctgccggggaagcgggtcgggggaggactggagacccaggctcccctaggtacaacgaacctcgcgggagggaatacgccatccccgtacccacttccgaggacgtaggtcttttggcaccggcggcagccgcgttcccacacatctgggcggggccccgcagcatggcctggggagctgaggcttcgggatccggcacaaactaccattctaggtgtagacggaggaggtggggtgtgggaagcagggggccatggtctgagcagaccttctcacctctgggcctcccacctcctggggcaggacttacggggaaggacccgaggggagtggggtgtccatagggacacccaagggtctatccctgcgagctttgctttctactaaaccaataatcgcagtggtggtggcagtcgagacacggctcaaagagccggcaagaatagagcagagaccaggatcgccccaggcagggaaaaaatgaccagttctgtagagtgacccgaaggtgatggaatcactcgggcgtcctcctgggaaagagctgcctgctcccccgccgccgccagtacaccggcgcccatgccccgggggctggagagagcagccaggcacaggtaactcaagaactccagtcccctcacgggtgccgtgctgtggggcgccctcacccccacactttgggtccctgggcctcctcatcaaagcaggggcctgagtggcaggaacacccctgtgtgcagaatagtgccccctgcagcccccacaggtcacctctttgaggacctaggtggggcctgccctggggactggggtgaagagggcaggtccagccttcagcagcccctcccccatgacttcagtggaattacaaggggaacacccagggcagctcccgtaggctgcacaagggaagaggggagggcttctactgaggtgaaacagtgacccacccctcccacaccgtcagcctccctcccctctccacccttcagtgctgggaccccagggcccatagacagctgggggagtggggagacaggaggaactcaagctcagcttctgcctcctgtctcctgggaccctcgggcagcccctccagcttcctgggagtccaatttcccaaggtagaacggtggcggcagagcctggccctgtggtggggcagctgcaccccgatgagtggcttgcagttcctggagccctgcaggttgttggagaggcagggagcccttctccctcctgcctgccctcttgcacttcctctcccagaacccagcactactcccagaggctctgagctggagccctagaaggtaaccacctcctggctggacacagggcaagttggggccaggcgtgaggacaggtgccccaggagccacctgctccactcatccacaaaggccttaactggctcaggggcccctagctcccagtcaagccctgccctcctgaccttgtcctgccctggtgctgccagtcgggtggagatgtctaggggccagctggtctcctggcaactgaagtccgcgcttcccttccgttcactcattccttcctttcctcatgcaggaggcgctgcaaggctccgtgctcctggagcttcgagtctatggtatgagttaaacagaagggtatctcctccatcagatctacaggagggtgtctgctccatcagacctggagcttccaaggcattttacccgaagctccagcacctggcccaaggctgggctgtgctgtgtcctcagtgaaagaatggatgagtcacagctgaatgactgaagagctgaaccaatgggaaaactgatgctcagaggcttgagcaacctaggccaggacctgtccttagaggcagaagcaggactcagaggaagagcaccctgaccacaaagccccagggtccagaaagactcagccactggagtctgtatttcctgagtcgcctctcactgctggagctgtttatcatcgctccaactttcactaaaaaggaaaaactatcacttaaacaaagccattgaaaccccagcatcatgtgtggattttttaacataaataaatcatacaaactaa

SEQ ID NO: 1375 - DNA, 2682 bp, Homo sapiens
tttatgaccttgacacttttaaagggtactctcagctattttgtagaatgtccctcacactggggactctgaccttatgactggacaaggttttgttttttgtttttttttttttttttgagacggagtctttctctgtcttctaagctggagtgcggtggtgtgatctcagctcactgcaatctctgcctcccaggttcaagcgattctccttcctcagcctcctgagtagctgggattttaggcacccgccaccacacccggctaattattgtatttttattagagacaaggtttcaccatgctggccaggctggtcttgaactcctgacctcatgatccatccgccttggcctcccaaaagtgctgggattacaggcctgagccaccacgccctgctggtttattttattttttggcatgaataccacagctgggatgtcatcttctcaatgcatagtggagatatgcaatgtcagtctgtccaactcctggtcctgttagttcaggtggtggcagcggctgccggggcttctcccctacatagttactgttttccctttgtcatccataaataccttggggagatacttccagactaagtgaatgtctgtttcacttccaagttttacccacttttttttttttttttgagatggagtctcacttttgccgaggctgtagtgcaatggcgccatctcagctcactgcaacctccgcctcccaggttcaagcaattcccccgtctcagcctcccaagtagctgggattacaggcacgcgccaccatgcccaggtaattttttttatttttagtagagacggggtttcaccgtgttgcccaggctggtctccaactcctgagctcaggcagtccacctgcctcagcctcccaaggtgctaggattacaggcgtgagccaccgtgcccggcctacccactaattaatttcagcatccactggtgggtcttgcaatgcagtaattattaacttagttttcaaaggtgatttttgcattttcctcattcctttgacgtttattaattggaattcatctctaagaaagagcagtcccttcagcttttttcccttttttttttttgagacagggtcttgctctgcggctcaggctgcagtgcagtggctcgatcacggctcactgcagcctcgacctcccgggctcacgtgatctcccatctcagcctcctgagtaaccagaaccacaggtgctcaccaccatgcccagctgactttttgtattttttgtagagatggggtttacccatgttgctcaggctggtctcaaattttcgagctcaagtgatccgcccgccttggcctcccaaaaggcatgagccactgcgcctgacctacgatttctttctttatatatcagtatgaacgcaagggctgtttgttggattctgtgagtcataatctgatactgtttccacgctttggccattgggagctcctggagattgtctcctgtgccctatccttatttaagcacttgtttattttgggatgtcttcagttttccttgtcccagctctgcacccagctgcttctccagggagccctccctcactggagactgggatttagcaaccaagacctgggcactggctgtgcttgttgcttctgggccctcctgggacagagctgggaagtggatctatgacacgtgcttgtgcatttacccgccctgttggtttctgtagctgtctagttcctgctgttcctgtctcacctgcccctttccttatgtgtagtttcttcctgtgacagggagaaacctggctctcagattgacaggacattcgcttaggccatgtcagtgctgtaggtgaactgttcaacctgtgccccagggaggcgcagtcactatggaggcaccttacttccttaatcgtgtactgttgtttttgtgtttgacctgtagcatctaagtactggtttcaaaagttgcctagatgagttcttttctttctttccacctcctgcaaattatgtgatttgcataatttgtacatagttaggttcatttgttagtttgtattccttttggcttcccccatatcctcgttgactttttctttcttttgtaacttacatatgttatgaaatttatatgaggatatataattttcataaatgtttatggtttacatgtattagttgttattattaagatcaccctgggattgactggccaagcatttggtggaagatagcaataaataatacatcataaaagactttaatgtaaaaataaagccatgaaagtaccaagaaataaatcttctcattttaattacatcagcttgtctgtgatcatgtagcctaaggtaggccagagttaatttttgtgttatctatacacgttattgaagcgaattataaaatgttttagcatgttaattacttgtaaattaatatctacatataaaaatgtgagcatatattctatttagtatattaatccttcataaacaagtaatgcaagttagtattaatgatatcttaagacttaacattccttttttagtttgtgttgaataaatgaacatctaagagttcatgatgatgcttaaggaaagaagcctcatgtttacctttggaagttgtaaggcactgactcataaaaattggcaaataaaaggaaagaatcgggcattt

SEQ ID NO: 1376 - DNA, 490 bp, Homo sapiens
acaaactgagaagaaaaaaaaagaattacccccaacaacatctgaggaagcagaacagggacagacttgaaggcacctgggcagtcctctggttttggagtagaggcagctgacgtctggtgatgattcaccatatcaggaacaccctgtccagtgggctcaggcaagcctgccaggccacttctctaaagacacaacctgaggcctcctgcaataattctcacagagcattctgaacatacataaaatcacaatggtaagaaaatgaagacaggcaaaagccactggctcccaggtaactctacatgatgaaggggctgataatggactgaccaaatctagagagaattccagaagcaaggactcaagaggttaaaggtcccagatctagaaaaagcagaaactgctgattgttcctttttttgttgactgattatacaatgtgtccttttaaaaatggttctctgttctctttgcagttgttgtattg

SEQ ID NO: 1377 - DNA, 841 bp, Homo sapiens
accgctctgatggtggcacatgccgagtcacccgagtaagctattgttaagggccgtgacccgagcctccatcagccgtccgctctcatgaaaggctgtcggtggtagtccacgtgcttaagtgcctgcattccgcagtgtcaccaatatttccattagtgtttcttttttcttttttgagaccgagcctcgttctgtcacccaggctggaatgcagtggctcgacatcggttaatggcaacctccgcgtcccgagttaagcagttctgcctcagcctcccaagtaactgggactacaggcgcgcgccaccatgctaggcttttatatttttagtagagacggggtttcaccatgttggcgagactggtcttgaactcctgacctcaggtgatccaccagccgtggtcccccaacatactgggattacaagccgtgagccaccgcgcccggccgccatcggtggttcttaactgcgggtgcagtgcttctttgtaacattaagtgtatcctttacctgtcgctagataatgaatggtatgttacctgcatcattggtttaaaaagacgaaccgtttttttaaagaacactctttaaaaaaaagaaccgtggaacaatgaattaaaatctgtacctgatctctttaggtatggtgctgggtgcagatgcagtgtggctctggatagcaccttatggacagttgtgtccccaaggaaggatgagaatagctactgaagtcctaaagagcaagcctaactcaagccattggcacacaggcattagacagaaagctggaagttgaaatggtggagtccaacttgcctggaccagcttaatggttc

SEQ ID NO: 1378 - DNA, 956 bp, Homo sapiens
tgcggacaacacggccggaggggcctccatgaaatccaacccggggttccccatcctgcggtcacaaaagtcctggcatgtccttggggactatcctaggtcagaattgctcagggaaatgaaggctctgggatgcagaacggagaatgctttgcttctagagcaagcctcccctccccagaccagctccgtggctggagaatgcacaggaagcgtgaccattcatggagctgtccctgattggagtggaggtagacatacagcatggcgccgtctggccctgccagtcacctgccaaagacggaaggtttctcccggagggactatgacagtccccacctctacacgatggcccacccccaacaggagcgtcaaggcagacagactctggaagttgtaaggatgaggacagttagagatgacagcaggtaccttttctgtagagtgtaaatgccaagatggtgccgccagagatgaactagccaagaatacctatttatgttgcagtatcgccaaagataataatcactattgtggaacatgaaggatatattttaaggctttctccacattagactttctaggttcattttcccacccttctgaaatctgactcgattttccagttgaccacagtctgaagagagccagttggcgtgaggttctgtgacctacacagatggtgggaggagtcagacgggaaatctcttatgtcgacgtggtcaccaccacttgcttcttgagggagaagaatcggaaagacctggcaagacagactagctagaagggctttctgattccagaacaatactaagtttcctgaagtaaagtattaaataaatataaataaatggtaagacgtatataaatgtggtatgaagaggaagaaaataatggaatggagggaaatagacacaaatagaaattctaaggtatttctaatctgggatagaaca

SEQ ID NO: 1379 - DNA, 568 bp, Homo sapiens
acttgcccagtgaaaagactgtaatcagacaactttaataaagggagagcaggagagtggtgacgaatttccacattccgaacaagcttgtcgaaagaggagtgcagggaaggagcaagaatgaggcactggaagacggctgtaggcgcatgatgtcacaagttattggaagaaatccctccaacctaggttgggacagatgaaggcggcgcttattggtgttcaccaaaacaccagcatggtgtaccagctttggctagatgatgctcaggtaacgaacaacccctgcaactcagtggcttaaaggtccatttctcaagcgaattactgtggctgcagggagctttggcagtactccaccagttttcttcactccaggctgaaaggtcaacttttctgggccatgctccctgctgggctggtaaaccaactttgagggagaagggggaagtccagatatgtagtgtttgctatttctatgatgtaaatgctcccacaatggccgatttcaagctacaaacagtccaacaagtggcttgccaagttcctggaaatttaacaattagct

SEQ ID NO: 1380 - DNA, 540 bp, Homo sapiens
gaatcctagggagcgggtaaaggcctgggagagggagcaagatgggctccgccacgagatccgcctgaagtccggctcggcgccggcctcaactgcaagaggaaggccacccctctctccccaagctgaaacaccagaagagccacactcggccgttcccaaccgccgccagttaccggccgccagcgaagaccctttcagctcccacactccattggcctcttgcggtcaggtcacgccgccggaagccgcccccggaaacggaagtcaggctacgagtcacggtggctccgcgctggcggcgggttcccccacaaggtcttggggaaaggagcatgcgctggaagctgtgtgctgttggttttgaggatcttcagtaagctgaaagcggagagtcaggggccttgtgtcctaccatggtatttgctaacgtttagagagtgcttccccttgccgagcactggttcttgaggctggaaagtccaagagcatggcactggcatctggtgagggccttcctgttgcattatcccatggcag

SEQ ID NO: 1381 - DNA, 1999 bp, Homo sapiens
acctgcagtaacagctgttcatctgttgggacccttatcttaactcaccactttcagaagagcagacaaactcaatttggtacttacggagtttcgctcttattgcccagactagagtgcgatggtgcgatctcggctcactacaacctccgcctcccaggttcaagtgattctcctgcctcagcctcctgaatatctgggattacaggtgcccgctaccatgcccgggtaatttttgtattttttagtagagatggggtttcaccatattggtgaggctggtctcgaactcctgaccttgttatccgcccgcctcgcctccctaagtgctgggattacaggcatgagccactgcgcccggcctccaaagcctaatgtctttgatcttatcaatgttcaatcctggagcctagtgtgtcttggacctgcgttttaccttttgaatcagtaggagcagaactctgttcccaggcaccacaagaatacgtaagactagaaagttgtttctgcttttttccttttttttttttttttttttttgagacggagtctcgctctgtcacccaggctggagtgtgcagtggcgcggtgcgggctcactgcaagctccggctcccgggttcacgccgttctcctgcctcagcctccccagtagctgggactacaggcgcccgccaccacgcctggctaattttttttttttttttttttttttttgtatttttagtagagatggggtttcaccgtgttagccaggatggtcttgatctcttgacctcgtgatccgcccgcctctgcctcccaaaatgctgggattacaggcgtgagccaccgcgcccggcctgtttctgctttttagcctcaccctattctcagtaaaatgggaatgggacgccagaaagcatttctgagttaagtatattattgctgcatttgggagtcttctagactccagtgtccctgcctggccaccaaagtgccaacagctcatctatctcagtctttggcaggctttcttctccgcctttgcctccacaaactgccactgcttaacggtcactcacaaagggctcccctctctgaaaattagtccttctggacttttcttgcaactaccattcttcagtagtttcataaatgagtaagagttttataacatctgaggggtgggggtttttttatgttaccataggagcaaatgtgttccacatcctttcacacgctacacagaaaattgtatgttgtgtttaaatcatagccaaattgcaaagaaaattatggtttctttattttgttcataactgatctaatctttctcataattatctccttctaggttgaaaggattataaaatgtaattatgtttaaaattccatgtgatctaaaattccatcattctatcatgagcccaggagctcctgctacataaaacatatgctaatcaataaatgtgatacatcacatcaacagaataaaaaacaaaaaaaaccatatgatcatctccatagatgcagaaaaagcatttgataaaattcaatatcccttcataataaatactggcaacaaattaggcatagaaggaacatatttccacataacaaaggccatatatgacaaacccacagctaacattatactgaatggggagaagctgaatgcctttcttccaagaactggaacaaaacaaatatgctctctttcaccactcttattcaacacagtgctagaagttctgtctaaagcaatcaggcaagagaaagaaataaaggttttccgaattagaaaagaggaagtctaattgccccctctttgaagattacatgatcttatatctagaaaaatgtagagactccaccaaaaactctcagaactgatcaacacagtaaagttgcaagatacaaaatcagtcaacatgcaaaagtcagaagcatttctatacaccaacaacatggtagctgaaaaagaaatcaagaaagcaatcccatttataatagctac

SEQ ID NO: 1382 - DNA, 318 bp, Homo sapiens
atcctcgatcgggaccgaaaaggccctgaacttgtgcagtgacttgccattgagtccgggaggttctggagacctgggtgacggaagaacgcccaaggccgactgctgccctcagttatcggggctccacatggaccaaacccagctggcagtcagagggcaagagcatctcgatgcagcgcatacaggccaattccagggtgcagtgcagcatggaaaaggagaaatgtacctgaagaggcaaatgaaagatatacagcgtcacaggcaatcttgcttctactaccataaaaatagtttacgtttcttagacactta

SEQ ID NO: 1383 - DNA, 1947 bp, Homo sapiens
acccactcactggtgagctccgcaagagtgtacttctctccgtccctggagcgccacggcgtgctggtgcatagtaagcatctgtccatgtctgtccagttgaatttcttgagagtcatttgaccttctcagcagctctggagaacccacattgaccagagactttgcagccagctcacccctccaaatccccgccctggagtccctgacccaggaatttctgcatcaggctgctcaaacctgaatttgacaaaatttcaaagcgctgtatctttatgttgataagacaacggataaagtgccatacttggaacctagatcactcaatgttgcctgtagctgagtccacttctgtcactcaccctgcattgccctgccaggagcaagggagagaaagccagccagaaggcatgggcatgggctcaaatctggcttctcctgtggccactgtgaaagttgatcatacaaaggtcactgttgtcatagccaagcagagttatgagaccacaggaaaaagcacttggaccacgtaacattgctccaagagtataactgtctccaaccctggctgctggaacaagtgttgcaacctgaaaccggtttgatctaatagctacagaaacaacctgcggaaatctaagactagtttcacccactcaccaatcagagcttgccggatccccaaaacgttgctagtgctaatgaacttgctttcctaacaatccataacatttctcatttttatgaaacctacaaccttctctttgctctttggacatactgaagaccacccagtctgtgtgtatgccccaaactgaaattcttgctccccaaataaaacattttaaacttagagatttgtctgtatattttatttgactttgacagcaccaggggctccggcacaaatctcctccttcaagcccttttctacacagtcccgtgggtctaccctgaaagaagcctgatgacggctcaaagacacaatgttactgggaggtaaattcaggattacttgaccgaatggcccacccgaggtcacggaggctgctggaggaacagaaaatggtcttcaccaagtgaagcattgtcggtcttggcctgtgtctggctggagaatgttaaaattctggggacacaacagaaaaggcacagttgtggggaccaggccaatgtcagcgtgagaactggctccatccccctcccatgaaccagctctgcggccaaggcaggtctgcatttcctggtctgtgacacggagtcagtaacattgcctacttcccggggctatttccagagaagtgagggaatgggtgtggaacgcctgccatctgcggagccccgcatgaaacgtctctgtctttccagccagccctgagccagggaagggactggaagcacagcgggtggctgaggcgggctttcggcagcttacccccagccttgcccctccccgcctgctgaaacacaatctatggttgtcgccttcctggagatgttagccgccccctccagaggtggttccaaatctatttctcatttggctgatttaggagaggctgcgaatcggtcgctatggtttctttattttctcctgacagcttaggaatcatttttccaattattcccaggggaggaaaaagaagtggaggaagccagtgtttggaatgaggggaagctcacggatctgaaatgcaacctcttctgcaggagacccggcacagctaccgggacccatcacctccctgtaggaaccccgcccagccccctccagccagccctgcgtggttgtggccccactgcagaaacgcctccgcttaacactccagcctctcttctattcggtcaggccacagctgctgactttgtgcctgctgtagcaaccccgagcccccaaataaaccctccctcccagggtggcctctctacggggggagacagacggtg

SEQ ID NO: 1384 - DNA, 921 bp, Homo sapiens
gacaaaataaccattctgtatattggatattgacttctattgacaaaatagccataacaatattctgatttagaataatactccttttctgctgtatatttgcaagcttttatcaaatattacgggagctcaatagaaatcaacaatatgaatctttatttaccacaaacattattgatgcctatgcttgtttttcttaaaatctattagctttttatgacacatttatactttttcagttgtttattactgagaagtggctgtcctgccagaaaactgctattctcagctgtatccacaatgactaatagtgagtggaagtgcagtggataaaagcaaatgtgtcttctctgtattttttttcatccattggctaaaaaacaggaggatgcagaagatgaaagaaaatacaatccctgaaagatcatgaagaagctctcaatcagacaaaaaaccccataggagattttttttttttttcattattgtactctctgcttctatgagtttaaatttcttttacacttcacatagaaataaacctaggtttcttattagaagatagactgtgatactgaaagcaaataaaatggtacatgttacctggctgcatttcaaacaggtgatggtgacactgcactgaagcaccaaaggtgattcttgttggccaggccagagctccttgtgaaaaaggttaggcccactggtatgtctgaagcgtcctagctggatggacagaaccccatgagctgttttgattagactctgaatttaaaacaccttggtgcccagtaatgaggacattttcacatttagcataacgtgatttggtgtgtggcttggatttgacaaatcttcactgagctaatggctgattggatttacttggcctgaatggaaaataaaaatcacctctgagca

SEQ ID NO: 1385 - DNA, 529 bp, Homo sapiens
acttccgccctcgcctgggagcgcctctcgccccgtcgcgtttatcgaggagacaggttctaaaagagaaaagccctcgcatttaatttctcatacctggacctgctctcccagccactgaaatacagtatatccaagatcagttctgatgaccaagatcccaaagacaaattgaagacctaggcccgaaaacactgtcctccaggacacctaggatcaataagaatattatttcaatggtgaaaactgaggtttagagagggtaaataacttgcccaaaatctggaaaagtttgccaacccctggtcttactcctcattaaggtgagcaaaaatattaaccaacattcattgcaaaactacatgtggacagccggttctttcttcttttttttttttcaagacggtctcactctgtcccctaggctggagtacagtggcacgatcatggctcactgcagccttaacctcctgggctcaagtgatcctcccacctcggcctcctggaatagctgggactacaggcacgc

SEQ ID NO: 1386 - DNA, 687 bp, Homo sapiens
aagtgacataaactggcatgttctgaaagaatcactctggatgctgtgtggagaaaacactgaaaagaattctagagtgaaagtttcatgaatataagaagcaagacaaggaagtggcttatgcttaaggccttaaaggcaaccactgtgacaatccagccattctctggagaattcagcagaaagccagttggaaggtttgaaatggaaattacaagcgcaatattacagaagtgtggattttagttacaatgtctctatgagaaagtctaaaagttaaacataagcaaaacaacaaaaacatctaaataccaggaatttgttatctcgattatggagggcgacaagtcccacagtctgccatctgcaggatggagaaccagggggagaataattgactccattcaagtgttcgctcctgtttcaatcaactatggctgaagagtgaggagacatttggaataaatatggcttctgggggcccattcctatggatcagcagctggcttctggaggcccattcctgtgaatcgtcgatctcatagaagataatattgttagaaggcttacctcattgatgctgaacatcctaaaaagcttctgctgctttgagtcactgaaaaagaccaagaaacatgaatttaaaaaaaaatttcaaatgttataaaataaataatatgaactcat

SEQ ID NO: 1387 - DNA, 742 bp, Homo sapiens
agatggtggtgatgaataaaataaatggctctccttaggagccttgaaaatgactatggtttctctgcactgtgagagcgacatgtgcagcacctgggcaggcgtgaggggtggacttactttgtggaacacatgggagcatgaaagcagcacctgttcatgaggaaacagaacgacgttgaagtttacaaaagagaagcagcatgtatccaacagttaaaatcctgaatgcttagaagatggggcatggttgcacggagtccccttgcaggagagagcgctgtttcaccttctcccattcatctgatgacagtggaggtggtggaggcccaatgaggcccaacttctgtgctaaagtaagacagcacaggacaggagttagagtgtcttttagcatatggcacccacctataactttaatgacaccatttgcaaacaaagattaaagaactacatatagatcacatactttatttcacaatagaagctgtccattggtatccacagggaatgtgttccaggacattccaaggatgctcaagtccctgatagaagatggtggagtatttgcatacaacccatgcatatcctcctgtatactgccagtcatctcgattaccaataattcctaatgcaagtgctatgtaaatagctgttatactatattgtttttaatctgtattatttttattatattgttgtattgttattttttattcatttattaaaattttgatctgtg

SEQ ID NO: 1388 - DNA, 645 bp, Homo sapiens
gaaataggaaagtatttaatggtttcaacataaaatcaaaacacataagtcataaatagaataattatgacttgcataattatgaccagtattgtcaggttttatgtgtctgctggtaaaactttggaatatgatttgcagaaatctcagttcaggagtttagcaaagtttatgaatgtgtacagcattaaaaagtatttaaaccaggctagcctcgaactcctgaactcaggtgatctgcctgcctcggcctcacaaagtgctgtgattacagggtgtgagccactgcacctggccgataacagatgttttaatagtaagataaaaagtaaaatttccagtgtgtcgaaggaagaaaattacagcctagaattttatcttcatgtacattatttaagtgtgagggaatagtttcagtgacattatgtcattgaagaccttagaagatttccctcgctaaaggagataaagcgactggcacaacatgtatttctctgagtaattagaagtgttcttttctggctgtactgaagggactttcatgatttcttcgtttttgtactcttagttttataatattgcatagtagctaaggcctggctgtagcagttataaactgttctgcaagtgcgggaagtaatagtt

SEQ ID NO: 1389 - DNA, 4261 bp, Homo sapiens
gagatgaagtctcggtctgtcacccaggctggagtacagtagtggtgtgatctcggctcactgcaacctctgcctcccaggttcaagctattcttctgcctcagcctcctgagtatctgggattacaggcatgtgccaccacacttggctaatttttgtattattaatagagacatggttttgccacattggccaggctggtctcgaactcctgacctcaagtgatctgcccgccttagcctcccaaagtgctgggattacaggcgcgagccactacacctggccacagattttttagacccctcctacagccagacttctcccaccatctaactaacccctctcccttacctccctgctcacaatgcttatccctctccagcaaagagtctctgctctggaagacattatctcttcctgttccctctacaatacctaaccatcctattcctttctatgcatttgcgtattttcgttattcacattgcagatgcattcctcatttttctcttccagccacactatgctcagctttccattccagctcaaatttttcttcccaaaagctcttccttgtaagccccgttcctggtgagttcctggtccaaggggactgttctcctcagttcatttacagccgtcactgaattgctctgctaatactttaaagcgtgttcagctttcctcacctggctgggtacctgctgaggaagatgtcccttcaatgtttggttggagtcttttgaagcagaacagacctaagacaaagctgtgaaagagggccccaaattatacccagtatctcctccttttaccactcattcttccagagttctctcctaccatatgtgcccacccagaatttgtccttgcaaggacccttcaacgctcacagcacagtctcatcttagcctgttctctcaggatgcaggtgcttactagctggaaaaccagttgatgctactgggtgtggactggtttaaaccagcggttctcaaccctggggctacacactggaattccctgggggttttgaaaaaaatgtgaatgtacagatgtcccctagaccagctgaatcaggatctccagggtgaggctgtggctactatctgtcttcctttcccaaggtaatgccaataaactatttgcccaagctgggaagagaccagggcagccacatgacagagtagttaagagagaggttctggagcaacattgtcagttcaattgctagctctacctgtgtctgtgtggtcctgggccagcctctgaacttacctgttccctcctctgtatgtgggaataatattcatcatagtacctccccatggggcttccaggaacatcagttgaattaatacccatcaagtacttaacaccacagtgtgggcatatagaaagtgctcaacaaaggtttgctatttttttctttctttttgaaacagagacagggtcttgctctgcttatccaggcaggaatgcaatggcatgaacatagctcactgcaacctcgaaatcctgggctcaagtgatcctcccacctcagcctactgagtaactgggactatatgcgcgtggcatcatgctcagccaattttttaaaatttttagaggcagggtcttgctatgttgcccaagctggtctcgaactcctggatttgaacgaccctctcatgtcagcctcccaaagtgctggtattacaggtgtgagtcgccatgcctagccaaggtttgctactattattccttctctccaaccttctccctgtattctttctgaactccctttccctatcaaagccccatttcaggcctggtgtggggaaatgcagcaccaggtgagcatgtgttggtggggaggatttggggagacacatccccactgcttactctacctgtgctgggaactgcacaaagaatgggggtgaagtgggtgagaggccagttgggaacccaaaagctgtcctctacaattctttttgaaggctagggagatcccactcctacttcaggccatgcattggaaccaaagttgaggtgggggagagtggtggctgcacagataccatagacaagccaagacctccctgcctcgccctgtcctggcatgaaggcacaggtctgtaactacagcagcttttcccagtaccatctgacatttcttctgaatttgctttagcgcctagcagagcactccataaactctcctaaagtaggtaggaagggtaggatggggtatgggatatgagggtcagagggtcagaccagaaagggtggattattataaaacaagtagtcctaagattctgaggatgggcaggtgtaccctaaaagggaagcagtgggattcccaagtaaatacttcatctacttcacaagtttgcccaagcccagctcaggaacagtaacaaatggaaatgagcagggatgccggctgtggacaagcagaccccctaggtagagtccaccccaccttcccattaccacaggaattattaccttaccacccataggggagggggtaattgtgggcaaatttgatgggcccagtgggacagtcagaaacagcctgcctagagccctaatgtacccacccacatagctgtgacatcctcagcccagccaggctagcccaggatatatggtgtgtgtagcgcactctgctattttcctctccttgaatgtccttgaggacccagttcaggtgcctctgctgggacactccctgtgacactaccagccttctctgatctactctttctcttgactcctaagacttactgtcaggctctctggtcacctgatcaatcccaggcttgtgatacctcatatgctaccttgtaccattatttaacttttagttcatgtgtataattttcctactgaagcagtaggagcttgaggccatggctcctaaagctttgaaacccatgcagcaactgaaatagagctcagcattcattcattcactcactcactcaatagttattgagcacctccaacatgcgaagcaccgtgctaggtgctggggatttggcagtgaaccagagatgaattctacattgaagccacttagtaaatatttgttaaacagatagacgagtggatggagacatggatgcattagtagtgagtggataatgtctctatctgtggcatcccttctgctctatgttacctcagagaaaaatctcacttctttactctccgtgatcccacaactgttctggatgggggaagtcccaggaagtttagtctcaagtggagagtagggagagaggaaactaaattcagaggggtagtacccacttaaaggcatccatatgatgagtgctggggccagaagagactggaaccaatgagtcatagggtctcagggtcttcagacatcatatggggctgctacagggatcttttcagagcatccccttcaacagatgttcctcagcctccatgctaactctcaatgatggggcacctgacacaggcattccactgcttgcccctggtgatttccctcattctcacctctaagtaacatccaaaataaaaccagcccagccttgggccatgatatcctaacccacagcatgtgcacatgtacccacatctgcatatctgctctacctccagatcaaaatagcaaccagggagattggcagagcctggagtaccaggctgtcttcccagtttgggactggctgaggcactgtgacttcagtgagagtctgggcccatcctcagtctagaaaaagcttatgcaaggatgagggtagcctagagaaagtccagaaaaccacacaaatgaccacctgttgattccaaggcggagacagagcactttctccttttaaaaacagtatcctctcctctcactcaagcttagcctgctcaactgaacagccaggaaaagctgctggtgtttggtgatttgaagggaagggggtctgaacctcagaagcttgtcacttactggggaccctgatgagtttctctctgttgtcctgccttatccctaatctagctccctgatcatttgaatgtaaccctaattggacaagaattttctccctttcagtatggacaaaatcaacaaccatgaatcagagacttttagaggatgggtagtgaagtgggggaagaacagaacattgtagagtgaggggcagagaggcaggcagtgggcatgggtaggttctggttttgtgattagtaatattatctctttaattgaaaaaaataaactcatttcagattcgta

SEQ ID NO: 1390 - DNA, 495 bp, Homo sapiens
gagtacccagggacacgatacactgcggaaggctgcagggacctctgcccaggaaagccagatgatgcatatcataaattattactcaccccatgttcccaccctcgagagacctccaaacaatcaccatgccacagtgaacattcagtaacaaaaattcagccagggttttcaccagcatgaatggcagtgattccaatcaggaaaacagaaagaggagagttcagagccacctagaatggctcttgcaagatacgaaatcaaggcagcagcaacagggctgaacattcctcatccctaactctcccttcaccagtaggaaacccaggataactgcaatcaccgcaggcccatctggcctgaagttctactactagtagccctccatgggaccttcttaaggaagcatgtcaactcaggtaagggatgtaaggggatggatgaccctttgaggccaaagttggagcaaaaaacaccagatgttcctgtgcactg

SEQ ID NO: 1391 - DNA, 517 bp, Homo sapiens
aggaggcgcggccgccgccgcctcagtcatggctcctcgccgtggccgatgtttttgtacctccatctgcggaggccgcggcgcccggccccagctgccccggacgtgcggcgacggcacgcagcactgcggcagggggaagccagccctcgctgcggccgaggaatggccatgagatgtgagtagaagccccctggacagcctccaaaagagaactgtgagaaaaggttcttcaatcctaaaaatgatggaggaaaaaacagtccctcttcctcagacagtgacacctcaaactgctacagtcacctttgcagcaagcctgaagatgccaccaacatcaaagggaatagagagttggtccttggtgatagcattaagccactgtatcaaccaatcctgacaatttgtatgacttctggatttccagccacattacaacaatgtaacaataaacatttattaattgcttaagccaatttgagttaggttccttatataataaatgaagtcaaaaaac

SEQ ID NO: 1392 - DNA, 416 bp, Homo sapiens
ccaggctccagctatcctcccacctcaacctccagagtagttgagaccacaggcgtgcactaccacgcccggctacctttttgtattttcagtagagacgaggtttcgccgtgttgcccaggctggttcaagcggagctcaagcaatcagcctgcctcggcctcccaaagtgttgggattacaggcatgagccgctgcgcccaaccttcttctgctgtcgagatactgctcatcacctgcctgctccagaattcatgtggcttctcattgctcaatggattaagttcatgtttatcctggctttcaagtctttccgaagtgctgaatgaaagaacttgtaaggcatttcgggaatgccaaggagggaatggacgagtgtttcctgggctggaaaacctttacagagaaatggatct

SEQ ID NO: 1393 - DNA, 594 bp, Homo sapiens
gtttatgacgttctttcacaaaagagtataatcattcttagactgttgacatggctgtggaaagccttaggagaagtagaaacaatttagggagggtggggaatgtactcatcccctcttctttccatcctagtgcccccaccaaagaggcttcttgttgcagccctcagtatctggatatgggccagggaggaaggaagggaaagagcaatgctgctgtgcttcaatcctggccttcccctcacagaattcttttaggaagagcaagcttttaatcctttgaacttgtagaacatctgggagtccacttccctgtcctcttcctgatccctgctttctggactgtttaaatcctctttgggatggatcagagagtctagagaggccactcataggtccagctgctggcctcctgactctccaaagccttcactggaattgggacatttgctccagccctagctgtgaacatgaccagagacattatttataattcagccatttaagatatacctgtactcaaaaagtcctgtatatttttaaaaagttttatttttcaggtgaacaaaaatacatcctaagaactctgcctaa

SEQ ID NO: 1394 - DNA, 2156 bp, Homo sapiens
gggtggctttgtgaggatggctttgtgtggctgcacattgcccttggccaagccccgctgccaggagaggcagctcggctgccaaacctcctgaacccaagttacctgagcaagcagccctatcccctcgcctgcttctcactgcctcgcctgccttgggcctgcccgacccagggggtcacatgccttgttccccatcagtggagaccagggacaagaagacagttctgtgggaagagccaggaggaccatttgggaaaatacaggttccaggtgtgtctccagaccttgagagttggtgtctcctgggaagaggccctgatgagatctggggagattcggatctgatgagattcaggaagccctggcctctccgtacttgaggagacgggacacacaggacaagctgcaggctggtgagcaggttcaccttctattttgaagacccgcttcttcctcaggtacctgatcttgaaaacgacctcccctttcaggccggcgtgcagcagggcaatcgtggttcactgcaacctcgacctcccagggtcaagtgatcctccagcctcagccccacaagtagctgggaccacagacggttgagcccatagaacaggagtgagaagatggaagggcgagggggctgggatgatgaaaacttgcgcctgcagccaccattcattacagagcgccgggggccagctgcagaactgtagactcctcatacatcatcgtgttgagtcttcaaaacaaacctatgaggctggagtgcagcagcgcgatctcggctcactgcaacttccacctcctggtttcaagcaattctcccgcctcagcctcccgagtagctgggattacaagcacccgccaccatgcccggctaatttttatatttttagcagaggcgggatttctccatgtagcccaggccggtctcgaactcctgacctcaagtgatccacccacctcagcctcccaaagtgctgggattacaggtgtgagccaccatgccccgccagccatcagagttttatagcaagaatttttacctttgtccttagtgcaatgggaaatccttgaaacgctattattgccttcctctgcaaggaaaggttattttggtgagcagtggatagaggaaatgcagagggagccactaaagggttctggtgagatctggagccctgctgggataatctgaccagagaaagcaaagattccagagagctaggcacacttgccctacctccagctgcacacagctggttccagctttgtcctgaccttcagtctggcatacagggtagacccactggtacctggtacctcactctgggggtgaggtggccacccacctaggtctgggtcctgtagcagtttggcagcaacatctgggtgataagagaaggcgatttgacctactcccagggacaagaagctttgactcttcaagatcataaagtcttccctcctggccttgggtcctcctgttgcgggagaggtgaggtggggtgagggtcctccgggagggcaggcttggcagagcccagcaccatctcagcagacactgctcttctcctactctcagcacctccaaggcagtgagtggctttctcttgtctagaggacaaaatccgttcctcacctggacacaatgaacctgtctgtgggatttagggagcatcaaggagggaatttagtttccgcagacttcaaggaagactttctggaggaggtgatgcctgagagctatccaggagagaagagtgaaaaaatgttaagcagtggaaaaacatgaaccaaactgtggctgcatcttcccatagggcaacagggacttagcgcgtgcaatcaaggatctccagatggggataacccaggtgtgcccaacctaatctcagtgtccttggaagagggatgcagaaggagtcagaatcagagaagaaggtgacacgatgaaggaatccgaaattagagtgatgctctttgaagatggaggaagggaccacaagctgagaaatagaggtggccactagacactgaaaaaggcaaggaagtggattctcccctggagcctccagaaggaaccagctctgccgacaccttgacattagcccattgagactgatttaagggctgctggcctccagaattgtaag

SEQ ID NO: 1395 - DNA, 679 bp, Homo sapiens
caggaaaactgcacctgagtacatgcctcgttctccacttcatctaagcaaagaagagatcctacaaacaagaatacaactaagaaaatgaagaagctggaaaaggacacagccacatggaaagcccgatttgagaactgtaacaaagctctgttggacatgattgaagaggcttctctgccgtgcgtcctcctggaggaagggaggaagcgtagaaggtgccgatgcacttttcctctctccagccctcctgactgctccaagaatttcatcgaacaagactcaaagaggcccagctgctctgcgttttgattcttctccctctctcagtccacactgacctgggaggggcttctcaaacaccacatttcctagcgtgctgtgagaagaggactgtgagctaagaagggagaaaaggcactccctcctcatcaacaaacacctgacctgggtagaccctctgcttaccaagatccagtccaccttttgacatcagcattcatgctgcctctttttacgaaccaagccaaagtggtcccttcctctggaaattataggatacttaatgtacatcatatccagcttcccgactccagactgtgggagatgacacagagccagcctgcctggatgtgactcagctctgcaacttattaaagacctttggcaaatcacctaa

SEQ ID NO: 1396 - DNA, 4094 bp, Homo sapiens
atatggtactttgcacctcttcataactctgaactctgcagtgagaggtcttggtcccacaaggggacacagttttgctgagagatatataaaaaatctcactgaaaaacataagctgcagcagctacctggatactttcggttccttgtgtctgtctagggagcagcagccaataaaaggagtcaagatcagttgaccctaatcaagaggagattggaatcctggttacacaatctgggcagaagtaataaatgtggtgcccaagtgataaacctaccaaattgagactaatgtgtaggtgtggcaacccatcctcaaaagggcatgatggcctggaactcaggcctctcaaggaatgtgggtctgaattataccagataaaccaccaggagcagcagaggtggtagcagaggctgagggaaatctagaattgatagtggaggatgaggggatgtgacaagtattgatggcattcccaagccccactgcagcagcaagcactgtaatttgtcccactaatctcccatcttctaaatttctgagaggtcaagaaaagaggtctcttgattcctttaggaactgctccctaagcatacagggagacatagatctatgtggagcaaagggtggattgtaataagcaaagagatacactgcctgattcactttaagaaaggactgacctcccagttgcaaggaatgaggtcagcagcctccaactgtcagctccttcagagtctgcttcaactgcagaaggacactgtgcttgaggtcatacccttcccatgtctggtgactgaagtccagctgaatgtagctgccaaagttaccttaatgcccatgggaagcaaaaaatcaaagagtttaaacagaattttgagaaatcccaaatcagttttttttcagcatatgacattttggagtagtttgttattcagcaatagataacagaaattggtatcaggagtggggtgttaccataacaaaaggttaaaccttacatggtaaaaaggactttgcctctgtcattaagttaagcactttgaaatgtagagattatcctgaattatctaggtaggctcaatataagcatgagtccttaaaagtggaagacggatacatgagaggatgtcagaatgatgtgaaatgagaagaactcaacctgctattgttggctttacaggtgagtgataggaaccacaagccccaagcagcctctggaagctggaaaaagcaaagaaacagattctttccagagtgtccagaaaggaatgcagttcagctaacatcttgattttagatcagtgagatttttgtgttggacttctacagaactatataagaataaattgtgttgcttaagcacactataatacatgtggcaagaagctgccagctaagccttgaagaatagtgaacaaactcttactggaggatgggaaggcagtaaataaattattgaattattgaaataaatggaggattgagttatgcattgacagaatgcttagcaataattttgcttgtcttaatgtggaacagaaaatgaaacttaatagcttgtagatgtcttaaggagatttccaggtgaatgttgaaagtactgatgaacttattatggctgcatctcataatgtacaggaagacatttactgagtgaactaaagaaggaactgttcaatttgaaagcagaatttagaggaaatttttcaacctagtacttgtcatttttttatagaaaaggaaaaatagatggaagatggagccaaaatcccagagggaggagccaagaagcaaggagagcaatggattaggaaaccactaccagagggatgaactgaaccacaatcaaggaatagcctcttcctttggtgtagggggaccctgaaaacaatttaattttatgcttcctgtttccttgtctccttttttgaatgatagtctctgtgtggtgttcctatcctagaaaaccttaactgggacaagctactctcaagcatcttcacttgagaaacagtaactgaggaagtttattgtatctggacatggtttagatgataagattctgaacttaaacttatgccataatggagtgagactcttagggtacagagtaagtacatttttgcatgttagtgagacaagaactgtggccgggggcagactgtgatagtttttgaagatgtccctcaaacaattccttcccttccttggactcctctcttcagagggtagagtccatttccttttccttttaatctggattggccttctaactcactttgaccaataaaatgtggtaaaagtaaggtctggcagttttcactttcactctcctgaaccttcatattagaattccaggatatccttctagagatatccatatctctagggacatggtgagtccctagagacaccacatggaaaggccacctagggaagaactgagatgccccagtcaatagcactgccttagtcagtttgggctagtataacagaaatatcatagattgagtgactttttttctttaaaaaaatgagattgtggaacctgaaaatacagtgtagtaagagtggagagaaaggccacctaaggaagaactgagacgtcccagtcaatagcactgccttagtcagttggagctactgtaacaaaaaatatcatagattgagtgacttaaacaacagaaatttatatcttacatttctggagactgaaaatatggaaatccaagatcagagtttcagcatggttaggtgtttagtgggcgctcccttcctggtttgcagacagccatcttcctgctatatcctcacatgatgcagagagagagaactctggtatctttgtccccttataagggcaccaatctcatcatggagggtcttcaacctcatggcttcttggaaccaaattacttcccaaagtcctcacctccaaatctagcacattgaggtttagggcttcaacatatgaatttcagtgcatagaaagcaccaagtcctcagacaaagagaacttgaaccttctaactcagcttagccattatctgcatgcaaccacataagtgaccctgggtaacaccatctggagctgaagaaccaccagccagtacacagaaatgagaaattttaaaatggttgatttaggtaattaagttttggggtggtttattacatagcaattgataactgatacaacagtcttttcgttagtagaagagggggtaagaaagaaagacttatgaagaaaagacctgtagaaaatcgggcctacgtacctctatttttttttcatactcccgtgttttttttagtccatgctggtggtatcctcatcaatgcaattttctttaaaactctgtgagcctttatatcagattagtccaccccattagaacaaaagcaacttctataaatattgagacattccctttctacctttggctaagaattggggtgctatagataattcccaaaagattatctagcctacagggccgatgaggtatagcttgaagtcattctaaagtcttcacaaaggatcttacagcctttgattttattatcactctgggaccacgttttactgttggcacgttcggcttttctcatcttttccctgagatcatttatgatgtggaaattactttgctggctgaagttgggaatagaaaacagtagagaatacttcaagagtattctaggtatgcactaagtttatgggaagatatgccatctacataatttaccttcctctctaggcccatcataaaaatctttgaaaaattaatactacattttagtatgaatataagttaaacttagaggtgatatctattttgtggttaaatgtgttataaacatttatttagtgaaatacagtacaattacaacaagcatcaatgaatatttaatgagcagctgttaatttctgaagcagaaagaaagatgaataaaagttctggttttacttttaaaagtgaaggctaactgttagctcaagaaatactttatgtttgtcctatatgaaagtgttgattgcacctggttctttgctgtaaattaaataaaaattcaaatatttgtaaaa

SEQ ID NO: 1397 - DNA, 693 bp, Homo sapiens
ggcccctccagacgatggccattcctgttgccttggtccgcaggaacgatgggttatgcatgaactttgtagaacatggccttgtcttcaccaacgcggaggagagcccgttcggttccagagaggatgctgcctcatctcgtctctaaaagaggaggaaggggagcaggtcccttcacgttctctggtctcagctgagaactctccctggaagtagcgggccgtgaaatgtttcacaagtgacaccagtgatgctgttaaacaaggacaatccggttcatggattgtgacaacgcacgctgacatcaagcagaccctgccgtcaggtacagagggcaccacagtgaccaggaactgctgtcctttcataccaggttttaggaggctttaccagaaggaatggaaaatgctggtgggcagtaagattgaaacagcatctgaggactggttctgcacaaaaccttaaattcttcaaggactttgacatttgtttattcttgtaacaaattaaaacctatcctgtgtgttggttagagatcttcaaactgtaaataccttgaggcaggagtgaggtttttatcttttaaaggacaggcccctactctcctacgtaatgagtttctaaaaatggatgtgagcaccaatcaatatttctctggttgttaaagtcaagaataaaatggtatttttaag

SEQ ID NO: 1398 - DNA, 2598 bp, Homo sapiens
ttttggggctagaagttgcggactagtagctgaggcggcacgggagtgtaggcgcgcggggtcgttgccgggggcacagagtgagaacaagcaagggagccctgctgaattgcagcttaggaagccctgaatcctggagatatgttcctgacccttccttcttgaagggacagctgtgtaaccattcaaccatctggccatcagtttccacatctgtgaaatcaacttctgcctcatggagccgtgagttcccaagtgaaggcagtgaggggctgtggtgtgatccaggaggctgagaattatgcagtgggtgctgtcaccttgaagacatcagcgtgatcaggcagatcatcatggtactgcatttcctggacacgatcttaattttcttaatacctccaccgacatttcaaatagcgtctctaatgccccagagacttttatgcccctaaggtagttttctttcttttgtgaagcagaagaagggaaattgttaaagggaatattttaactaaatttatttccataaaactatctttgtctttatatctcatggaaagtgttaggtagcctcaggattatatctccgttggaaaactgtagatgtaaaccttcttgctatctacatacttacatatttttctgttgttatttacttatgaatagcattttgattatagcagaaataaaatacattaaatgactaagctcagaaataagaaaaaaaggtcaatggtgatcatttatttggaaactatgatattttaatgatattaatggtgtaattgacatttagttaaacatatttcatcgtaagtagagcactttaactcttacggtccacttaaaatgtaatcatacgtttatgtatttctagttaatgtatcaaactcaactgagtaatcaatgtacatcatttattttgctcctaagttaatacactaagttatgctttaaaattactaatttgctgcaatatccaatactctcttttaagtcttacgtctgcagaaaaggatataaacatttcatgacaccaaacccaagtatttttgatgcccttggcagtgtcagttgaacagacagtgtcatttaatgtttgagacagcatctgaattccttttattcttaaaattctattttaaaatgcagtttttggaaagttaatgtgaatagaaaaatttctaacattttatgtgcatgtgttttgtttgttacaggcttagcatctcaaatctgaaaattcgaaatctgaaatgtttctaaaattcaactcttttgagtgctgatatgactttcaaaggaaaagctcattggagcatttcagattttggatttttggatttgggatgtttaaccagggtaaaatatagaatgcaaatattccaaaatctgaataaaattgaaatctgaaatgcttatggttccaagcattttggataagggataattaagctgtataacttataaaactgaatataacaaaatttcccaacatgtggaaaatgatgtcttttttcaaaaatgtcaatagcagatacatggtacagtaagttaggggaaaaaatgaggtttcatatcttctagtttcctaattaaaaggagcccattctgggttggaagaaagtgtcagtaagatcatttctcctatttgaaaatcatacaaagcttgtcagagtgactcaggccaggagtgtagctgggcgtgtagctaaatgatatctccccacatctatataataagctgttacctgctttaaaaggaaaagctctcagcatgactctaatgttgcatttctggaatacagcttgaaaagctcttctcagggttgaacagagcatgaaggtaatggttattatctactcacattaaaaaaaaaaaaaaagaaagaaaccaccacagaaaactacttactgtctttaggctctactttcaaaagtgccctttatgaacgcttttacactgttgatgggagtgtaaattagttcaaccattgtggaagacagtgtggtgattcctcaaggatctagaatcagaaataccatttgacccagcaatcccattactgggtatatacccaaaggattataaatcattctattataaagacacatgcacacgtatgtttattgcagcactgttcacaatagcaaagacttggaaccaacccaaatgcccatcaatgatagactggataaagaaattgtggcacatacacaccatggaatactatgcagccataataaaagatgagttcatgtcctttgcaaggacatggacaaagctggaaaccatcattctcagcaaacaagaacagaaaatcaaacactgcatgttctcagtctaagtgggagctgaacaatgagaaaacatggacacagagaggggaacatcacacactgggcctgttggggggtagggggctaggggagggatagcattaggagaaatacctaatgtaaatgacaggttaatgggtgcagcaaaccaccatggcatgtgtatacctatgtaacaaacctgcatgttctgcacatgtatcccagaacttaaagtataaataaataaatgaataaataaataaattttaaaaagtg

SEQ ID NO: 1399 - DNA, 525 bp, Homo sapiens
gagaccattaggagattctgaaggacctgtgatgtgtgatcctgagagagggcgtcaatggagctgggaccagctattgaagtactggcatatgcaagagggagaacaaagaaaaaggaccagtggatacaaattacaggaaggaagaagtctttgcagaggaaattgaatgctgtctgatgctacaattcatatggatcctttcctggattgaagcctgacttttaaaaaaggtttcaataaattgcttatacctatgaagagatgcaaaagaaccttcaaaataaagcaaaggacttgaagaaagagaaggaagacatgaagaagaggatgtcatttaggtgaagggccatgctggataaggagctggctgcctctgtgaacatcctactcaaggcatcttcactgctgtacatccttttgaaatcccagagatcttcagtctccctgtggattaaggagatgtgcagtatttaaagtggcttcaggaaggcatggaagaggactgagtggggaaagcttttt

SEQ ID NO: 1400 - DNA, 82 bp, Homo sapiens
tgccacaatgatgacagtttatttgctactcttgagtgctagaatgatgaggatcttaaccaccattatcttaactgaggca

SEQ ID NO: 1401 - DNA, 497 bp, Homo sapiens
gcttccctttaagttttaataggagtggctttgttttatagaacgctgtaggcatctccagccactgaggggacttcttcaagcttggcccagcctcatccacagaaggatctggcagtgatatcttggcattcatagtctcagtgtgcaggacagcattggttccccaccctacagtcccagctctacctaggcagtatcatatgtatcatggtaatggctatggaaaataatatccctccctccctgcctcccttcccctcttcctctttttagagatgaggtcaggagtttgaaaccagcctgaccaacatggtgaaaccccatctctactaaaaatacaaaattggccgggcatggtggcgcatgcctgtaatcccagctgctcgagaggctgaggcaggagaatcacttgaacctgggagccggaggttgcagtgaactgtgatcgtgccattgccctccagcttgggcaacagagtgagactccatctcaa

SEQ ID NO: 1402 - DNA, 4208 bp, Homo sapiens
gcgcggcggcgactacagacgtgtcgggggtccggggcctgtcgcggttgccaagcgctcggcgcttggcgctggcgctggccaaggcgtggccaacagtgttgcaaacaggaacccgaggtgttcacttcactgttgaaggaacgagagggcatctgctaaagtttcagattccatttctgctcagtatccagtagtggatcatgaatttgatgcagtggtggtaggcgctggaggggcaggctttgcgagctgcatttggcctttccgaggcagagtttgatacagcatgtgttaccaagctgtttcctaccaggtcacacactgttgcagcgcaggttggaatcaatgctgctctggggaacatggaggaggacaactggaggtggcatttctatgacaccgtgaagggctccgactggctgggggaccaggatgccatccactacgtgacggagcaggcccccactgccatggtcgaggtagaaaattatggcatgccgtttagcagaactgaagatgggaagatttatcagcgtgcatttggcggacacagcctcaagtttggaaagggcaggcaggcccatcggtgctgctgtgtggctgatcggaccggccactcaatattgcacaccttatatgggaggtctctgcgatatgataccagctgttttgtggagtattttgccttggatctcctgatggagaatggggagtgccgtggtgtcttcgcactgtgcatacaggacgggtccatccatcgcataagagcaaagaatactattgttgccacagggctacgggcgcacctacttgagctgcacgtctgcccacaccagcaccagcgacggcacggccatgatcaccagggcaggccttccttgccaggacctcgagtttgttcagttccaccccacaggcacatatggtgctggttgtctcattacggaaggatgtcgtggagagggaggcattctcattaacagtcaaggcgaaaggtttatggagcgatacgcccccatcgcgaaggacctggcgtctagagatgtggtgtctcggtggatgactctggagatccgcgaaggaagaggctgtggccctgagaaagatcacgtctacctgcagctgcaccacctacctccagagcagctggccatgcccttgcccggcatttcagagacagccatgatcttcgctggtgtggacgtcacgaaggagccgatccctgtcctccccaccgtgcattataacatggacggcattcccaccagctacgaggggcaggtcctgaggcacgggaatggccaggatcagattgtgcccagcctgtacgcctgtggggaggccgcctgtgcctctgcacatggtgtcaaccgcctcggggcaaactcgctgttggacctggttgtctggtcaggcatgtgccctgagcatcgcagagtcgtgcaggcctggagataaagtccctccaattaaaccaaatgctggggaagaatctgtcacgaatcttgacaaattgagatttgctgatggaagaagcataagaacatcggaactgcgactcagcatgcagaagtcaacgcaaaatcatgctgccgtgttccgtgtgggaagcttgttgcaagaaggttgtgggaaaatcagcaagctctatggagacctgaagcatctgaagacgtttgaccggggaatggtctggaacacggacctggtggagaccctggagctgcagaacctgatgctatgtgcgctgcagaccgtcaatggagcagaggcggggaaggagtcacggggcgcgcacgccggggaagactacaaggtgcagattgatgagtatgatcactccaagcccatccaggggcaacagaagaagccctttgaggtgcactggaggaagcacaccctgtcctatgtggacgtcggcactgggaaggtcagtgtggagctcgttctcaccacagcccagcacccacacggccccgcccaggtctgcgggctggccttgctgatggtgaacgcggaggagcaggccagatttaaatcaactcccgacagatttgaggcaccgctgaaaaaggcactctgacagcagtcgggcttcgggctggaaacagaatccagtgcctgcaggtggttcagaggagccttaaggaagggttgctctgtggtgtgggccagatggaagtcactgggcaggagcaagtgtccaaggcctggtggcaggggaggagatgatgattgtggacctagcgagaaagtcagcatctgtgtggtggggacagagccactaccagaaaccagtcccgagccaagggagcccagaagagacccctcccctctcttcccatgggctgggccaactggaagcatctgcaggggagcagaggggatgtggtgcagcccttagcatcccctgggcactgagcaagcagagaagggcagaaatggaggcagggttggggtaagcagcgtcctgggaacagccagccgagggtgtggtaggggggttgcagcttgttccacacaagcacagcgtcttgggaacagccagccgagggtgtggtagggggttgcagcttgttccacacaagcacagttcacctgtgtggcatttccactgggcattgagattcagaaatcatgaagatagaaagcttttacccttaagcttttcataacttgtaagggagagtcgtataatcacttagctgtgtctgtggaagttacctttggactctcactatcatctagtgtgtctgtgattcaggcagtgggtcattttcagaatttatcatgaaggccatttcctgatagtatagagaggtcacacttcactcgcttagcacaagtctatttttaatgtttccgggttcaggttttttgttttgtttttgttgttctgagatagagtctcatctcttttgcccaggctgaaatgtggtggctcgatctcatctcactgcagcctcaacctcccctcggctcaggtgatcctcccacctcagcctcccgggcacatgccaccatgcctggctaatttttgtatgttttgtagagacggggttttgccacgttgcccaggctagtcttgagctcctgagctcaagtgatccacctgtcttggcctccccaacaggcatgaaccaacacgcccagccagtttcagtgatttttgaagaaatacatactcattttagaaagtacaaagagattgaaataagagctcactaaccagagatgacccattatggtttaaatttctttgtatatgtgcctaccttttcctgtgtgtgcatatttaatacacggcttgagtattccttctctgaaatccttgggaccagaagtgttttggatttcaggcttgttcagactttggaatatttgcattacacttactgtctgagcatccttaatcggaagatctgactccatagcacatttcttttgaatgtcatgctggtgctcagaaagtttcagatttgggagaatttcagatgtttggattagggatgttctacctatataaatatttactttgaagtagaaaaactggaagtagatagtttaaacatgaagtgtcttggtatagacaagggttctcccacttttcatgatgggagcatttttgtaaagcaaagcactgagaatctggtacagtgtcattttcgttgctctgttccactctaccgatctgccgtcatttacagtcccctgttgcgcatgtagatcatttttgaatttgttattggaaaatactgcagcaaataccttaaagttcacatgccgtaaatctacttttatagttaaaatttttcaaaaggaacacaagagatggctttttgtacatttttgtgcttaacttaccactgacttcttttcaaggtcactgtggaatatagacccataattgacaaaactttgaacgaggctgactgtgccactgtccccccagccattcactcctactgatgagacaagatgtggtgatgacagaatcagcttttgtaattatgtataatagctcatgcatgtgtcaatgtcataactgtctttatacgcttctgcactctggggaagaaggagtacattgaagggggattggcacccagtggccggggagcgtggcacttacctttgtcccttgcttcattcttgtgacaagataaaactgggcacagctgttaaataaaatataaatgaacaaa

SEQ ID NO: 1403 - DNA, 928 bp, Homo sapiens
tgcacacatcttcttctccaaggtttgtgtgcagaacatcctgcccatgctgacccaggagcttcagttggcacctgccccagtccagcctctgggaaccatgcagcagctcccagcggccctgcacccaccaccagcatccgtttcacctgcagttgaagatccgtgaggtgcccagaagatcatgcagtcatcagtcccacggagcagcccgcgaggctgaggctcctcccactggaccgccccccaactggcaccactgctgcccctgcccctactctcagcctcacgtgactctcgggcagaggcagtggtggggcagccagggcagcgtcaagagtctgagccagctgcaggacaaattcgagcatcttaaaatgattcaacaggaggagataaggaagctcgaggaagagaaaaaacaactggaaggagaaatcatagatttttataaaatgaaagctgcctctgaagcactgcagactcagctgagcactgatacaaagaaagacaaacatcctgatccatatgaattcctcttattaagaaaaataaagcatccaggattcaatgaagaactatcaccttgttaatcattcagaaacatattgcagacttaagccatttttgatacagatactgaaacaattactttctaagagcaaacttgaaggtatggataaggccctgagtcatcttcctgagctgaatgatagttaagctgaatgtacgtataaaatatgattttctaaccacttgctcgccaacaaggaaaacttttaagtagagcagaacctgaatagacaagacatttctttcttttggtagaaaatgatttaccatcactgtgtagttaattgtagactaggtaattttaactgtgatttattgccggagacattttcttctgtactgtaaagtgtgtgtc

SEQ ID NO: 1404 - DNA, 653 bp, Homo sapiens
ccgggaggtcccggtcccggcagcccgcggccgcgtccttggccctcctccgggggaacctcgttcattccaaactctggaaggccggctgtccttcggttactgataaggacgcgagctcttggaaacccgggcacagagaggttaagtaacttgccccagggcacacagctagctgatgtcagtgccagaattccaaccgcggctgtcggaccccatgccatcctcatgtcaacccactaaggacgggatccttctgtccatcttaaagatgaggcaactaaggcacatggaaatttaagtataataccttgcccaaggtcacctagctggaaaatggacgagacagaaagcgaacccagggctcctttctgtacgcagaacccgcggtcttggccataggcgatgccacttccgacagcccagcagggtctggccctgggtcccagaggcgcagcccctgcggggtttggatgggttcctgcggcctccgatccgctggtgaattgggtgtgtctgagcatcgtccccgctcagcccgcaggcgtaggatagggaggcgtctccgggaatctactccgggacgggtccgcggtcctcagtcgggatggagcgggggcggaggcagccggagggaactggagtccccattg

SEQ ID NO: 1405 - DNA, 314 bp, Homo sapiens
ctcattttttaggaaggaaccacatgtgaaaccacttacctgtttaaccctatgaacttgaagagaacatgtaatgccacttaaaatacctaagctcgggttctgccttcagcgactcctggtagtagtgcccttatgagccatttatcaagaagaaaccagggcacttggaatgttttgagggaggcagatctgtccccgtcatggagcactgactaccatcttccctgaactcttacgtgaggaagaacaaacctctaaggttgtacaagaagcatggtaccagcacctgcttctggtgaggcctcaggctg

SEQ ID NO: 1406 - DNA, 2261 bp, Homo sapiens
tctttcaggatgaatgccatccacacaaaagagctcctgttgacatctcatttacaatctcccccaggacacagacaagaccctttcaataaatccagctcagaaacacctattgttcaaaatcttcaactcgccacaggctaccaccactccctatggctttgcaaaattaaagatttagaagaaggatggggcggtggaagctatgaaaagaggcaggaaaaaagttcctttgacccgatgctgtcagagagcgtgcatgaagaagaaagttaatggtatttccatttatataagaagcgcctaagaaatgcctgtgacgttcgtgaactagtgattgtgaattccaaatttgatgccaactttatgtgtaaagaagctaactcctgccaacatcgtggctgaatgaacagctgggactatgcttaacccattcccagcttataaaagccccatggcagctgcagtgaagcatcagaaaagtatagtaagaagaaactgaatttgaagtggattcttacaaaggaaaaagaaaatcactattgtaactataccaaattactatgtatgtgagctcccagctttgacatcaagtcgttacagccacgtaatgggattacgggtgatttttactttattctttgggcttctctgaattttcctatattttgaaaaagcacctgcattattttgtaattataaaaaagtataaataagaattatacacactattatttcttcactgctatgacatgactagattacaatttttttctttttgagatgactttcggtcttgtttcccaggctggagtgcagtggcacgacctcggctcattgcaacctccacctcccgggttcaagcaattctcctgcctcagcctccccagtagctgggattacaggcacctgccaccacacctggctaattttagtagagaaggggtttcgccaagctggccaggctggtctcgaactcctgacttcaggtgattgatccacctgcctcggcctcccagagtgctgggattagaggcatgagccatcgcgcctggcctagattatggaatttttgtattaccatgtatgttgccgtgtaatttttgttttgaaccttttttatttttcttttaattcctttgagacaggatcttgttctgttacccaggctcactgcaacaaggtgattttcccgcctcagcctccagagtagctggactacaggccggtgccaccacacccagataatattttatattttttgtagaaatggggttttgttttgttgcccaggctggtcttgagctcctgggctcaagcgatccaccctcctcagcctcccaaaatactgggattacaggcataagccactgcacccggccttgagcatttgttttttgaaggaaattttatatgattaccacataaaaaaggaatactaaaaatctaacattatttgatatctcactgtctttgaaaacttaaggaacatggacccatacaaggcagccaaatattggccggtaactcctttacaactgggctgcagcatattttattaccttctcctgacaatttcttatctggctgcttatcatttccagaacataccatccttttgcatgcctttacgccagtggcaaacatggttgtttgcctcctcataaccattctctctatcctgcttgctaatgagaccccagtactgttgatcttttccacacagctgtgagttttaggggtggctaagcccctccctacacgtggaggctgaatcttcaccagactaccagacaaagagatgagaagggaggttggatgggaatgttctgggaaagtttacctcactatttaaagccacccaagtcagggacatcctttttcttcctctggactttgtcatctgcaagggatgctggaactgtggctgccatcgggggaccacagaaagtactggcctaagaagaccagctcagctgggcgtggtggcctgtaatcccagcattttgggaggatgcgggcagatcatgtgaagtcgggagttcaagaccagcctgaccaacatggagaagccctgtctctactaaaaatacaaaattagccgggtgtggtggcgcatgcctgtaattctagctactggggaggctgaggcaggagaattgcctgaatccgagaggtggaggttacagtgagcggagagggcgccactgcactcccgtctgggccaatgagagtgaaactccatctcaaaaaaaaaaaaa

SEQ ID NO: 1407 - DNA, 781 bp, Homo sapiens
ataaccgtccagtctacagaatatcacaggctctacttttgtgtcaatttaaaatgaggatacagaaaatgaaggcaaagggaaactgttgacaatcctttgaagtcatgaatatacaagagcatgaataagagaagaaaagatggaagataaaaagcagaagggtgctggagatataatggtgaataatgttgcaatatgcccagtcttcatggaatcaacagtccagtggggaaggcagataagtgagcatattccttctacttacagaaaaagtcaactgtaaaacagcctcaggcaggtctttcaggagatattccagaaggcattgttatcatacaaaatgatagctccatgagtatcattttccctgaagaccagtgggacaagatgaggagatggaagacagtgatatggatgatcctgaacctgagactgtataggcctaggctaatgcatgtgtttgtgtcttcgtttttaactaaaagcttaaaaagtaagaaaaataaaaataaaacatttgaaaatacaaaaatcatatagaattaaggacataagaatattttcgaacagctgtacaatgtatgtgtgttttaagctaaatgttattgcaaaagagccaaaagtttttttaaaaagtttataaaaacttacaataagctaagattaatttattaatgaagaaataatctttgtatataagtttagtgtagcctaagtgtacagtgtttataaatctacagtaatgtcccagaccttcacattcactcatcactcactc

SEQ ID NO: 1408 - DNA, 3907 bp, Homo sapiens
gattctgtcgcgaaccctctcacggcagctatgagactgctgcgctccccagacgaggaaacctggtctcccggagccaggtggagtctcgctctgtcgcccaggctggagtgcggtggcgcgatctcggctcactgcaagctccgcctcccgggttcacgccattctcctgcctcagcctcccgagtagctgggactacagagtcttgctctgtcgcccaggctggagtgcagtggcgcgatctcggctcactacaacctctgcctcccaggttcaagtgattctcctgcctcagcctcctgagtagctgggattacagctctgggacaaaccagcttctatgtcatgagcacactcaggcagctcattggagagatctgcatggtaaagcaatgaggcctcctgccagcagccatgtgagtggcatcttggagccagaccctccagccccagtcaagccttcggatgcctgcagccctggctgacattttaaccacaacttcatgagagattctgagccagaatcacccagctaagctgctcccgggttgccagatcaatccacagttctccagggacccattgtggttttgtgcttcctctgtgcctgttctgctcctctccatgcaccccagcccctcccagtcccctcaacggtccttctggccaggcccatagccccctctctgccccacagtcctcaggctccagctttctcgttaggaagtgttagaaagttgctggagtgagaaatgagcctgtgaaactcgttgtcctaattaaacttccacaaggagagtgacaagaggcgacggggaggaaacggtgccaccaccaaggtctcagcctgggcccaggtcgaggaaggcctttgtcctgcagaacaaaagccactgtttgcacgtgttaaacttcatcaaacttcaacagacccaggtgcaaaaccccacatcccaaatgccatccgggcttatgccaccttcccgagcatggaccgtccctagccgtcaaccctaatcagggccatgccctacatcaaagctgcactccctccacagacagcttctgctctgagatgcattgttcctatgacttcctacactccgcccttgtctgacgaattagggcacggagcccccccatggcacagctgggccctgctggcattgttaatgaggtaggaagggcgcgtttgtctgagcctgggactaacataatcacataaagttgttgctttggaatagatggagctgccccagagtcgattttcttggaagcaacgcaaagcacagcttcctgggagaagacacaatgcctcctattgtctctgccacttcccctccagcctcccagcatttctgcgtctcctcgggagccactgccctgtgcaagagctgtttgctgatgcccagccgcggcttccaaaactcccgcgagaagtcgtttctgtccacagtcattgtttccagaccagccgagccaactggggaggagaggccaagcccagggagagcagtaagaggcccagcttgcaacacaggcccccggcggctggagtcggctcatgggttgctggggggcagctggtgccagccctgctagacatgtccagggtcggggcagaggccagggtggctctcatccacaacgaggctccaggaagaggctccagagggcccaggtccctggaggaagacagagggtggattatccagtgagtcctcagattgctccagggagactctacccctaggccctcatcctacctaggactgaggcagccatctgggtctctgcttccctaaccacttcctcctccacccgaccatcacctagtctcaaggacttgggcagcttctggaagtggctgagactggaagaatgttgtcacacctaccagatatccctacgtgtatctctaccacccccactacatattctgaagaaccaaggtgagctgggggaatccccaggccagcagggcaaggcctgggcaggaatggagtgaggaagtgagaagtggggatcttgggggtgggcgggctgtggggctgggctgtgctgcacactgggcaggaggcaggagatggcaatggaagcgacagctccccatcttccccggctgcatacgtgagggattctgctgcattcactgagtcaccaaaggacactggaaggccatcaggatttttgggtgaccaagacatggctcccctcttactgcctgtggggagacaggcatgtgaacacccaagtctaacccaagctgagttgactgagggccatttaaagattccacagaggctgagagcagtggctcatgcctgtaatcccagcactttgggaggccaaggcaggtggatcacttgaggtcaggagctcgagaccagcctggccaacatggtgaaaccccgtctctactaaaaatacaaaaattagccaggcatggtggtgcacaccagtagtcccagctactcaggaggctgaggcaggagaatcgctggaacccaggaggcaaaggttgcagtgagccacgatcacaccacagtactccagcctaggtgacagagcgagactccgtctcgaaaataaacaaataaagaaaggttccaaggatggtctggaggacaaacaaaggaggagatttggtgcaggagttaggacaaagactcctgggacagcagccctcacttggggccatagtgaatgaatgggggccttttgcagaagggaaatggaggacatgtgtggtgaaggctttgctgaagcatctcttataaaaggggcaaaagcacttgctctcctcccagctctggctcagcctctctctcttcaagtccctggcatccctggaaaaccatgatttttccattctgcagccagcccaggcacctcctcccacccccgcacactgcagtctggtgtgtgtggtgggcacacatagaacacttgctggtcttgaaaatgaagccatcttttggggcccctagaaatcaaagagacccacttagccaagatatcactcttggacaccagcaagggtgagatcacttgataggtattttgccgtgtgtttctttttaactatataaaaaacaaaagggtggatgtgcaaacccaacccaagaataccttggctcaggctcaactagatgaaacttttaaaaatgatttaatgttatgttagactgttgcatattaaagcgatgtaatgccttctaagaaacgagagtcagatcctgaaagcgatgacttgggtaaatgtaaggagttataactcacttttcaagagagcaactataaacattttgcccaatatgtacagacctctaatgacagtgtgcaaagactctttcgttcccagattatgaggctgccactttctcctccccttcctgagccgcacttttctaaacagcaactgtcggggcagggggatgggaagctcatgagagaaggaaatatttgggaccgtgtcggccagtggaatggggcttgtggtcaccgtgttacagagtcaaatcacttcccagtaaacaccagtttccgatggctctctggccagggttggccggggacaagcagggagtatatgtgtcgggtacgttgcgtcacaagctgtgcagctgtgtaggcctctctgtccagaggcattaatggaaaatgattgggcacccagcccacagcagatgcgctgaggaatccagccagggggagctgggatgcagtgggagaggggacacgcagggcctggctgagaagcctcgcgaggtaaccacaggcggaaatctgaaaaatgaagacgttcccaccagttccagaaaacagggctaacttaaaatgcagcccctttccttgaagtgggcttggcaggccccaggtgttgaaaggcaaaagaaaaaaaag

SEQ ID NO: 1409 - DNA, 1122 bp, Homo sapiens
acatacaacactcatacaacacacattcatacaacacaacactcatacaacatacaaaacatacaactcacaaatacatgtacaacacactcatacaacacataacactcaaacatacaatgaatgcaactcaacacaacatgcacatacaacacacatacaacccatgccactcacatacaacacaacacgctcatacaacacattcatacaacacatactgtacagattctaagtatgaaatagaaaacagcacatgcacagtttctaaagtatgacaaaagcttttttcaagaaggtcatccaacatccaaactggtaacatgtcctcattttcagctgctgttcagattcaagcatgtttatcatctgctccatgaattacaataatatagcataaacccttttttcattttacacccactttggtgtggggtgctccaaaacaggggccaggagcctcagtcatccctcggaacaaaacacaactcacactcagaggccaggaagggaactcggggggcgacacacactctctcatctgcagagctctgcttcaattactttacatgtaaccgcggctggaacggggttggtgacggtacagacacggcaaactgaggagaaattggcaggtggagaaagatcagccagaatccaaggaaaaatgctgagcattttccacaaatagttcacacaacggacaatagttgggctactgaaagtttattgagaggggtcttgctccaaagaaaaagttctttcccaaggttatcaaagactcacagcagaccccggcccccaacacaccatctgcagagggcctgttagtcaaaaagaagacaagacagaagcaagggggtgcggggggaggagagcaagaggggaccgagaactcggaaccaagtgatgggcagacactgaatgcctgactccagggttatcgcctcagaaaacaagtccgtttaagcccgtggtaacagtgttagcgctttcactgaacctgcactcaacactggagaacctccctgcattatgaagatgagccgaaaaataacattaattcacaatgtagagtgatgattcagccacagaaaataaaactgatataatccactacaa

SEQ ID NO: 1410 - DNA, 599 bp, Homo sapiens
ccagctcttagtgactctagccctctcccgccctcctctgcaccctgcatgcacttgtgttgctgaatgtggccggagaaaaacacagccatcttgactgttctgtgagacttcatagatttccagggctgtgtggaatcaaaaaatcttcctgcatttccccagccatctggcctccaggatgactatttcacatctcctcaagcctttcacatctcatccccctcacacctgatgattttgcttcctatttcactgggaaaatgaagtagggacggggtttcatcatgttggccaggctggtctcgatcttctgacctcgtgagccgcccacctcggcctcccaaagtgctgggattacaggcatgagccaccgcgcccagccaaagagcctagaaccatgcctggcacacagtgggcatctagaccctttgctgagtggtgaaattgaagtgtgacagggtgcgtggcttccctgctcaggctccctcagttcccaaagctgtgctccttcctggatctcatgtagcacaaggaggcatacgtgggtcgcaccacatggcttctagaggagtatgtgtgaatgtgttcatgttcat

SEQ ID NO: 1411 - DNA, 2129 bp, Homo sapiens
aagtactgcattcaaagaaatacaaacacaaccagaaagtattataagtctatattcagcatttcaaatctgtcctgtctatcaaggaaacaccgaaggaggaggtaaattcttaatgcatagcagacatttaaaaattctctctcaccattgctgcccagtcactaccctgcatgtgaatgccagcttgtctcttgagttgtctctttcctattctcaacttccacccccaaacacatttagagcacaggtcttttctgtcacacttgccagtcttccttgcctgctcttattatgtaaatcaaattcaccactctgtcctgttttgttttcatctctgcttcactcaataccccgactccctcaggaccgtgttgcttctgccctgaatgagttcttttctcccgggctgcagggaccacagaggtcttcttcctattacttcatggactgtatgaattccacccagctggtgacatcatggcaggtggtttggagatgaactggtatcctgccctgtgttaaatgtcctcagactggagctcagaacttttgagtattttcaaaagggtcaccgtgtctccagagaaatgctcccaacagtcctaactgaagtcagcactgaactgggcaaaggactcaagaaaaaaagtttccttcctcctcgatgtgttgctcaaagcactgcgtgagaccacacggagcagtatctaagcattgagcaacactcagaagggcagcaggacaaatgcgtagctgctaatgacccctctcctgccaatgctttcctccctcagccccctctagggtcaccgaacagctgtaaatacaagctgaccaccctcaaggagctgggatggagggaggttttctccagtctccagttctgcctttgcacctctgtggcctctcaaatgctcagccagtattttgagtacacccaacctcacccaggagatatatgtcacccagaaacatgtgctctccagaaagtcttcctgacatcatcggggcagtcctcctccacctcctcctcttcccagcaattcgttctgcaaattaatgccatccaaacaatcctcgagaactatctaggaaaggacgaggaccaaattaccaagcctttggatctaatccatgtggcatcccatctgtgagctccagggagattcaaagttggccagtgctggaggccaatcatatttataccatttccatatggcaccttttgattgagacttggcaagcacatgatcggattggaggaagacagagagcaagacgttggaacaagcagcaggggtggagcctgggacacaaggtcagcacatagcaagcccttgctttggagcagaggtggccggtttccagggcagtgagtatttgaggcagtaattgtgatcttcagcttcactggtgcaagtatcacctgtgagaaagcaggcattgggtgtgattaattagtatgcttctttagcatatggggtgagggagggacaggggctaatttgagcagtcagggacaaggagtcaacatcagtgtggagtgataacgtttgtacaccaagctggtaaatagacatcctagttacatatgattctattggcattgcctacagaggagaaaaaagtgatcaagtggttgtggattttatgtttgcttacctgttttttaaaaaaaaggtgaataaggaactttataaagatgttggattccagcatgttagacattgtagtggattgaattttgatccccaaaaagatatgtcccaagtcttaacctcacagtagctgtcaatgtgagcttatatagagcctttgcaaatgtattaagttaagcatctccagacgagatcatcctggattcagtgtgggctctaaattcaatgactggtggtggtataagagaaaggagagagagacaaacagacccagagacacacagaggggaaggccatcagaagacgaggcagctattggagttacgcagccagagccaagggatgccagaagccaacagaagctggaggagtcaaggaaggattctcccctagaaccctggaagggactgtggccctgctgacgctttctgggctccaaaactgagtgagaataaatttctgttgttt

SEQ ID NO: 1412 - DNA, 651 bp, Homo sapiens
tggtgatggccagggctccatcctaagcccttttcccttgggaacactatggcctcattgctgtaaacaccccattgctctgatggcccacatctctgtctccagccccacctctcctgaaagtccaattctgctacccagaggccttcccaggtagagggctaaaggtccccagggactggagaattcagtgatcagccaggctgcagatcaaggttgaacttggaagaaaaccacacctggttcctggcttggagttggaggctgcgctttccgtgaacttggccgtccgaactccagctctccctggcctcctggttcccaggatccagtctcactccaccccaccctacctcacctcccaccaagctgccctggaaagagtctggcctctgggaccagaaacacgggcctgagtctaggttctgctgcttcctcactgtgggaccaaggccaagaccgtcacttagctgcacctctatttctgcatctgtaaaatggggtcataatcatcgcccacacccccaaactcagcactgctcattcgttcggccagagtggcttgggcatctgctctgtgctgggccctaggccctgcgggatacagggaacagttggacagagcctctgtctatggggtggagagagggg

SEQ ID NO: 1413 - DNA, 206 bp, Homo sapiens
ccaacgtggatacacccgggaggtcactctccccgggctctgtccaagtggcgtaggggagcatagggctctgccccatgatgtacaagtccctttccacaacgttggaaataaagctgggcctcgtgtctgcgcctgcatattcctacagcttcccagagtcctgtcgacaattactggggagacaaaccatgcaggaaacagcc

SEQ ID NO: 1414 - DNA, 1983 bp, Homo sapiens
gtcggcgccattttgtctcggcagcggtggccgtagctccatcgcattttatgtttctggcgagaagggaacggagttttcatcaggtagattggtttttgtgcggccgtcctccaccgtttcctccaggacagcacctagtcgtggccggaggagtctcagagctgtcagaaagaataagactgattttatgggaaaattaagcagatgctccagtttgagaaacctggatctgcgatctgtttgtggtctctatgaataaagaaaagcaaatagaatcttatcagataagtgcttttataagtctaaatatattctttggaatctctaaagcaaaacttttaaacttttttttttttttttttttttttaggtaccagcatcaagatgatttatggtaataaggtactcagtctttgcttaaaataaattttacgtttatcaaagtaaaatttaccagctttttttcctaaagaggctagtcatatctcatcagtggttacaaagtatccttacaattgaacctacatttgttaatcctgttcagtgtgtatgaaaatcacttggtggccgggcatggtggctcacgcctgtaatcccagcactttgggaggccaaggcgggcagatcacaaggtcaggagttcgagaccagcctggctaatatagtgaaaccccatttctactaaaaatgcaaacattagtcaggcatggtggcaggtgcctgtagtcccagctacttgggaggctgaggcaggagactctcttcaacccgtgaggcagaggttgcagtgagtcgagatcatgtcactgcacttcagcttaagcaacagagcgagactccatctcaaaaaaagaaaagcacgtcactcgatgttctttctttcataagagttgaagaactaggtatatctgcttatattatggcatctatagtagcttagctgctcatatttgggtctctttagaaccagtgtctttcaaagagggttttaactatgctggtgtaaattttaagaatagatacattcaaagaagaattcaacattcatgtgacattcatactttggaactttgggaaagtataggaatgaccatagattggcttagggatagtcaatttacctgtctgtaaatggatccaatttagtattgttcctgtatttttctaagaccaacacttgtgtcattcacagttaaatatatgagttgtggccaggcccggtggctcatgcctgtaatttcagcattttaggaggctgaggtgaacagattgctcaagtccaggagttcaagaccagcctgggcaacatagtgagatgcggtctctacaaaaaatttttaaaagttagccaagcatggtggtgcttgcctgtggtcccagctacttgggaggctgaggtgggaggattgcttgagccatatgctctaatatattttaaaatacatattttaaatatattttgagtggtaaaatgtagcagataatgttacataaaagaagccatggtaatgacatgacattactggttttgagttgtttgtgtagtagttagctattaatactcaggtataatgatttgctatttaaactacacaaatgctcaaagtccagcgataccctgcacccaaattcagtggctagattaccttcttaggaaagcacaacacttcaatggagtgacactggcatgagtccactagagggtgtgtatacatggcctgagttcaaattgttcctgctgtgagtactgcttttcagcttcaagttattcttatcggccacagtactgtttattccacttagtaacagttctgtttacagagcactttaacataaattctgatttttaacatgaaagctgtctgatgttggtatttttattttaatctttagagatcaagaaatttttttagtgacagaatagggactttattgatccttaaatccgcccctcaccacaataaaggaaaaaagcaaaaa

SEQ ID NO: 1415 - DNA, 1088 bp, Homo sapiens
gcggcgtcggggtcccatacctgatgctgttgtcgcccctgctggtaaggcttaattggcccctggtggcaacgccgcgtccggatcttgccgccaccgccccctccgactcctccggctcccgaggccatggcggagcctccgccgcttcccgctccggggcgggtaagggggcgggagaggcagaggcggaggccttagagagcctcccccgccgcccggccccggcccaaaagtccgcccgcgctgtccacacagtgggcacaagcaccccaggaaccgcgaggttgcgagcaggagcggagagagggtgagtgctggcagcggggaagggggtggcggccgcagaggccgaggaggctccggtccggccgcctctgcggacccccgcctctgtgtgtgtcacggtctctatggagatctcccgcagaggacagcacgaacagttccccgcggtgctgaggcctaactcgaccgccgactggtgggagttcttccgtcgccctagccgtagctgccgcagttgaagccgctggcgacgcccgcctacccctcccctgtgcgcacagcgcccgccccgccgccgtcgtcgtcgtcgtccctgcagcctccgccgccgttgcgcctattacccctgctaaggcggctgccgcggtcgcgagccagaatgtcgtcactcatcggcgcccgacgcatttgcatcatcatgctgcgacgagctgataggcaaagaggaagggctggtcgagtccacgctctcggccgcgcggcacgctgggaaacgtagttcaacaacggaacgcggcttctcggaaaggaagagggacggggaaggagatctccggggcgccgcagaggcacaaagccaaggggtacttttgctgttcttggctgtaaattagactttgaaaagacacttaacataaaaacagtaacctcttcccattctccttctccctgtcggttggttaagtaggcaggaagtaagcagacagtaaaatcaaagacaagagctaatgatttaagaaggaggaaaaaaaaatctgtggttgaaaaataaagtccatgatccttagaattagaaaata

SEQ ID NO: 1416 - DNA, 426 bp, Homo sapiens
ctgattttggtagcatcctttggtctcttctagtctgggagtcagagaaagtttgcatcaaaatgtcatcagggattcatttccatcatttcaagcagggtcatcttggaacaggacacaggatagccaaaaacaatccattgatacacttggtgacattaattgagaaaaaaacaatatggtctggccatggaggcatggtatccgtaacatcccccaaaggagctaaagaagaaatccacaatttaccatgagcatttctcgtctgaagattgccaagcgattcctccaggacattcctcaagatcaatttctgttcatccaccttgtcctgggagggacatcaatgggtttccatgtcctttggcttctggttgagttcactcagtggagaaccctggcaagaggcaggaaaaggggaggaag

SEQ ID NO: 1417 - DNA, 1148 bp, Homo sapiens
gcaggagcccgggaggcctttcgcccgaggcgggctgcgggctgctggggtctggtgcggagggccaacttctgggaataacctggctgtgggcttaaaaatcgtagtcattcattatcacgggcttctctctctcgaatacctttaacatttatcgccttgttagtctccacatccacctccgtgaaagagatggagtctcgctatatttcccagtctggcctcaaactcctgatcttaagggatccccagctcaacctctcccagcagctgggactaccgggctgtcaaatttacattaactatgagaattaagcaggaattctcaagggtctctttggaggcttaccaaggacatccagctgcacagtgaaggtggcttctcctgctctattcttggcaacacatgcataagcccctgcatctgaagctctgactacttcaaagatgagtgaatgaagacccttctcagacactatcattttgtgcaaatcatctgattgaactgttcttccatttagataccatgacacatcaggagctggcagtccactcacctagaaagaaaaacacaaggagatggcagaattttaaagtattgcatcactgaaacctatttgtccatatatgaatttaaacagttcccgtatctgagtgggtttgcgattgaaatgcaaagcaagagctcaaaagtatttataattttttaaacaaaacattggaaataagatccttgaaattaacatagtatttttagactgtctcaaaccataactcttttacatgcaacctcagtctctttatgaactcttaatttctatatttagaacattaatttatgttacattggtttccataaggaatatagaagtcattgcttttctggctaaatgtgactgcaaatgaagtcccagaggcacatatatatgaggcttcctgatctaatgcgtaatttttctaaaacagagtgttcttgagctatagtttggcatataaatggcaatttgttaagtgtttttacataaactgttaacagtggaatccaaagctttaacactaacttgagttcataaggaatctggaaaaaaaattttataaggaaaagttctccaaaataaggataataaaaatataacctcttctaaaga

SEQ ID NO: 1418 - DNA, 496 bp, Homo sapiens
gccccagaaatagcatatacattgcgccctaagtccagtctcgcccaggtgtggcaggagcttttacctgctcttcggcagtagccggctgccactcaaccccatgcctgactgagctgtggtagaaggattgaggccagcacagaggaggatcagcaggaaatgtaagggttgtcctcatctaatccgtcagtaccagacagtgaacatctctcccccaggatgctgagggagggtcctggagggaaggatgtggaactacagcctctgctctcaagaagctcagatctgggcagggaacatcacataccagggctgtctgtcgggggggtggagggctgggggagggatagcattaggggaaatacctaatgtaaatgacaagttgatgggtgcagcaaaccaacatggcacatgtatacctatgtaacaaatctgcatgttgtgcacgtgtaccctagaacttaaagtataattaaaaaaaaaaaaagcttca

SEQ ID NO: 1419 - DNA, 859 bp, Homo sapiens
tggcgacccgtgtcatgggagcgggtttctgttacgtgggctttagcgcgagctgggcggtcggcccggtcccaccgaactgcatagggccgtgtagccgggggaagtcagccccctgctctgagaagcagactctgcatctgtaaaaggctaagcgtgcccactggggcctgtggtcaggattggctgcagtgaggtccgcaaagcccctaccgcatcctgcgccttcgttagggtgagcagtcatggggactcgcattgtgccaccacgtagcgggtctcactgggtccgcttgtctgctcgaggagacagccggtgaggacgggagctggcctgctttgcccaggctgtaacctcagcctccgcccatacccacaatcatcttcaatccagagggttttccttgttccaggaaacgtctcacctccatgtgcagatttaatttttacagaaactgaaatttccctcatttattatctagatgagcccctaaaatctattcaataaggtttgatctttgatggaacagaccagagttgtataatgtgacagtggccccaaggaacagtttgtaggaggagattgttgtcttctctgaaaaaaacttcccagaagacattgatggttcccttaggtgccctgcagtgggtccacttccaacaggctgaagcctggatttggtgggtgagggtcctaccttttcctagataccattcagcatcactgaagccagtaaactcacctcctgaggaaccgttaccatctgtactatttacacccatggcatgagtctgctgctcaagacctttgatgagaatcttgaaaaggaaaccatgaattgctggagaaaatatcttt

SEQ ID NO: 1420 - DNA, 641 bp, Homo sapiens
atccataatggattcctgggacattttcagatctccttccagcttcctcttcgccctttccaagtccgcccgcagtttcttctcctgctctaaggaaccctcaagctgagaagacacacagagacaagggcttgctctgttgcccaagctaaagtgcagtggtgtgagtgtagcccactgcatcctcacactcctgtgctcaagtgatcctcccacctcagcctcccaagtagctggaactacaagatggagtctcgctgcgatgcccaggctggagtgcaatggtgcaatcttggctcactgcaaccttcgtttcccaggtttaagcaattctcctgcctcagcctcccaagtatctgggactacaggcgagcgtcaccatgcctggctaatttttgtatttttagtagagatgtttagtagagagtttcaccatattggccaggctggtcttgaactcctgacctcaagggatccgcccaccttggcctctcaaagtgctgggattacaggcgtgagccaccgtgcctggcaatgtttgtagtttctttcatgaatttacctccttttattctttaatccctgcttatctctaaagagtaagtaactgaaagtaataaaacggaattttctcaacaata

SEQ ID NO: 1421 - DNA, 3539 bp, Homo sapiens
aaatgttaaggaggcttatttaaatattcagggcttcaactaaagatctaaccactaagatcaaaagagttatttaaataaaagttgttgagacattttttcatctgtattaataatgtggcttttgaagttacccggtaataatgtgtccataatgcccacacctaatttttaatttccattttggctttaggtgtggctttattttaatagctgccaaaaagttggcaattgtttttacgtttagaacttcacagtttgcttttctgtaggtttaggtagcattggggatattcgtctaataaaaacttttaaaatttctgttctgaccctgaggcacttaaaaaaaactcttatgggccaaattttaaaagtagagtgtctctactactgcataaagaatttctataaaagatgaaacatggagctgattgaaagaatagacggcgcaatggtagaggacacatagttaccactgtcactggtaatctacagcttgatgcgaagtcattccgccttgtttgttgaaatgttaatcatttcattaagaaaggttaagtaattaactgatatttcattagggaatcaatgacagacctttttttagtgatgtatggtagatattttctaatagaaagtttgccccatttaattatttggaaagaagctagttgattgagccttgggaaggaggggtggggcatcttcagataacatctatgtccataagcaactttaaataattttggagaaaatggtctattagaatagaaaatcgttcagtccccagttttcttttatgggctccatcaggcatgttgttgcagacctgctgttgttttgcatgccttctctgggtttaagaagggttcagctgcttaaatgtgttcatcttattttctaaataatggcttttgttgcagtgtgatgcatgttgacagtaaacgcgcagccgtaactttggcacaaaaaaggaacaaagagtaaatcagtgagcacccatgtacctgtagcccggcttaagagagaagacgctgctggttcaggtaggagaggctcctggaatatcccatcctcatcttacctctgtccttctttcctagaggttactttaccactgttcgcagctgggtggttttcatcttgtgtagttcttcatatttttaatatgtatgcatgtacaggattcctcaaaatacaggattttgttttgcacgttcaaggtttgttctgatagcatcctactatatatgttttttagtaacttgcttttttaaaaaataaacaacagtaaaattcatccatgtggatacatgtagctatagcttattgatttttccatgtgaaccttttgaaatactggatattaattcaagacaagttctttaaatttgagcctaaaacccagtagcactctgtacattgaaaatttcagattcataagaaaccatcagtcctgactggaacttcataatttgttcatttgtctgtgttttgggggaaaaaactttaaaacctcaaccatttatcagggaatttgattaaaaaaaataatctatcaagtggctgatctcttacattaagggaaaaaacaggcaaagcattcatttgaaggagcctagccattttctctttcttatttaaagacttggcttggaacttagcagttacatatgcagggtagcgagttaaaaagccatgtttaattaacaggcgctttatacttctgtatccttgttatgatatagcaccttgttcttcagtgtagaaagtgatttctgcatattttaaaggactggcatctttatggtaagaaagccatataaataaagatatacttagatgaaaatcggaacatgtttttaaaatagtgtgtgtctactttcatctctgttatcaaacttgctgcataagccagagttgatgctctgtgattatgctaatgaccaaaagaatcgatgatgcgagactagatgaaatcagtggtataatcggggaaagttatcagtttttttgtcattaagtattagtgataaataatacactgttcatttcgagtggatagaacatatttaattctgatgtacagagtttcattttagtcaggctcattgctgagtaaaatgatcatcttttgtaatttaagaggaaagagaaaaggcatttttgtcagcctggctaactgacttgggccatctagaaatgtttaccttgaccagccagggaagattggaaaaacttaattttttttcctcctagacaacttgcttatttgtactgacattttattaagaatatcagatactcagtaaatagcataaatgactagagatgttaaacaaaatgagtataaaggtagatagtgtttccctgaagaatggggaaaatgataacaaaggggcaatgtttggataatgctctttttaaatgactagtctgcattaaccaggggctattaaagtcggtatcacccattagacagcagttttaattttttttaattgagtttttcatatcaaataagatcatacttagtaatggtttacttaaagagaagtaatacttgtaacttagaatcttttcctgggttactaaaaccttaagggaaaacactgattctaccttccttgtcaacaaagcgtttctaacacaattctctgtaacagacatttctctgtggatagagtttagcacttgttttactactgtatgacagtacctggtgacaagagagaaaataaaagaataattagcaatgttctgtaggacatgaaaagtgattgaagtctacgagagaaggaaatcagatcgatgttattttaaaaaaatgcatcacaaaaatgattctcttcaaagcaaagcctcctacccaggctggggccagctgtgctctgccatttccctgccacagccctgtccgtccacgttggctcttaccagcagtaccatctgctgctccagcagtggccttctctatggtaaggcaggccaattgggtcaaatcttgtgatatggcagatgtccactgagagctaagattgggccaggctcatttttatgtgtgtccaaagccaagatttcaacttggtgaaaggctgtggaatttatttccccaagtgttgcccaaactctgttcttttcttcaactgcctccttgggctgagatgattgcttaatgctcttaattatgctggatccctctgtattttcgaacacctgtgggtaattcagatcatgagtggtcacagaggctggctcgacaaacggcttccctttccgaatgggaaaatcccagggagctggaccatgcaccgtgtgtcagggagctgagtggaggctgaaagaggatggaacacttcccttgaacttgaactggcattgtgttgtgtccaagtatccttcacccttggattggggagagtcttacaatgaataactcagaaaaaagttttcaaaataatcctagattgtaagatatctacgaccattatccatagccatatctttaaaaaaaaaaaaagaaaagtagaaaacaagaa

SEQ ID NO: 1422 - DNA, 7070 bp, Homo sapiens
agaggagtgtgcggaaagatggagttgagacagaaacttgttagcataacaccgaaggagttttgctgtgagtagcatcagcatagcaggagaacatccctagctctcctgccgctgctctgccacaaggagagaaagggaaaagcaaattcagcaggacctctaggactttgctgtagatctccaggtggagccaggaccctccaggagaactgatggctagaaaagactgcaagtaatgtggaggaaggaagaagagagagagcagagagagatgattcttgcaaacattgatctgtgtagagcggatgtcaacttgatgggataagacctgggttgacttggtatctgggttcaggtcagcaaactctaacggcatttccttctactagcagacagatctgctcatcctgcgacattgtggacagtgctgaatggcttccagaacattcctcttatgtctactggttaaactttgaagcatctgaaccatttgggagagcagggacccccatgaacaggagatactggaggtgtctgaggccacttcatgccctttctcaagagtggcctgcaggtctttcagccactggccactgaagtccagctcctgccagccatggatttgggcactgggctccagtgttgagaaagttcttgacttccagcgcttgttttcctagtggacaataggagtcagagacagagagggagagtgaagatgcagaagacatatcctttccattgtgacccagataagaatgtagccggtgagcttgcttcctgtcactcatttcccagctatttgttgtagtccaagttgtgcatattctttctgttaggttcttatgtttgtcttaagctcacccatcttttcttcttccctcattttttctttataaatcaagaaaaattctgccactttctttccctggctcactgcacagccaatcaataattttgaatcctttgtgtatcaatttctactggctattcattatttgtggaaaccatattaacgggtccataaaaatcacagcaatccatttgttaaattcatcataagaacagattacatctttctggccaagtttcatggtttggtaatatcatattttggttttagaatttataaggtgcattctcccatacttttcaagtatattttttattcattgccctctctgaattaggcatttttggggatgcacgttttacagatatggagacaatggttcagagaaatcagcttgttcacagtggggccagagctgggacctagggcttctgactctatgtctcaggtcattcctatcacacacacactgaaggagaaaagagttcccttgtctggagaagacatatcaaattcatgcgggttaaacacagaaattccaaatagctgtagtttttgtaaaaatggttgagctatggacttttaaagtagttggccacctgtggtggtgggtggaagggagttagggcaggattgttgtgcttcagggaggattcagtgtctgcacgaccacggaggggggtgcagggcaccaggtatccaggactgttgtcaagagttatgctttgaatttcccagagaagacacactgctgcgaaaggaagaaatcgttggtttttctccaactgcttagctgttaagaagcaagaagcctatctccaaggcagcagcaggcctcagagaaaacagtaggacccttccttcaaacaaaggagaaaactcccacaactcaaagcaagtgccccctggtcattctctcaaaaagctacaggctccaaaaaaagacagacttcacaggctagagacgggctctgcactcagggttggtggtcgggggcacagagctggctgggcagggccagaggggaccacattctgccacatgcagagcaaagcagtatctttctattactggtcaatgtaatatgagctgggaatgagcaatttcatacctttttctgagatattaaaaagaaatacgctgatgtggctggaggtaatttcccaaagcctgtggatggagttgatgtcagtaactggctatgaggttgttatttacaggactgtttgatcccactgaagtagtggtgcttaatatgtagctcaatgtggctcaggagcgaggcccaatactgcatataaaccaccatcctgcaatttatccagagagcatgtgggaggtgaaccttgaatcatttgcttgatggatttttttctttccttggaaacagaaaaacgaatctcagttttctccctaagccttaggcaacagggctccttgcaagtcaccttcccttccttgtccccaaaacaaagatgcatacatgttccccgagcactgcaaacacagcctttctttcaggggcagctgggtccctggatccgctttccctcccctgggctggtcccagtgtaaatcatcagatctccaggtccactcgtctgcacacaggctgctttgtaagtgggagaaagaatccacagaactttacactaaatccccatgggaaccaggtgaataggtgtgtgtgtttgcacacaagcccgtatacatggcaaaccaatccaagagatggtgaccgatgggtccataaagactctggctggcaatgctgtcagcttccttcagctgagcgtcagttagttaccctggtagtctcaaatgtctccttgtgtctggagacaacatagggcctggccctgaggactgccaggctgggtcgcccggcagctgcacctgttgtaggctgggtaggccccctaaaatgctttgggcagcccaagagtgtcttcctgagtcatgtggagctgcctcaccagcagcccagtgagagattcacagccctagtggagagtggaagccctgggctatcccaagcaatccttgcgtctgtggggctggtgccgcccctttgcgtctcttcttgcagctaagcagagctcagaggccaggaaaaaagccactgggtgtctttggaaacagctgacctgattttcaacattccctttgagcatttgctaaaggggcaccacagaagggcattaaggatgccaccgtggaaggaagctgcagatgacagaagcgtgagcactgctggaaaatgagaaagctgagttgggactgcgtgccatggagaacctgtactgtcaccctccccagccatctgactaccagcagcttcagcagcatcatcatttgcattcattcatctcttttcctcactccctccctcgatgaatctctttgggaatgatcttcaaaaactttgcttaggtttcaaggtgcttttgattcactgtatttttctttaaataagccttttaattgagcacaacgttcatagagagaagcgcacacatcctgaggggtcagcccaaagaattttcagaaagtgaacacgtgagggtggcaagcacctggactaggaaccagaacaccgccagcgccccagatgtgcccttttagtccacttctagtcactgtgctcccatgagggtgctcaccctaccctctagtactgacattgatgttgcttatttgtgaacttcacttgaatgaactcatgcaacagcgtgtctgtgaggttcatgcacgtttctgaacgtgggatcgctgaagtgtggggttgtattcgaaactgtagtttgcactcaaagaacagcaagtggaagaaaattactttggaaaggaattttcaaatcgagtgtgaatgagagggtctttgggactttggcctttggagttgagctgacctaaaggtagaaggtgaactaggatcctcttagctccccactccactctgaactgtgctcccagggcaatccagcttctgctctcttttactactacttcatgtaatgataaaaattatgtcaggttaaatatcagtaattgcttaagtgagtttgtatatcaagctgtgtagtaacgcctcactgaaacactgctcagctgagactgagattcagtgtgttgacgaaaagagttaaactctaacatatttgaagagatttattctgagccaaatatgagagaccatggcctgtgacacagccctcaggagtcctgaggacatgtgcccaaggtggttgaggtacagcttggttttatgtattttaggaagggatgagacatcaatcaaatacatttaagaaacacattggtttggttcagaaaaggcggaacaactcaaagtggggaggcttccaggctataggtaaatttaaacattttctggttgataattggtagagtttatttgaaggtctggaattaatggaaaggaatgttcaggttaagataaaggactgtggagaccaagttttattgttcagaggaatctctcagatagcagacttcagagagagagcaggttgtaaaatgtttcttataagacctaaaagggtgcctggctcttagttggttatctcctgggtctggaaagaaaggaaggaaaacaaacggggaaggagattctctgtagattgtggatttttcccacagagactttgcaggacaatttcaaggcatggcaaggaaatgtattttggggtaaaacatttcgattttcttccttgttatgccagagtcagattggaaagtaagtcactatatacagggtcaaataaaacccatctgatgagaatttatggtttgtagggtatgactccctagaccccttagataggaatttgggcaagataaaaaaaatcagatcttagtcctcaagtgtaaagcagatcaattgagaatccaaatctgcagggtataaggtcagacgcagtcaaccgatgcatgaaccaagaagcatttatagaagcctctggcgcttttcctttgctcacctctgtccacaggctctgaactaattccttcatttttttttaaatttgcaaataagattactgtattatagatttgaagatgcacccaattattttataagcttttttttatgtaacactaagaaattaaaaaaatgctgaaggtgcagtctagtaggagaccctgcagctgaaatgctgaagtcattctttgtgtgcaggaaacaagaaaaaagcctgccatgcagaaagtcactgagaaacctgctggcctccatggtggcacgtgggggagggaggagaagaaaactcctgaaagaatgtggaccacacagcatgctctggtgggtatgtgggctgacaaagaacagggagcgctaacagtgaaaatgaagagcctgccccgcctcccagcgtggaccttgacctggggccagaccaaggccactttatagaaacgtccctggagcgtgtctcaggtggccctgcctgcatcctggcctacctctggggcccttcttacccacagtcctactttccacccaccttgaccccaagaggtgttcatttataacgcccctgcatcttctcaacttcaaagtcagctcggacctcgttcacccagacaagaccttggctgagtcttgacaaactggcacagggtcccccgacagaagacagctttcctttctctttgctttcctttatcttagccgagtccggcctccccagcactcttttccatctggggacagttcgtgctggtgggaattggcaggggcacacggtccagacagagacaactgaaacacaggtgtcccgctggtgtgccagcagggcggccgtcctaccaggagcaggacactttgttggccactgcccatgcaataatcagcgtgggacaaacagtcccatggggagtgaggtgatgtgaagaaaaggaagccgaagaagagaagaagctgaagggccagtaaacacacacatagacgctcaccctccccttcgttggaaaaatgaacggctgctgttgccgagggctggtgaggatgaggccccaggcctgcaggagggcacatccggttggccgcctcgacggggccatctgggtagctgctgccctttgcatgtaaataaagctcctcaaagccccatttcacaactgctgggagaaacagcatccttccctccttccctatatttccagggaggaggtggctggttttttttgttgttgtgttttttttgtttgtttgttttgttttgttttgttttttccagatttctcccagccacatccagcttcttgttctgtaatttttttttccaaattactgactgccttctttcaaggggaaatggaactcagaaagatgggaagatacatgataagagcacttaagagagaagcctgtccatttccactaaggttgaagtgtgcatactccaggatccagtccttcatgtctacacaaggagtcccaggaaaaggtctgtgcaaaacgtttgtaattgcaacggagcagccacgacctagccctccttcagcagaggaatgaataaactggtttattcagtcaacgcagcagttaaaatgagagaattagtgatgttgaaaggaaaaatgaagagcaaacagatacagtaggaagttatcacgtacatttcaaaaacattcaaaacaaccgtacatatttatggattcatgtaataatgcagtaaaaatacaaaatcagagccaggactgtggcacactgaattcagcacaatggtcgtctctaaatgtgggttcatgtgggaggaggtgaccccggggtgggggcttctgctgtatttgtcatgtttgggttatttgaaagggagagagagcactgtagttatacagtaaaatgcaaacatattttttattttagtggtgagtatacaggtgtctgttgtgctgttttctgtgtgtttgaatggtttcataatttttagaaaattaaaccatgaggtcggatatggtggctcacccctgtaattccagcactttggggggtcagagcagaaggattgcttgaagaccagcctgggcaacatagcaagattctatctttacaatttctaaaacatttttcaatttaaaaatgataaacaatgaaaaactgcaaagaaatagattgaaaagttcacagttgcttttgccacattttgtgaatatgttatttttataatgaaaaattacagataa

SEQ ID NO: 1423 - DNA, 674 bp, Homo sapiens
cctcgtctctactaaaaacacaaaattatccgggcatggtggcacatgcttgtaatcccagctactcagaaaggctgaggcaggagaatcacttgaacccaggaggcagaggttgtggtgagccgagatggagccattgcattccagcctgagcaacaagagtgaaaaaaaaaagaaaaaagctcaattatgtgtctcaaaaaaaaaaaaaaagaaagaaaagagctaaattatgtggtgctttggaagctgggaccacatggactcttaagagggatggcaccttctaagaggttccaagggcggaaacaaggggcagttccactgggtttcagacacagagatcccagcctggattgtcgtggaggatgaagctgctccatcttggatgctgatccgccatgttgtcctctggttaacccctgttctggaatgcctcctctaagattgccactttatctactgtgaccttaaatcctgctcttaggtagattcacatagcattctgcgcctttccctgaggggttgacttcagtggtgccacacatttctactgaggcatgtgtaccttttgcatcaggtatatcagccctgggactcggggataactgactgacggctgcctggcttctgtttctaagttgctattaaatgtttctttctgagaaactgga

SEQ ID NO: 1424 - DNA, 3444 bp, Homo sapiens
gaggggtgctgggggcttgatgccaccaaggaccccagaccaagtcatcttttttttctcgctcagctttgaagggaagttaaagacaaagaggaagaggctgtatttcattctcccagatggctcctgccagcctccagagaaaaggcagctttcttctttagaaaattggcaggacaaaagaaggaagtcgacttggaaagtccagcgacagacctcgtgcccctgctctgggaggccgcaggtcaatggctccccctggcttcaggggacacagctcaagcctggaaggagcccatggccagcctgaaagccttgctcacacccagcatccgcagctggggcaagagcggctactcccaagacaggaaaagacacacagcctaactttgccactgtgaagggagacttctctctaatgcctaactagacacttatcttccaacctcctcaaaatgccttcaatagaagtcccaggaagacacggagccccagccgcccactgactcctacaggatgcagctgcgccaggcagcccatcccagggggcccaggccaaagaggggccagggtgcttcccctgagaatgaaaagggatgtcgggtagagggggagggtgatgtgggactcgctggtggctgttaaaggagctcgcgtctcggttcctgcaggaaaagtgctttgagcactcgcctggcctggtgaagaaggaaggcagttggcgggcatttttggaagctctcaccccccatgctggtcctggtaccccttctccagggatgcggggcccacattcatcacagtggggttccatagatgatggtcctgtcatatcagggttcccattgaagggggccctttttggcactttcttttattccattagtctgtttgcctggtcacacattttattgctttttcccgcaaaagaatcaatgtgggaatttatttatttatttattgagacggagtctcactctgtcacccaggctggagtgcagtggtgcaatctcagctcactgcaacctccgcctccctggttcaagcaattctcctgcctcagcttcccaagtagctggaattacaggcatctgccaccatgcccggctaattttttgtattttttgtatttttttttttttctgagatggagtctctctgtgttgcctaagctggagtacagtggcgtgatctcagctcattgcaacttctgcctcccaggttcaagcaattcttcctgcctcagcctcccaagtaggtggaattacaggtgcccactaccatgcctggctaatttttgtattttttagtagagacgggatttcaccacattggccagattggtcttgaactcctgacctcatgatccacctaccttggcctcccaaagtgctgggattacaggtgtgagccactgcacctggctgattttttatatttttagtagagacgggtttcaccatgttagccaggatggtcgcaatctcctgacctcgtgatccacccaccttggcctcccaaagtgctgggattacaggtgtgagccactgcgcccagccaggaatttatttttaaattaaatttgatttatttagtttcctaacccttttattgtttttaggcaattttttgaagtataatatgaataagaaaattatggtgaattgttacagcatcgagacctccaagaccaggacatagaacaatcccagcccccagaaacctccaccccataaggctccacaacccctcttctaacacacagattaccttcagctcttcttgaacttcatataagtgtgaaactcacccatgctgttgaacacagcactgtttcattcatgtaagcggccttatagtattccattatgtgaacgcagtttattatccgttctgttaatcacagtagtttttacctgttgtgagtaagggtgtcacaaacagcctcatgtgtactttgtggcagatggaattcttgtacagatgtggaacatacactggatttgaagtgctgggttatagagtatgcacatgctcagctttatcaaacagggcttaacagcttttcagagtggctgtgccaactcacactctccaacagtctatgggagttccagttgccccacacccttgccaccacttgcaattgtcagctgtaaattttagccattttgtcgggtgtatattggtattttattgtgtttttgatactcgttgctcccgcaatcgttgaagttgagcacggttgtatatgcttattggcaatttggatactgtctttgcgttttcaaaaattgggtttttgtcttttattgatttgtagaatttctttattctgaatttgagttcttagttgtgcttgtgtgtgtgcacatagtaaacacacacacaggttaaaataattgggagatcattagaatgagatgaccccagcgccttgggtttcaactcaagcaaaccaaagtccatctcagtgtacatggttatagttcaggtaagcagaaaccaccggctgatctctaacacggggcttttgactggaatgatttctttccctttctttctctttctttctttctctctttctctctttctttctctctttctctcttcctttctttttttctttcctatctttctgcctttctttccttccttccttccatccttccatctctttctttttcttttctctttcttttctttctctccctctctctttctttcctccctccctttcttccttccttccttctttccttccttcccttcctccttccctccttcccctccctccctaaaattcatagaataaaaaaatgcctgaatagccaaagtaatcctaagcaaaaagaacaaagctggaggaatcacattacctgacttcaaattatcttacaaggctatggtaaccaaaacagcatggtatttaggattgttttcccaattctttgaaaagcgatgttggtatcttcataggaattgcattgaatctgtagattgctttgggtagtgtggtcactttcacaatattgattcttccaatccatgatcatgggatgtatttccgttggtttgtgtcatatacaatttctttcagcagtgtttgctaggtctccttgtagagatatttcacctcttggtcaagttatttctagttattttattttactttttgcagctattgtaaaagagctcgggttcttgatttgattctcagcttggtcattgttggtgtatagcggtgctactgatttgtgtacattgattttgtaacctgagacttcactgaattcatttatcagcaattcattcatttttagaggatacttggtccatgcacatgtcagagattgttgtaatgtttctttcttgcaatgatctcatcacattttaatcacaaagtcaggctagtcttttaaataaagttgcaaagcattaatc

SEQ ID NO: 1425 - DNA, 655 bp, Homo sapiens
tgggcaagttagttgctccaaaaacaagataaaatgattgagttcttttctcaagcgggagtcggagtttatctgctctgagggtcatccaactaaaaaatatatatatcttgaggatttgcattgatattcaatatcgacatatccaaggcctccctccagaccactagattctagtaatttgaaccggcttctcctctccctcaaagcagctctgcttagtacagtgcttggcacaaagcaaatattcaataaatgttagccaacgttagctgctcatctgctttccttaaaagccaagtcatttcaacaaaccacccctgaggccccaagacacagaagaacagcatccagtccaagccttctggtgcagagccccagcagctactattaatgagtgtctggaatatgttcctggcatttcacctaccctctctccaatccttccaagaaactcacaaagcagggctttttcttgaacttctcttcctcacaacagttaaatcatccatttaaagatgtcaaacaacctccgtgttctaagaactatttactgagctctacggagacacagctacaagcaccacatgctggacccctgaatatggagggccaactacactagaaacacacacgctagctgagaaagatggtg

SEQ ID NO: 1426 - DNA, 557 bp, Homo sapiens
gtgcgaccggctgagctctggggccacggtggggtgtgtccagccctggggtccccacccccttgaggttatgagcgcccatagggaagatgttgccactgtacgcagttgggagaagaaggacctggcacatgaggaagccaagtagttggatcagccctgtaagctcctggcactgactgccctgcaggggcgacaaccccgtgcacccacactggggccctcacgaggctccaagaaaatggctcaagggagcagacagggtggtttgaccccagagttaagaacacaggttcagccaatttacttgaccctgagctggtgtgacccacttcttagggcctcagatcctcagttgtaaaatgggcataccgctggccctggccctcactggggtggcagggggcatccggtgattcactccatgacaagagccttgctcataaacagaggctattagagagccacagacaccctgacccccagaggcccagaaaggctggattcacactcagaagtgaggccttccctgggtgacccacacacagcagggtctg

SEQ ID NO: 1427 - DNA, 712 bp, Homo sapiens
cacccagaactggccgctcagttttcaggttttaaactgccgttgacttgaaggttgagtttcactggggacctacctctatctgcctagtaatctgtgtctcctgtagctatcatcatcactgattttctacgtacagatttcaattccaaacaaaaatatatgagaacgttcatttctccatacaactgcatcatggatggagatggagcccattatttgaagcaaactaacacaggaacagcaaagcaaataccatatattctcacttataaatggcagctgaacaacgaggacacatggacacaaacagcagaacaacagacaccaggagctacttgaagggaccggcgtgagagtatggaggctgaagccatagaaaggagaaattattccagctgaggccaaaacatgaaccaaggctgggtcattggccttatcccgcaccgaagttgaaacttacaccatctgttcacatcatcagttcttctggttctcatgcttttgaacttcaactggcacaattccactggctctccttagtctccaggttgcagatggcagattataaatctccttagcctccacctttataatcctaactattactgacacctctttgaggacaaaggaagtagctttctgcaagccaaaaagacctcagaaaaacaacaaatcttccaaactcttgattttgactttttgcctccag

SEQ ID NO: 1428 - DNA, 762 bp, Homo sapiens
gaggaggcgggagccgggaaggaggggagcctaggcccggcgtggggaggccggcaggaagggcctcgagcccagtgcggacctttcttcagcctctgtgcgaccgagccgcgcgccaggctcctgtgcgaggaggacgcgctgactccctccgacctgggctccgatggagcagaaatagcgggacctggacttgtggcgcgcctggtgccacatctcgggctctgcgagcgtcctggcgcgggatcctgccgtttgcatccaagagaggggaggacaggggcaaaaggatgcagggaggctgctgatttccactgaagagctaatttcctgtgagacattaacagtgatttaagaaaaagattcctgtaactgtaatgtcttacaataacagaatgcaggagagcacatatcaatgaagaaaagacaaaatgtacttatccatgaagctgaggttaagaaaccagtgtcttcaagagccagggacagcactgggtctgtgcagagttgagagatggtgatgacatgtggtttccagcattcctcacccagtccagggacactgtgggtgtgcccagcttaagtccagtaactggaaatacaagcccaagttctggagagtttgagctgcagagatatatatgggaacactttgaatcttgactcattggccataaccagcagagtggaaaatacaagaagagaaaaaaacattgaactgcgattttataacatcctttactaggcagagagaagaggaaa

SEQ ID NO: 1429 - DNA, 522 bp, Homo sapiens
tcttaaggctctaatatcttgtcttctggctatgagaacagagcatatggtttgcttgaagattcttgttcaacacttatccattaatctgacagcaggaagtgctaaagagcagaaacaggagtcggtcagactctcacctcaagtccaaggcaaatatgcttgcccctaaaagacatacttgatcttcaagttcaggaaaaccagatacaaagtctcactctgttgcccaggatggagtgcagtggtgcgatctcagctcactacaacctctgcctcccagggtcaagcgattctcctgcttcagcctccccagtagctgggactacaggtagcctcagcttgcacctgcatcagtcagtatttaccagccattctagacccttttaggatcctcaaacacacctcacaggactcaaaaggaagcgaactttcaccagttcgccaactgtcgtcaccaatctcatcactcaagagaaactcattcagcttttgaacactgcaaaaaacaataaacacaga

SEQ ID NO: 1430 - DNA, 1380 bp, Homo sapiens
acctgacgctctgctttcccctgacctccactgacatctacgacccgccctggaggcacggaaggctgtggggttccagccccccaaactgtgcagctgaggaaaatgagccgtgaatgggggcagagccagatcctgggcgggaccctgcgcaggatgaactcaggcagccagagggaccccgggaagatgggagtgagagctgccttcgtctgcaaaagtctccagacaccacctcactggtgaaggccagagaccctaaactgtcccaagaccacctgactgggctgcctccctgccacctggctgccagcctctctcagagcgcctgcaagctattcctccaacccagagtttccttcccagctaaaggcctttgcacctgctgttccttctgcctggaagttcaccgcagactatcccagggcctccatccttcccattgcatggtccccatcagctgccgccgcctctgagagctcagtctccactggccatcctgtctctcagcccactgcactctccactctgccagaaagtcccccaatcagtgacaacacaggtcacggtccacacctcacctggtttgtccccagtgcccagcatctggcaccgagcaggtgcgtgcaaatcctggacaggtgggcaagctgatggtgtccagaggcccctggtccttaagggcaggggtggggatggctcagaggacataaccttgcagacccgggttcaaatctgggctcctcagctcatttggtcctcacacagcccatgttgggagagctagtgttctccctgttttgctgatgagacacagagaaggtcagcaactcccgaagattgcccagcaagttgggagtaaagctggtgcaattcccacgtttagctgctaaacagggtgtcctgtacttggtgtgttcaagcagaaatccacacatgggaaggtcaaggcaacatccctggtactccagctttgaggtcctaggaaaaagggaacctcccattaaatgcttctattgccgggaagttcagcacctgtaaaagcagccccttcccgtttcactgtggctgcattttaattcttattttttaaatgtttagcttaaggccgggcacagtgactcacactataatcccagcaatttgggaggctgaggcgggaggatcacttgagcctaggaattcaagaccagcctaggtaacatagtgggaccctatctctacaaaaaataaaaaattagccagtcatggtggcatgctcctatagtcccagcttggagattgaggtgggaggatcacctgagcctaagaggacaaggctagagtaagccctgatcccgccagcaccccagcctaagtgaaagagcgagagcctgtctc

SEQ ID NO: 1431 - DNA, 6113 bp, Homo sapiens
aatcagaatctcccggcagttggttcccggaggcagaatctgttaaactgacaaagcccacgtctccgggtccctgtctcggggagtcgggactattgggtcaccccgggtagtcgagactctagactgagctgtctcggtcactcaggaggcagttggcagagtattcgtggtcagggaggtgacccgtggtcagcagggtcaggccacccagggacaaagggtgctcctgcaccgggccttggagaaggacagagcggtggggacttggggtcagcgggggagcctccgcggatggggagtcaccacctgccggcaatcagccatgactgcctttgcactgtccatgctctcagcccaccacctcctccccctgccattgcagtggctaacactggagacgaagaccaagacaccacagcctttctccagtacctctcaaatcagcacagacaaggacaaaggcctcaatccacaactgctgaagatggaccctggccacatgggatggtcagacacgcctgcccagctatctgcaggcgaagaggctcagaagaggtttaggggcctgaaggacatcttgcttccatgtccatatgagcaggctatttctgctccatgagtcaattttgccatataaaatacttaatttcagccattccagggtgctataggatgcacagcttcccatcagcccacctgaactccagccatgccattttaataccaggaataaggtcacctgctttcctgccccttaggaggccggagccgtggaagcaaaatggcacttctgtttacctgttatattatttttttgtcatccttatatgtttgaaaaatgcaattatatgaaaaaagtttagtaattacagacataacagcagaaagtcctcggaaccaagcttattctcatggccgattctgctccacctgggactctgctgtgctgcgggcatcctgtggtcagaatcgcagaggggccatcagggaggaccttcccagaggatggacctcacgtgactgctgcgtgggcaagtggcactggccactctgcctggagagaggagtaaatgcagggctggccaggcgacctgcacactctgctaccggccttgtccatctttagcctctaatttgaaaatgaggatcacacagaccaagagtatctttgagggttagtacagaccacagaaatgccctgggcctttcactctctccttttgcaaattcccatgtgtggaaatgccgtttggataatgagggagcctgaaggaggtggacacatgagcagccccgacaggcctggctccatcctctgaaaatggggccccgtgcccggcgtgtggccttactggttcagtcttctttacagtggtaggttttgagtgcccagatgcccagtgcctcctacccggaacaggacaggaccaggctgtcccctggaagaatcccatgcacacttggctattcagggagtttccacccagccgagctcgcctctgtggctaccctggtcttgctgctcatatctgccaggaaaggcctggacttggagagaaacctgggatttggattcagtccttgccagcctggctggttcatatccttacctctgtctgtggaagcctatgttcctgagcagcgagtcagagggggcatctgaacgcagagcagggagcttcagatgggaagaagtcagaggaaccagaatgtatcagacgatgtggagttgggtgcctgagctcaaagcaagctgggccttgggctggctgtgtgatcttgggcaagttcgaccagcttctttgtgcctcttttctctccttaataagataaatgtcttcactagtacactgagggctgccattaagttctatgtgcagggatccaaggcaggccctaggtctcttggtgagtgctactcctccttacaatttgctgcccggagcaacattgggtgacagaacttcttagcaccttggcagtccttgtcctcctggaccctctgttttgagggtggaatgaggtgaagggcaagtgctttcccagctggtcaggtgctctaccaactgggcatattctaatccccccagagtatacagatcagagtttgatgtggccaatgggtccaatgcccaagtgagaatctcttgatgaagttattggtgtggggttttgctttggtttttaattatagagagcaaaagtattgaaagtattacatttaccctaaaggtgtaagcaagttatggtcaagtgaagatgaagtaccatcctcaaacacgggttccattcttagctcatctcatttaaaggagagaaaagccttgcaggtgaaacatggtgggggtagacaggggttcagccaatttcagtgtttggccccaagaagtgaatttgggtttgaggacctctctctggaaggattttatgaccagatcttcctggagatgatattagaagcttttctcaccaaatatttatttgcctggggtgcaacttctgcttcattctctctttgactccagctgtctttttggactgaagtgcaggttgctcacagcatcctacaaagtaactgtcttcccaaatctcacttacctctgagtttctgctgtattcctgtctttctctctctctttttgaactggaatctattactttggatgatgcatgctggcgttttctaaagttttctgattgattgtgtctttaaaaaataatctgatagtattttagcttcttgaattttgtggcatatttttaggcctctcctaaacccatttttgagtgctatgacattgttcatgtatgaagttatgccagtagaaacaaaatgctgtcatataggctcccctaaaacttcaaatctggtccagatcttagactggcagcttctgctgtcattggatctcagtgagacctttgcacccatttcctccctttgtgattcatccacggacatccccatctccttgagaacaatctcaggaatattccttgccttctttcggctctcactccatctcattttctgctgttcactcgggaataaagagatgtcccacactttaaagagtaaaaacaaaaattggagctcagagagggtgaacttgtcaatatcacacagagctgggagtgtggtaagcccttgaaatggggctcaatgacaccgctacctcccagggattcctaatgtctgagggttccagtgagctgagatgaacccagggcctaagaagaactctctgacctcctcacctccaaagccccacccagtgcacatggcctgaggcgtccatggtgatggtaaagaaacctcacctgccatctctcccattactgccatgtcccctctcatcctattctgtgccaaatgtccagatgtgatcaatagaatcaggagaaaattgaggcctgaggggagggggccagactctgggagtggagagtggattgaagtcagactagggctgttcagcaaggagttcagggccttcaagtgttgggagcttggcagcaatgccaaggggaatgggggtggatttgggtccaagtttatgttcgaagaatataagcatgatttggagactcctgatgttcatatgcccccatcaagcagagctaggggtcgccagaggagagaatggtgctagaagttcaggtgagaacagggcagacccctgcataaatgtgggatctctctgtttgaatcacggcccaaacaccgtggcagggacactcccaaggaactcaaacatgtattttatcagggctttaacataaggaatattgattcttaagaaaattggaaacatatgagaatctaatttactctgttatgagatgccatacacctggaagaacaggttaactgtcaaattactaccaaattgttgcaaaaaattgccaatgaagcaatcatacaaagctcaggtaacagagtgggtggccatcactctgggagagggagatagcactggagaaggtccttgtgactcagatcaaagagagcaaatggcaaagaagggggacagttgctgttttctgaagtaaagcctcttaggtgttatttgaccatttgttacctgtgaatgtataattttgatttttaaaataagtagaaaggagcctctttcttaaaaccaaccaatctctgagccccacagatggtattctggtttcttgcaggaggttctgggtcccacccgcctgcccccttctaggacaaccccaccagcaaggaggtcttttagttccttctgtgtgtgttcacctgctcgtcctggcttgggccccagggagcccaggaacctcagggttctctcagctgcacttccatccgtggtgcccaacctcagtgcctaggactctgtgtgcctgacctcctccaggcggggctgctccctccaggtgtccacctggtatgggcatcccgtggcagctctcctctgatgaccgagtgtggtgggggtgctaaggccaacttgctgctggcacgcccagaacttatttgctggctgtttcaaagactccctaaaggcaccatggattttccttagaatacagttctgtgcagtcccgcccatcctcttcccctctgtttcccactagggctgatacttgctttaaggtctgatggctcacccagtccttcataattttcacaatgttatgttccttcctaaaacccttgcagtttaatctgctcttggcgtctgcttctcagaggagctgaggaacagagacttcaacccttcttctctcagttcctgctgcccctgtagtgaggctgacagttgcagaccatagagccagcctggccttgcccagagcatacatgacctcttagtaaggctgggccctgctaagggctatgttttgcacacgttcctgctagtcacatccagcacatctgggctaccacttggatggcaacattacattgaagaccactgtggccatggcaggagtagacaaggtggcagtcttgtcttcagtcgtcatggaaatcccagctatgcagcactagcaggtgttttgtaatggaggatcagatgcttgagcttctgagcaggccccctccctctactgccttctgtcagggtcttggcagcagccggctctggaaggcatcccggctctgggttcaagagcttgctgggcttctacatgaaggtgtgaagtgtgaatgttaccttttctgatttacacttctgttttctgctacaaacttgggatgttttctgagggatgctgaatagatgggggtggatggggggagggaggcaggggctagaaagtgttcttctggggccaccctccagcctggggcatctgatggatgaggaggggagaatctttgagatcctgtttatgagggcactgcaaataccacatttttttcttgtttgcaaattctagtggagaagttttaccaggttgggagagaggcctcagaattaagtccctgtctcctgccacagtttacaccggtgaagcttcctggccgagcataaactcccaggtggagtacaaacagccttcaacaatggcaccatcattggtaccaatggcattgagaggaggtggcactgacaccctaagtgggtggcactgacacctaagacttatggtcttctgctgcctggagagctttgcctccatcactggtgcccaccttgggaattcccaggaattactcttcaaaggtacactcggacgcccactctgcaaggccattttgttcccttacagtgcctctgaaatcattttgagagaggagaatagggaattagggtaaacaacggttaaggcataagcaaaagaacagcaggtgcagccagctctagacagcatataggccacatcctcactcctgttataacaaaacagaagtttccacttcagccttttgtttcatcctgggtaagtccttcatagggtgtaaccaattggaggcctctaaagggcacctaggggtgttgctaaattattaatagcttaaaaccctaaagaacattgtaatcagcgctcttgagccctttacataagttggcttccactctgtggagtgtactttgcttcaataaatctgtgctttcattgcttca

SEQ ID NO: 1432 - DNA, 1173 bp, Homo sapiens
ggtaggttctgacagtttcatccatcacaatacaggcctcaccatgtcactgcctcagactgataaatgcaaaatgacagtcattcatccggtggaatagaagaagccagggaaaatacaacatgaagtcacttatgccatttgatatagctttgcaatgtgtatcttttctctcccctatcttttgttttgtttgtgtacatgccagcatgattatagtctttgcaaaaatatatacaagacaacacatttccctaaaataaaaaagtatgaatttagaaagattatagctacattaaaatgaattcagaatctactatgacataaatagaattagttaaagattaaggttagaaagtaaatgtcacttcttaactttttctctttcttgctattgaggagcacaatctaaaatttgtaggcagatagagtataaaagtaatgtacaattatggcacttatactatttttttcttttatacaacaattctacaaaaataatgactatatgtacacattaaaggaaactgtagatttactgaaaaataggtattaataatatggatatcaacagctgtgtacctttaatttaaaaattaaaaaaataaaaataacagtaaactgaaagtctccattctctcatcttccttttcctatgtttatttttaaacaaattatactgcatatatcgatatctattagggtcatgtgttgacttagcaataaatttaattattggtttagatatcttacagatgtatggaatctctaatatacacatttttgtttaatatgttactgagaaagaagctcaagtgatagaaataacacaggacaggaagtaagacagttctcgtctgaagttcttctctgacagcccacaaactagttaatatatgtgcctgtcacagtctccaccagaagctttatcttactacagagtccagatgcattaaggctgtgttcgagccatgatcttcctctgaagaagaaatgaagaagaaatttatcttatttttggatatagtgttcttagttggcagtttaattattatttttacttcatcactttgtatacgtcatcgcactttctcctggcctataagatctctcctgagaaattttacgttctactttactggaacttcattaaatattatttgcatcattttt

SEQ ID NO: 1433 - DNA, 1286 bp, Homo sapiens
ctgaacaacaagttaactgctgttcccagttatatctggtctttcccacccccaaacatacacaaaagatttttgtcattcttggcactggacaacagaagtgataagacatgccagcagaactctaaaggcagaatgtccttccacctgttttatgctgtaagacaaacttccaagtgcgaggcagtgtggagggctgttgccttgaatggcagctgaatgcaccagcgggatccttggcagcaatgcccaggcactgaagtcgggcattcaggagagctaaatggagaaaagaaacttgagcaaactgcttcctggaacactgagaacctgaatgggaaattaagaagaaccagattctttctattcttccaccagccaaggtcagatttccaaacttctattgattctaatctttcccaaacagtgctgtggcaatgtatgaaagtaataaaaataatcctttttctgttaaaaaaaaaattgctgttacttgctgttttgttatgcttttgctggagattttcccacccatcttaaagcagcaacttcaggatgggggaatcaagcaaaaccatggtgaagagattcatttaaagaggacaagtgatttattctacatctcaggagacagttccttaaggtgatgagcacaaaaggatccatcttatacagtgcttgccagcttccataatactactcaccacgatgttgaaatcacctgttccagaaccagtcctgtcctttgacaagaaggatttaattatcagtagtggtggggactggctggagagaggaaaaacacttcaaggactctgccacctttcgtagatggagagtgcaaagtttgtaccatggaactccttctctaacagttactctgtggcagtgcctatttcaaacctcccttaacttctgattgtatagatgtttgtttcatttgttcatctgtttgttcacttagtcagagatgttttaagccttaagagaaatagtggactagaaaatgccttggaaaagtacaaagttcaatccaagtaaactgtttttaaactaggaatttatgaagcctaaaatataaaatgtatatacatggatatgctctgaagtgaggtagaggggtagaaatcaacattgtgatattgtactatagttttgcaagatgttaccattgggggaaaatgtttgaagggtatacgggatatctctgccttatttcttacaactgcatgtgaatctacagttatctcaaaataaaaatttaattaacaattgattacaattaa

SEQ ID NO: 1434 - DNA, 403 bp, Homo sapiens
gggtaccggccccgacacacacacacctgaggactccccacccctcggttccttacctcctatctacgccacccaaagaaaaagagtcggatggactgggtgacccagggagggagggtctcctgcctagcgaagagtcggggtctcgagtaggagctcacacctacttaggaggcgacagcgaggcctgcggaggaagcagttgagggaaggcaggtgtgactccaggctctgcactggttcttcttggttcctcccaccaggccctttgttcctcatgtccccatgtttctctccctctgcgtcttagcacctttcttctgttcaaagttttctgtaaattttctctttttttctttctttcttttttttttttttataaattaatttgctttcagttcca

SEQ ID NO: 1435 - DNA, 639 bp, Homo sapiens
gggagtgtgatttggtggggaggaagaaaggtagaagagagaagaaatttcttggggcttctgagatccacctgataatatttgacactgtcttcaggcaacagctctctactgccctgagaatgacatccccactgttcaccatggccttaaatcccctgcgaattccacctcatcctctgccacttcccgtcactgctctgaagatgccctgatcttgtttcagtcccttggatgtacccagctcttctccatctttgcatgtgtcatagcctcttcctggaaaacccttcctgctgctcatcccagaactgactctccatgtatttactcttattttgagagaagggggcatttccaccaccagaagggaacttgctgtcttggtagccattgtcccctgacacctggcacatctactctatacagtcaccattcaagtggatgttgaatgagtacacttgtttcacagtttggttgggtaagccccaaagcttggttcccggtaggatcaggctttatgagtgggctgagtttctataaaagtctccctaccagtttccaatcttggtgaaactatgtctgtgggcacaaatgagaaaacttgccattcgtatcaccggttacccagctgtggac

SEQ ID NO: 1436 - DNA, 2998 bp, Homo sapiens
gtttccccctgagggaagtatacctgtcctgccagccttggtctctggcagggaaggtccttccaacagagagggaattgcttagaattgactcaacactgcctccttgctgaatggataattcaagcaaacaactcaagagctggatgctgcccagacaggtaggcagccagataaagtgagtgtccagggaaagagcagtaagggtcagaagagaaagagcctggtgttctcactgcctcctgccttccttatgactgtctgttcagaagtcctcctagcatctttcttctgccttcccctgctcctgtccctgaaaccttttcttcaaaagaagtggaaaagaggaactgggaacccatatagcaacagcatcacctggaatgaattcctttagaacatactgtcttggaaatctgaagcctgcagggctggacaggcaagaagagcagtgagcactgcatgaacctgcatgtactccgaaatatttttcaaatggaaaagaaaacagagaacacaattttcaaaatatctagagccctccaagaagtctttgtagagatctataaaatctcaaggcaatttaaagaatagaaaaatgttttagaaacactattctctccacatcctggggcagcagccttctccaaagaaacagaaagaaggaaatggattgccttagcaaaaaaacaaatgaagacactccaaataacagaagaatgggaaggctacagaccttgaagtcagaagaaaatttcctctccttgccccgtttctccttaaatggatcaccagtacagtctcttacttctagagccatgttaagctttcttccccaaagttgtaatgtccttcttttggttgtgtcgtgtcctaaaatcctactctttggtacaagatgaaggtatatgaagagataatgaaggaaacaaattcaatgtgtttgccaagaacacagtcttttaaataactcttaaagggttcgtttaaaacagtgtaataaattgtggtaatctagtacacaaagctagtaggaacctcgtttattaataatatttcaacattgagcagtagagggcagcactatccttcttttgcaaaatgttgagcactcttgagaaggaaaataaaggcaaagctcctgacccctgtgtctgtgtttacttttaccattaaaaaaaaacaaaaaattggagtatttttattatggtttaggtgattatgtataaagaatgtcagagcctgcattacctggaagtggtgcaccaggtaatgcaaaaaacacggaaggtttgaggtcccccactcaggatatgggttctgtctagtaaagataaacagtagcttgaccctgggtaatcagatagggttattgtatgaacagacctaatgctcctgcacgttctggatagaagtcaatctactgaaatagcaggatgtagttttaaaaaatgtgtgtaactcatatagtcttagccctgataagtgcttctaaattcttattcactgcctttattctgctgtgttagtgttgctctctgtcatacgtgggtcaggtcagaactagctcaaatacagtatgtgtattatgactttaaggagtggtgtcagacaagatgggtaaagaatgtctttcatgggactgcagttggctaaatggctgtgtataagtagtgaaattgaagccttgtatgctcgtcgtcattctatcacagtatgatttgagtttccctaaccggtaaacagcaagaaaaaatgatctgttattttttactaaagttacttgatgctctttagcaagctgacagaataattctaattttagcaaatacaaaaccatggtaatcctagcacatttggattctgtttaaccctgaaaactcttttggcagcaaatcttcaatgccaatttagataaatcccactaggaataagcactgaaagacgttgagtctagttcccagctctgccatgtgaagttgggcaaattacagtctctgagcttttatttcatctgttaaatggagataatacctcctagatttattaaaagggtcaatttagaaaatatgtattaaaatggtttgaaagccatttaagtacctaatgaatatttctatcactgtagcccaaaaagattcctgcctagaagactttatgtctcttctcctcatttggtatcattctattgcctgagattgttaattaacttttatgtatactcaatattttctcccaacttggttgctagttccttgagaactgaaaccatcaattgcacttcttggtatcctccacaataaggtatctaggtactcaaatatttgttggttgattaaaaacataaaccacaagacataattaactctttttaaaattgtggtaaaaaaacatgtatttaccatcttaatcatttttaagtatactgtatattagtgtttactatatgcacattgttgtgcaacacatctctaggactttttcatccagaattctttttttttgagacagagtcttgctgtgtcgcccaagctggagttcagtggcaccatcctggctcactgcaactgctgcctcccaggttcaagtgattctcctgcctcagcctcccgagtagctgggattacatgtgcctgccaccacgcctggcaagtttttgtatttttagtagaaatggtgttttaccatgttggccaagactggcctagaactccagacctcaagtgatccacccgcctcagcagcccaaagtggtgggattacaggcatgagcaactgtgcctggcctagccattttctataaacctgaaaatagatgccagaaaagaaggtgccgctataaaatgctttcttgagtgatttatgtctaacatacaattaaacatttatgagaaggaaattatcaggttaaaatataaactcacttgccaattatttgattttcaggatatctgacttttgttaattactgaaaataaagtattatttctaatcacta

SEQ ID NO: 1437 - DNA, 853 bp, Homo sapiens
ctccccagctccactgaaaacaaaaccaaaaacaaaacaaatcaaagccttaaggatttatcaacctggagagagtgcagcccttctagactgagctgcaaagatggccctgcctccatgccttgttgaacatgatgatgcccctgggaatgggaggtgatggttttttacttcggccctagtacagagtatgctcttgaagctggattccatcagcaggaatcactaggtacttctaaatcactggagagtcaatctgaagtcagatgcatactccctgaatattagtctttcagctctcaaatctccaggcagcctctattgattgatctgagttggcagatgagttggcaggcctcaaattcctgttcccagtgatatgagtacccacagataattcactggtaagatcaccgagtgacccaggaatgaaacctaccattgaagatgtttatttagagctgtatccactgtccacagccaagggaaatagccttttctagactggatatatttgaccagtagatggagtaagtggatcccagaaccaccaactaaccacccagaacctgctgatcaatgctgttgtctttcaatattctatcaaaaagggacaatgccatcaccagcaactaaatcttgagcttaaggtgcatcttcggcaggttttggaaatcactagtgggtaaaaaagaccaatttgcaactaggctctcatgctctgttgaaaactatgtcacaatatcacaatactagatgctgggctcaagacagcaaacagaaagcagcaagggcagtgactggaagctgggagagagggtcaacagctgaatctcagcctgatggaggccac

SEQ ID NO: 1438 - DNA, 548 bp, Homo sapiens
attacagattccacattgcagctaatcttcattaaactaccacgtggtgaattttaatgtagtatccaagaagcatactgacaccttctccattgtcctactatgtatctgtgtaaggccagattttcttcatatacattaaccaaagcaacatatggcaacagactgaatgaagaggcaggtttcctgggactctgttgcatcaaattctactgctaggcatcaattttaaagtatttcatcagttggacctaccaaatatcaagtcaggatttggccatctctgctcttgccattccacctctcacgactctatcctcaaagaaaagaaaacagtctttcatcaattatggttaaggatccccaaactgaaacacatgtggctaaacgccattcatatcaccagcccacaccagtctggtggtgggggagagaaggaaaaagaggagataaatggcctacatgattgatttcaactaagacccaaatcttggagaacaattattggatttaccactgtttgtttttgcaacatttcggaaatcggc

SEQ ID NO: 1439 - DNA, 1645 bp, Homo sapiens
gccctgctggctgtcccgcaggacccagcgccgcggtagccttctctgaactgcggctcaggcggaggtgtcactcctgcctccagcccaggagggcaggtcaggttatgcaacgcgtgccgcgcgatctccccccacctccaacccccttttctcccgggtccacaccgcagttcccaccgctccgggtgtcctccccagtgcgccgcgatttttgtgtccaagccccagagtccctctgagaccaacccccagccagcacagacttcctgccttcccagctcggggatgtggtctcattaggttgcccaagctggacttgtactcttggcctcaagaggtccttccatctcagtctcccaagtagctgggactacaagcatgcaccactacactcagccaaatactttcaataatttgccagctgacaacttgattgggttctccttcaggtttgaagcgccctcgagaagtgtctaaaggagacagttgatagccaaacaacagttttggattcactgactgattatgaaagaagcagtagactggtatcaagaatcagtcagcaaggaggccctcaccagacgccagtgccatgttcttggacttctcagcctccatattcatgaactaagtttttggaatccttaggcttccacgtgtggaaagcctgagctaacctactggaggatgagccatcacctggagcagattcaggccatcctagttgaagcctccctaggccaagcaaccgtccaactaccagacattgaccattcagccttgaacattcagcacaaagacaaaacagaccagaccagaagagtcccacagaataggggaaactattcagagaaaacttaagccactaagttttatggtgttttgttctgtagcagaagcataggcatactgacaatacaaaccgaaatccttctaacgtagtggaccttttcaggccagcattttttccttgaaaacctggagcatgtatccatcttatagcagagatcactttcacaatgtttgggctcttgatttgaattgatgatgtaatgagccctctatccagattgtaactaattactctgcgaattgactggattccacacccttctaatattttacttttcctcttttatcaactctcattcttgctgccatgatcaatggaccaactatgcttataaccacaaattttgatatgcttaaacaaatgaacaaatatatttaataatttcttttttttttttgaaatagtatcttgctctgtcacccaggctgcagtgcagcagcgtgatctcagctcactataacctccacctcccgggttcaagtgattctcctgcctcagcctcccaagtagctgggactacaggcgcccaccaccatacctggctaattttttgtatttttagtagagacagggtttatccatgttggccaggctggtctcaaactcctgacctcaagtgatcctcctgcctcggcctcccaaagtgctgggattacaggtgtgagccaccatgcccagccaataatttcctgatataataaaaatgccaatactatacaattaaatagtaaagtgataaaaaataggataacatgataaccactaattaatatatactacataatcatc

SEQ ID NO: 1440 - DNA, 2194 bp, Homo sapiens
ggaagacttaagatggcggcgtttgcacggagtgcaatcactgcgtccttacgggggttgcaaggcgtccgaagtatgagtccactaacaaaagtccagaaactcgccagttaatagtattgtgtctcttcaaaatatcggagaataatttctttctcgctgatcgcctaacttctactgacgaagcttggaagttgcagaaggttggagtgcaatggcgcgatctcggctgactgcaacctccacctcctggattcaagctattctcctgcctcagcctgccgagtagctgggattacaggcatgtgccaccgcacccagctaattttgtattttttagtagagatggggtttctccatgttggtcaggctggtcttgaactcctgacctcaggtgatccgcccacctcagcctcccaaagtgctgggattacaggcgtgagccaccgcgcccggccagaacattagttttaaacttcctaacccttgggagaaggcaaaacacttgatgaaatctacataaagactaaaacattttaccaattttgcattgtttgtttgaaattgcattgacgactggtactggctcctgtatcacccagctctggagttgaaagagctcttcattcctgagtctcctgtaccactgagaataggctggagtgcagtggcgcaatctcggctctctgcaaccttcacctcccgtgttcaagtgattctcctgcctcagcctcctgaatacctgagattacaagcatgcaccaccacgcccgtctaattttgtattttcactagagacggggtttctccatgttggtcaggctggtctcgaactcccgacctcaggtgatccgcccgcctcagcctcccaaagtgctgggattacaggcatgagccaccgcgtccagcaagaataggtgattttcaaacttggaaacattcagaagttatcgcctcagtttcagattgagtagtctcaaagagattacagacatctaccacaaattctctacttggtgtggtgcaaaatcagtatgatgtaaactttgtctctcagtttcttcaaaggaaagaagcaactggaacacacatataacactaacccttccagctgcattatgagggaccagtacctgtctcaaggcaaaattatgacttagttcatcctcacctctggaggccagtaaaagtgggttatagaagaacaaagaggcatctagatctttcactgggttatttggagagaaacatctcctaccgaaggccagtttaacaagactggtagaggaggttatcttatctaattcacagaaatcaacacattgagtcaagaaaaatgaaacacagaaacactctaaataaaagaagataagtcttcagaaaccaaccctaatgaaatgaagatatgtgattaacctgacaggaaattaaaaagagcaaccataaagagtctcatgggagcaatgcatgaacaaactgagaattttcataaagaaataaaagataacaaaaagtataaagttgaagaatacaataactggactcaaaaatttaatgtgtccaacagaagaatcgatgaagcagaagaaagggctatcaaacttgtagataggccattggaaatcatgtaatgtgaggagaaaaaagaaaaaagattgaagatagtttaagagacttttgagacatcctcaaaggggaataatttatacattaccagatggagaagatagagggaaaaggacagaaaacatatttgaagaaataatgtcagaaaacctcataattctggcaaggaaatagaaatttagatctaagaatctcgaacatcaggtatgatgaatccaaggagactcacaccaaaccatattgtaattaaataaaggttaaagacaatcttcagagcagcaagggaatagtctcttcttacatacaaaatgatccacggaagactgtcagcagacttcaccagaaaactttcacgccagaaggcagtcgtgatatatacaaaaagctgaaaggaaaacactgccatccaggaatactatctccaactatcctgtgtttcaaaaattaaggagaaatataaagttctcaaacaaaagatgtgggagtttaccaccactagacctgcacgggaagaattgctaaagggagtccttcaagctgtagtaaaagagtgctaattagaaacatg

SEQ ID NO: 1441 - DNA, 463 bp, Homo sapiens
agcaacgatccagatggtggctgtgctctgtctgcgtgggtcccagagtgagaagctgaggtgccggccttgttgaacagggagggctgctctctgctctggagatggcactgtgctctcatgtccacattgtggaaggcggaagggcgagagaggctgggtgacacctcttcttgccttagaaacacgagcgagtggttctgaacagccgcggtcttgcatgcctgcccctcagcaacggccctgctccaaaccggtgttacagtgatctgattattgtaattgatgacattaggaataaggaatccacacagaataatacaggtgcctgtcatgccagagtggttttattcattgttagagaagttcataaagttgaaagaaagcatctacatgggctagaacagcaaaaagcatgttttagtcctttcttaatttgtgaataaaatgatgaattccagaa

SEQ ID NO: 1442 - DNA, 729 bp, Homo sapiens
gcagggcaaaggaggaaagccagagaaaaggcctcaagtctaggaagaggaagtcaatgctctggaagccagactctggctctctatgcctcaaaggaacaagctcagagctgtgctgggatctaggaaagcctggtcccaggctgaaggggaagcggcgggtcacagtgggtgaggccacactgttctggtcctgatgtcgcgatgcaaacacttcattctgcaagggctcaaagggagacaggtggaggttgttaccagggctggaaagcacctcattcccagagcaaggcagacattaacccctctgctgggcctgctgacctgagatgactccagcaagcttccctggaaattcagcctaagcagctcacctcgtgcatgctgggactgcggcctccctgtaagtgctcaggtctgtaataccacaggaggctcatcatcagctctcctggaaggacaacacagtggttatggcttgaactggcaacctgagttacttagacaggcagagaggctggctggctgccctggaggttcatccaacctcaatcctgcaggctccggcaacccatgtcccctgccccaggccaagcattcagaggcctggaatgctgttaggcatggagggagaagggggagaaggcactgacaggtgaggtggggggacaggtgcccaggctctgctggctggaaaggttaatgagctgatccaacccaagccacaag

SEQ ID NO: 1443 - DNA, 2471 bp, Homo sapiens
ggcacctttgctgagtcatttggggttggcagacctggaaaagacagcggtttagagagtggttagtgccgtgatcagccaacgcaggctctattgtctgttagtatttcctggtgcacttttggaacctgatctgcccttctcatggttaagggcaggggatgagtaactagccatggggatgttctgcatatcttgccttgtgctgaatttcctataaaatggcttcatgaaactttgatgtcagcttaagcagtactgccaccaggctctgcggagggccctaagtgaatagagggcagcagtgtcttccaaatttgaaatgagtgacagtgggttataattaggggagaagatgctcttgatgctactgagaagatacagagtgagaacttttcttagaaaagtctgaggttgtaaagaagaaccaagtttttgttttccaggcccccagcagaatggatggtgcccactcacaatgagggcggatcttccgcacctagtccactcagactcacatgctgatctcttctggcaacatcttcacagacacgcccaaaaataatgctttaccgggttcctaggtagtctttaatccagtcaaactgacacctaaaattaaccatcacaattaccttctcactaaaatcaatctgagaagaaaatggtcataaagaatttgatgcaaatcccttttttgatttataggatgaacagtatcctagataaggaaacagtgaaaggctgttttgtttttttttttttttcccctcctcttcatactccccaatgtgagtaatgggcaaaaaattccaggagaatgggagcattctgagtgataagaacaagtatctctcaacatgtagagtgtgtatacgggtgggttattttcaaatttcaagtctgcaaatgggtagttccaggtatggcttggtgattgaagtggaggttcttttggggctagtcctttgtgctcctgtaatttccccccaactctgagtctgagctcagtgagaacaatcactttaatgcttaatgcacaccgtaatacacagcggagttaacagaatattcagacaatcacagacacaatggccttcctagccatgagtttggaaaagtgtttctaggagcttgttgtagcagaggctgtgtagatgacaaagaacatgcactgcattgtagatgggttatagttatggtgaccagcccttggagttagggcagattggggtatttgattgcaaagaaataagacacttctatatatttttttttaatttgctgatcatgggaaaatcttcatgaacccttatcttctttttttttttttgagatggagttttgcttttgtcacccaggcgagagtgcagtggcatgatctgggctcactgcaacctccatctcctgggttcaagcaattctcctgcctcagcctccagagtagctgggattacaggtgtgagccaccatacctggctaattttctatttttaatagaggtggggttttgccatgttgtctaggctggtctccaactcccgacttcagatgatccacccacctcggcctcccaaattgttgagattacaggcatgcaccactgtggtcggccatattcatgatttaaaggaattgaagataaaagaattgagtttgataaaaaagagagagaagaatattattttcttcaaatactgacttttaagtgagatagtgtgcaaaaaatccatatactaggtactcaaatacctgttagttgacccttcccctatgatgtgaactggttattcacaactatctttatactttaagtcctgttcctaaacacacactgaggttctggagggcagggctgggtcttaggtaaatttgttctgctaccttctcactggacacctggctcacccaaagcttgcctctcatctgttttctgtgtacagattgccattcaaaaagtgttttctgagtgaatgaattatttactttatggagcatcaacatcctttttatgttcttgtccatttttatgtccttgtcctcacccttgtcccttcaagttcagtgggtcccagaactgaacttgaagagagttaattggatataggccaggagtgtgattggacatacgtgtgtgtgtgtttcattaaaattctcaaactaaaaataaatggtttgtggattagtcaacttctgttttcttctgctcgatatcctgaattatccagtacctgttgcctccatgctactgaaaagtgaccatgtgtggtatgacaagcttatcagaaggctgtcaaagtgcttggcagagaagacatggagtttaatcctgagtggaaaatggcattgtggaaacagatgaattatagtagatgaatatagtagaaaatatagtagatgaattaaagtacatgaattatctactttgtggaccatcaaaatcctttttatgttcttgtccaagttcagtg

SEQ ID NO: 1444 - DNA, 4388 bp, Homo sapiens
agttggcccttagatcatgagaccagcctaagtgcccaaggaaatggaacagcagggagggggagggacatcacacccactatcaaaacttcttgttagtctctggcttccacatccttccccaaaacttcagcccaattcacagccgcatttttccatctctttgccattcctccatgggagagctttctgttggtacaggaatagctgagaagtgggaaagatcaagggtagtaagagctgcccccgataatctacagaaagctttgctggaatgaggttgtgcatctctgaacctgagctagatttgttgggtcagggaccatacttatttactggcccaagaattagaagaggaggtgtctaagaaatgcttgttgaatgaataaataaacagccgagtgagtgtttatatgagcctgaaaactgcctgcaccagcacaaaagtaaagccccaacaccctcaggtcacacctactggaaaaatatatgtcagccccagaaaaatgtgggcaacatgaggcaactccggagcaacacaggaaactgccctcctcttctggcccctcttccactgtgatgctcaaagtctgtgatgaccaagtctggtcatctaatcagcaggatataagagggtcattcttcactgcggccattccagtttcctggaaacttggctttctcctgaccgtttccccaggagcacggtggtgacaagcttgagctctgacatcagaaagtccccagtttgaaacctctagcttcttactcgctagctatgagactttgggcaaattaatctctaaacctcaatttctcaatctgtaaaatgttcaaggtcaagcaactcacttttccacattgtaattgatgaaactaaaattcagactcagatctgcctcactccacagtctgtgctttttccttcccactcatctttttctctttctattaaaaatttcataacacatttgagattctgtctcaactcatatcactgaaatcatctgtcacgtctgatgatcatatagaagccagactaagattcagccacaaatgttatgcctaaacatttcttattatttctttttaatgtttctcatgtatacaatcaaactcgcaccctagtattattggcaggctaatatatgcccatgagacatgtagcttaaatctctatgggataggataagtattctccctttgtttgtgatttgaaagctttccatggatgctaaagcgatttgttaaaataccttcacctgtaagtgtttttcctctcttaaaagcctaattcatctctgagtttgtttactaaaataatctaatttgctcattttctctagccattccaagctaaatcccaggaagtactaaagaagcaatgcacagacacagtatcatacaatttgagacacagtattataaaattgatgtgaacttctaggcacagtgtgctcacagtctgtctggaaataactttgtagcaagcatagttccagtctagctgcctggcagcctggcaggatattattattactgatactaatttactttttaatgtaagtctacccagaatatattaaagaagtttcaagaaatcaggatcatggattataacctgacgtagtgctaaggaaccatcagttccatgtaagcatttggttagcaagtctttttcaaaggccatgcttgagaaacagttttgctctcccaaacaatgtgttgtagttttttttagcatactactgtgcagataaataaatgagatattaatgccattgcaagttctggctttgtgtagagttttctagtgaagcctgtttaggatcctggatttgtccaagctgttctgattatcccatcatttttaacatggataatctacaatctttcatctattacataaattgaattctggcacaagttcaactgctcttcattgaaactgagaaaaattttaggatcactttgctggaatccaaagaagatgttaaatactaccaaaaaaaaaaaaaggctgaaaactggtttccaagaatctctggggcatccttaagaactccccttgcatgttcattagacggccctttacccaatgtatctctaatagtctgctgaaaatactcaaaggagtcctcattagagggaagcagaaagaccaaagtcagagacggagatgtggccgtagaagcagaggtccatgtgctgcggggccatgagccaaggaacccacgccgcctctgggaactgggaaaggcaagggagcaacgtctccctggagctccagagtgagccagccctgatgacaccgtgacttcagccctcggagactgactgtggacatcggacctctgtcactattttctgcaaactaggaatagaagcaagcttcttaacctgatgtatcgcaccttcaaaaagcctacagcaaacatcttacttagtgatgaaaaactgattgccttccccataagattgagaaccaggaactgtccaggaagaccctgcagtctctctgcaggctcatgggagctcccagaactgagacaacacacggatccaggcctgcttcgaagtcagtgggatgcggcccttgaaagtcgatgtattgggttcctagggctctcgtgaaaacatgccacacctggctggttttaaacaacaggagtttattctgtcagttgagaaggctacaagtgcaaaatcaaggtattgacgggatgagttccaactagaggctgtgaggcagatcaactccatggctctctcctggcttctgctggtttctggcaaccgttcacttcccatgcctggtagacacatcactctaacctctgcctccctttttcatgggcacattcgcgcctgtgtgtgtgtgtgtgtggatgtgtgtgttaaggacagcaatcattagactagatggggcccactctaatccactgtgagcttctcttactttggtaacatctgcaaagaccctatttccaaacaaggtcacattccatgttctgggactgtcttctgagagatgtctcccccaggatccttccaggtggaaggatgccctttgacctgcaaagccaggcagaaaaccaggatcagggcaggacaagaggatgctagcctgtgatggctcccactcaggtgggatgtgagaagtgcctgtggcctgggacacaccaacttgctcccgttacctcatctgagatggactgcacagtgtatgtccagggcccaacccggtacactgtgcctttgcaatgctgtctctgtgctttggaaattcactcagcccactgcgtggggtggtctgaggcgggccacaaccatttctcaaccatccctgagtacctgaccagtatccctcgggggtgacgacgaccgcctacatctggagcatgaggagcgtgtttacctggtgagtaaggatgcaagcataggacgtcctggccgatcctctgcacaagcaatgcctttgctccaacgggatgggcaacgttggattaggcctgaggcagatttgatctcggaagatacattcgagtctatgtgttttgtgcatttatttttgtttccttgaattaacatggagtccatttcaactttcacttagtctcctttctcttcccccacttctttctctctctctctttctttgtatgtggaagaattttaactctgtgttccataatgtctaaatactcaaatttagagttgacagccatacagcaaattattcaagttgctgtcaaaaaaaaaaaatccctgcgttttctaggattaaaactgtgaatagagtactggaagaaaaaaaagtcatagactcagatgcaaaatgacaacatttaatgggatgataaggaaataagacttgacaagaaaccatagcccactgcagactgttcacgatgtcagatggttcatgatttttttccaggtttgatacagaagaatcagtttgttacaagaaatgcttctccaactgggatttaaaacatcatttaaacaataaacacgtttgtatgtatatataaatagatatttagatataaaaacatgcatatataggcacatagacatgtacatacacacacatatgtacaaatatatatgcctaaatttttactgacctgtcaacttacaaaacaaaaatgagagatttataaaaggtacatatatagctgtgaattctttaaagctatttttaaagaaattaatataatcttaatgattatcagattactcatgcagtacacagctacacaagtctaatgaagtaccagacacttttctttcttcaactattgtcctatcttattcaggttttcattttcttactagatgtgttttcaatggtttatgacgtaataaaatttctttacctc

SEQ ID NO: 1445 - DNA, 852 bp, Homo sapiens
ggatcctgtagggaggcacctgggacgtccccagggactggtgcagccctatcctttttttttcttttttgagacagagtctcgctctgtcacccaggctggagtgcagtggtgcgatcttggctcaccgcaagctccgcctcccgagttcaagcgattcttctgcctcagcctcccgagtagctgggactacaggcgcgtgccactgcgcctggctaatttctgtgtttttagtagagggggtcttgccaccttggccaggctggtctcaaactcctgacctcagatgatccacctgccttggcttcccaaactgctgggattacaggcatgagccaccacgtccagcctggcgccaccctattctacctgggaggggtgtggggaccctttaggaggagggaggaaggccatcccgtcccctcattagcatctgtagggcggggctgcgctagctgtggaaggcgctgtctgtgtgccccagcccaggctcgctcttgccagcctatgccttgcaggattgtgactcgttccgtgcaggagggcatcttgctccgagtctgtgtcccgggtgcctctcttctttcttctctggagctcttctgtgtctctgggggcctctctcggggaccacctctagctccttgtcttccagtctccttccttcctctttcctaactccccaccttcacccgttcctctccccagcaccactgtgctgtgtccatcaccgactataatatccaaccgaactctcttttcactgttgaatacagcgttatttcttagaaaagtggctgggtactattcatatactggctttgggaatgtaataaatgcatcaaatctgaa

SEQ ID NO: 1446 - DNA, 2656 bp, Homo sapiens
cccagtccagcctccctactcagggccgagggcaccaggaggatggtcgttgcaaaagaatatgggaggccgggtgcggcggctcacgcctgtaatcccagtacttctgggaggccaaggggggcggatgacttgaggccgtgcaacacctgccagcaccagcatttgacacggaatcgaagaaaacaggcaggacataccctgactacactagtacaagtcatcggcgtctcggggtcctgggttttagaaatcacactgtcagggagggctgatggggtcctgggttggaggctggaagtggaggaatcgaggcataggcagaaacttgaaggaagggtcagccgagctggccagaagggggctcctcgccacggtccccagggaagcactttgctcatgggccccggccctgagagaggagctcctgcctcttcccactcggagagggctgacaggagaggcttggcctggtgtttcctgatgagatagcgggcacgttccgggaagcggtgagcaggcccagcagacatcagatgtggtgcttcctgtctcctgtgaatgcgcctggcccttgaggggggtctgggatggagagtcgggggaggggaaccccactcgcccttctccttgttgttcttggcagctggacttgggcaattgtgcctccaccctctggaggggcctccccctgtgctggctgcagatcagaggggcgatggggagggatccaccggtccaggcgggggctcaccttccagacccgggcgtgggcgagaggggtgcatgggaggacgcccgatgcctcagggcccccggtcagcagcgaggcacagactctcctctgggcggtgatggccctgcacgaggtccgtgtgccgtctgcctgcacagggagaggaaaggatcacgcgaccatgggtacgttggccacctgaaggttgagtcccgcagcctagagactggagcgtggggaccaggaggagcttcttagcggaactgggctggggctcatgcagccctccaggagcccccgacgcgacgccctggctcatcccgggtgaagaggctgctgagtctgaactgatgacagtggacgggtggccgccggttcccaacgcatggttgggcctggaacccaggtgactctgggagatgtggtcacagtcacagccgtctgtgggcctttgggttcaaaacagcgcgagtcacaggagacagaagggaatctgagcttgcgattgctcattcttgtcaccctcctggctctgggacacctctgccatctcctaccaagggtaccccattcctggcgagttggaaagtggcctcatgggcagaaaacgagggcaaagggagctgcgtgctgtgagagacgtccccgcacccaccctccccaccagctcccttgggcctttcctccctcccagccccacccacagccgggtggctcccttcactgtctctcctgggtttaactcagaggctggcgagcaggggctgaccagtgtgtgtcggagactctccgagtggccagcacgggcagggagctcataggcttggccctgagaccaggtcctgtctgagaaggaggcaggtcctgtctgagaagaaggacccccacccctcctgcctgggaccctgccttaggctcactctaatgacctaatttcaatttgattgaatgcaaatctgaatttgctagaagacctgatttcatctttccgggttcagtaaacatgacattctccgtgggggtttatttgtggaactcccagtcagagctgctgccccagcccagcagggctcagcgacgtgcactggttttaggagtaaatccgaagcaacagaagcgttcgcactggctctgggtgcagcctgcatcttcagccctggggcactgatgctgggcagcttctcggcttcactcgggaagggactcaggagcgaggtggtggggaagccagcagcttggctgaggcggcagtggaggtggtccagctccgcgactgctcccacagagcagggctgccgctcgggcagtgtgcagagtgcagccgcttggggccaacttgccatcatatgtataaccacttttaatgacatgctaattagggggcgggttattcagatatagctggaggatgggcagttgcttccaggtgttgccaaggcagtgagagcaacgggaactgcccttggcgcctcttccagctttggcctgtctttggtcgggtccggggaccaggcttgcctaccacgttttctgtgtcaaaacagtcacgcagaaataaacagtgacagcactgtgatgagaaaagcgaagaaacaacttatttcaactttctgacttttgttgtggcctcagcacttttgtttgtgcttaacattgaaaacagtgaggcagtgtaaactgtgagatgtgatttttcatttggtaagtgcaaattttagttcattcatgaaaccagttttgaagatctttaaaatagaatttagtcgaccttaagaattgttaattgtttacaactaaagaccaaaaatccaagagaataaagcgttgcaccagtggtaggggtttgtagttgcctaaattgtaccttttacagatgtttcattttattaaaactcactagtcactggatcttctattcaa

SEQ ID NO: 1447 - DNA, 821 bp, Homo sapiens
gacctggcctttctctgcagctcctcttgggaaggcattttcttctttctgcaaaccgtgctgctgtttgtttggagaaggagagctgtggccaaaaacaatccattgatacacttggtgacattaattgagaaaaaaacaatatggtctggccatggaggcatggtatccgtaacatcccccaaaggagctaaagaagaaatccacaatttaccatgagcatttctcgtctgaagattgccaagcgattcctccaggacattcctcaaggactcatgttcttaggcaaatgctttggggaatgtggcagtgatgtatgtgctggggaaacacagaggcaagcatggatgaaaatcactgtggaatattgaagaaggcttccaagaggaggtgacatttgagcttgatcgtgaacacgaagtaaggacagaactaggagctcaactagaggaagaggcaaatggtatactagtgtagactgtgttaatgtgtagacaactgaaagaagtggcatatttgggaagctttaggatgtccatggtgaaaagtacctacgaacaagagatcaatttctgttcatccaccttgtcctgggagggacatcaatgggtttccatgtcctttggcttctggttgagttcactcagtggagaaccctggcaagaggcaggaaaaggggaggaaggtaaaaatggtgctacccttggaaatccaagagcagcttcaagagtcaactataccagcaatccctaaagctggagaatttatgcccatggaaaagtctgtagcgttttgcaaactgtgaggctgaggaatagacc

SEQ ID NO: 1448 - DNA, 126 bp, Homo sapiens
tcccaatgaagaaactttcacatgtcttactctctgtcctagtcccagagcctgtaaaggtgaacccactgggactggctgggggagaagaggaagatttgttccagaaggaactgtctgagggat

SEQ ID NO: 1449 - DNA, 693 bp, Homo sapiens
agccggaagtgggcagagtttgcacggaggcggagctttattggcaaacctgattggctttttgaggcagaggaagctcacctatggctactgccactacaggtccacagggagtaatgcccggctaccactgatgttcattaagacccaagggttcttcagtcggcttgtggtagatgctgcctggcctgggactcacccttcaggacagtgggctcccttctggcccaaggcaggtccagaattactgtccaggagccaaggctttgaatcagggacctcaagagcccgcttgatgttctaccccactatggctgcgcctgtacctaaggtgcaaaagtcccctttacttttccctctacttttctccagcataaggagtctctccccatagccaccatggctggaaatgtgctgagtctcatttgaagccagctagtctcagagtctcacagaaggcccactgcatacctaggtatcgctggtatcgctggctatttggagcttaagagctcttcaatcctctgacatcttgattgcagcctttgagagaccctgggccagaggatccagctattgccatgcttaaatttccaacccaaatgtaactgtgagataaatgttgttttaagccactaatttttttaattactgtattaattttaacagataatacaataagagttttaaaat

SEQ ID NO: 1450 - DNA, 644 bp, Homo sapiens
gctgccatgtgaagaaggatgtatttgcttctccttctgccatgatcgtaagtttcctgaggcctccccagccatgttgaactgcaaagacactttcagaagaggaacgaaggcctggaaggaaaagcatcaggggaacgacgcttacgtctctcctcctccctccggtctcccaccagtgctcccattggctgaagccaaccagaagccacaggactctatcacccaggctggagtgcagcagcgcgatctcggctcactgcaacgtccgcctcctgggttcaagtgattctcctgcctcagcctcctgagtagctaggattacaggaatcctgaggtcagcatcatcccaatttcacagagtatgacatgacgtctcagagagggtaagcagcttgccaaacattccacagccaggaagctgtaggaccagcctgtgctcctaaggactggctcctggctgctatatatagaactaagcctggtggaggtgtcagaaatagaggttcacttctgtcatcaccgacctccctccacacctttgcaaaggaggaaactgagaggcagggatttccgcagagcaaggaacccaaattgctgcctcctgtgatttatacactgcaccccaagctgtaggggtaacc

SEQ ID NO: 1451 - DNA, 4763 bp, Homo sapiens
gtttagtatttttgagaacccagccacctggccatgctgtaccagccttgtgctgagtgctggggataaaggaacaaataaaacccagtccaggcttctgtgtgcccagccctgtgccgggtcccagtgggtaacagcatgtccaatcccctcagtgtcccactagaggcttcctttggggctgctggggacatcttgtttctagttgagaattcagatttatgtccaaagacaagaactccctgaggggcagattacaacatggactgggccattacaatcaacaaggacacaaagctaacacagccatcgttatacaccagacatgtgctaaggacttgatttccccattgtttaatcatcaccaactccattatcacccccatttcacagatgtggaaactgaggctgagaagagtaagggacttgtccaagggcacagagcaagtcagggctacggtgatgtttcaggcccagacctgtttgcctctggagcccagggtttaacacaccccagtgctgctgtgaaagggctctggacagctcaggctggccggccaattcggggataaccgaacagaggtatggaacagaaaggggcgttgaggatgttgctgtgtgtgtgcggtggggggagtgacaaggcttcagcaatggtactcattctctccaaccagctcccagtgctgctgtcctctgatccaccctccgctctgcctgccatggactaattgttctgaaatcccatggatcaagtcactcctcagctgaggacctgtccatggctccctggtacccagaggatagaaacccagcattcaaaacctctctaaccagctccccacctcaaccctcacactcctgctcactagcccccaggcgcagtgggctcttccagcggccaagcctgtgcctacggtgccttcttgcctggaatgcccaactcccccttctcagccttctttgactctcaagtaaggaaaagcactctttgtctccctgagccccttggcacttatcacagagcactctgggcgttaacttccactgtctccgtcttggattagagtggatctcagagggcccggtggtgtctgcttcacctccctctccactgcagcagcttagcaaggactggccgggtaaactaaaaaatgcaaagagctgagagaatcctgggaaagtgcacatttcccaggactgcccaatgacaagccccgtaccaaggcacagcatcaggataccctgatgtggaagaaccaaaaattgcaccctcatggcttatcaggatggtccttgtgtctgtccctttcaagggttctgataatgaaatctgggcaagtcaccctcctgctttaaaacttccaatggttcccagaggtctagcataaaatccaaactcaagggcccacataacctaggtgctgcctggcccccaggccctcctcttgccacgcccccctccctggccagcctccctcacttctttcagttcctcaaggactccccctcactaaagccttacccaggtcgcctctctgcctagggggctcctccattccctgctcactcagccacctccctctccctcttcaggtctcactttttaggggaggcttccctgatctgtccagataagacctcaccactcccacccaatcccaaacgctcccataacctgatcgtttccttcacagcaagaattaatcttcagtgtaaataatgatctactgaagacctatgaggaatgggaaagtcttgttttttgctgattcttcaacacccagctcagagcctaaatatctctcaaatgaatgaatatatgaatgaatgaatgaatgaatgaatgaatgaatgaacctatatacataaatcaagacaagaaggtgggcagaatcctagggaacactgaggcaggaaaagcagggccctgggccaggcgtcatggctcacacctgtaatcccagcactttgggaggccaaggcaggcagatcacttgaggtcaggactttgagaccagcctggccaacatggtaaaaccctgtctctactaaaaacacaaacattagccgggtatggtggcacatgcctgtagtcccagctactcaagaggctgaggcaggagaatcacttgtacctgggaggaggaggttgcagtgagctgagatcgtgccactgcactccagcctgggcaccacagcaagactccgtctaaaaaaaaaaaaaaagaaaaagaaagaaagaaagaaaaagaaaaccagggccctaactaaaaaagacaggaggaaaaacagggccctaactaaaaagagaggaggggccctaactgaaaaaaccagggccctaactaaaaaagtcaggaggaaaaacagggccctaactaaaaagagaagaggaaataaaccagacagtgcagcctcccagaagcaaaaggagggagtttctggaactgcactagagactggcacatggagtcctgaggaaagagcactggattggacatcgaggaggtcactggggcctccctgattgaaccaaggttccgtggaggtgggcacagggctggtacattgcagggggcagaggagtaaagagggatgaataagcaaagctctcaggcgacggttgctcagctgggtctatgccagcctggccctgcagggtctgcggaagacagggcccctgtgtcatagtcaccaaaagcatcaacagagcataacattctttttgttgacagattacattgaggcaacttggcttttggagttatcagggctcagtctcaaaggcagatgcatcagagccaagacccggccctcaagtcctcctattagggcagcactagggctacctctttgtcagcagaacctttggatagccgctgatggggtgagtcagctttctgggcccggcagaccttttgggaatccctggcttttggggcacaacatcctggggaccaccaaaaagccctttcacctgagctttgggaaagaggaacagctccggctgtgggtggctcatgtcaccatctggaagccagctgggccacagcagacgcgtaagtcctgtattcattcatccccttctccttttggcagaaaagggatggcgtgggttggaggggtgttttcctgggttcttgcacaattgctcattagaaattcacttctgtttgggtgttggaagctgggcgattccccctagtagtgatccttcctgtctcactggtcacaaagccctttggcatctacaagctcgttgggtccacacagcagctttgttaggtgggtagggggagaccaaggcacccatcctacaggtggagaaaccgaggctgaagctgggaggtgagccagtctcctggcttccagcccaggactctgcactcctccccccacctccccacctacttcagcaggtcacctgtgaatctgatagtcaggtgggccccaccctgccagctggccccagcgggcatgactcatccgcttccccatgactcacacacctcaggtgctcctcctctggtcaacaagtccagagacttggcaaatggacccccatttttctcacctctccaaagcctctgggaagaattcctgcacctcctctttatggggactctgctcttctacagaatagcaaccaaggccttgagagggaaagcaactctcctaaagtcacatagcaagcaaccagcacagccagggtgggagccaggcatccgggcaccgagcccagtcccggcctcctccctacaagatcactctcgcctgacctccctctcaaggacaggaaaggagcagagacgcactctgagccttattaggaagacctcagggactcccactgaatccactgtggctacagcggctgcttccaccactgaagtcccctccaggcttccctgggcagccagggcggggtttaagaggacgacaggtgtctgtattgctctacctacctaacaaggctgtgcagggtgaagagtgctgctccgtgggaaggcgctgggaccaaggccgaagcactggacaaagagagctatgagcactacctgtaaacaaagggcacagaatgtcagcctcagggggagttcaaggtcatctggtcaaatccccatttgatgtttcaacccctttcctcccctccaccaggggtcacacaatcagtacttgcacacatccagcaacaccgcactcactacctgccaaggctgcaagacctgctgctggagggtttggctgcgtaaaagaattgtcctaaggatgcactaaaatctctctcttcttatgccttgtacctgctggtattagctctgcctccttttgggtcagccagaacaggtctgtccccctctttcctgatggctctttggagatttgaagacagtgatcctgggcccctcaagtcttctacaaattgtgcaccccctttcctccagctcttcctgagaccagggtttccggttcgctcaccctgttccctgatctgctccagatgaaacctgtccctactgacagcacaagacccagaattagacaatcagtcaagctctatccaggacagggcaagcaggactctcacctccttcattagagatatcatgcttctattaattgagcctaaaatcccatttgcatttaaggcagccctattgcatggctgaattcagtttacagtcaacttcagagctgtacgttagtactctgaagttatataaactgggccctcacttaactgtgtaacttgagcaagc

SEQ ID NO: 1452 - DNA, 892 bp, Homo sapiens
caaatattgaagaatctctaaccaggctcgaaacgccggtctcagtggctattgagttacccaccaagttaccccggttagagctgtttggggtggctcacgttattgcggcaaactttggagatgacggctgagtcctccgggcgaacatgtcaagccgattgtaaatgctgttatttccacatccttcagggacaccagtccctacgaagaccttgggcgattttgaagtgcgggcacctcgattccccgaatctgtagtgtggctggtatcggtgttcccctggtttaactagcctgtttgaaggcacagatcattcatggggatgtataaccgaaaccagtcctctccaccgcctggggatcttcactttcgcagtctacgactgcctgtgactccagaaagacaaactgcagattggccaagatggggaaattgaggcagagaagccaagacatgtgctaaaggtcatgcaggctatgaatggagctggaatgtgaacgcaggccatatgaccccagagcccatgttcttgaacccttagaaagacagcagcaacacacctggtgcagcagctgcttagttggagtggctgacaaggttggcagaggatcccgttcctcccgtggagtggctgccatgatactgcctgcactgaagctgctcctatttctgaaatatgtattgttatttttttccctgcatgttgaacattatactcttctgttctttcgcattctcttcttcccttccggatgacttctagggtttttgtgattctgtaattctaaaggagaaaggataataagaattgtgaggccgggcgcggtggctcatgcctgtaatcacagcactttgggaggccaaggtgggcggatcactaggtgagga

SEQ ID NO: 1453 - DNA, 553 bp, Homo sapiens
gatgccatccaggcgcacggcgggtatagtggttccgcaaccttgggatgttcggctgagcgcctgcctaacatgggagcgcctgcctaaccctcctgactggagggtcagcggcggggagtcctggccttcaatcggccatcgccacggcagaaactggggcccgggctgcgtccaggcccttccccgtccgtccacaggtctcatgggcgcccggactggggctgatgtagtttcccgacctctgacacataggatctggagattaaagctgctctgctaataattaggttcccacctctcaagatcattaggagcttcttttccaattcctctgttttgcatgcattggaaggcccctggatcctcctggaatccctgatccctgttgctccctggcggagttttctagtccctcttacttgaagcatgtctttcagagcccggcaccacccaagttgggtatctgctcctgctgtcttccatgctggggacaggaaaggctccacgcttgactttccctcctgttttcttatctgctgtcaacccctga

SEQ ID NO: 1454 - DNA, 618 bp, Homo sapiens
gacttgcatcctcatgagactcttaaaccccctcctgaccttcagagatgtttatcatcagagatgggttatggaagtgatcctatagaacctgagagattgcttaactcaaactctgcttctacattagagtgtcttctgaaaaatgacctcaacaaaatttgctatctacctatttactaacataaatgaggaaaccaaaaaggtcaacggtgaggcaggaaggtttcagttcagtggagaaaagaaaatcttgatgaaatgtcattaacttccatatttggaataagctataaaagcttgtcgaaggtctaatttatgtgcaagactgaaagctgtttaaacggataatatgcctccttcatgagaaataccacccctttatgctccattaagttcagacgttgactctataagctacgtaccaattatttctttccagaaacagcaacgtagtttttttctgcaagggacaacagattattgtaggcggctattaatctccacatagttcacaaaatacacaggacactagggagaaaacaatcacgttgctattttaacatttgcaaaatgctatgtggagaggaaataaaaagaagatgcttgtctgattgc

SEQ ID NO: 1455 - DNA, 624 bp, Homo sapiens
ggagctggaaaggtggaggcggaagtgactgatcaattcaggggcgtggggttcgtttaggttttgccctgtgtatgacctcgtttggagccatgaaaccaggtctgtgaaatttagtgtctattttctaccataacacatgttaatttggactaaccacatttcgagtgctcagtagccacatgtggctagcgactactatcttgagcaatgcaacgataagtctgcacttacgttcaaaaagacttaaagcagggatcgacaacccccaggccacagactggtatggatccatggcctgttaagaactgtgccacacagcaggaggtcaccatgtgtgatgactacatccaaagagagtgagtggcttgagacattggtagtatgtgtatctgatcatatcaatatgttaaaatgacgttcaaagtatgatctacctcagaataatctagcctcaagctttattctaggaaggtaattctgaagatacctatcttcttgagagtgaaattttatggaatcctagatttctcatacctaggaataacaatacaagggacagaatagttagcagtgttcctgttgaaaggtccaagtatctccctaggcacagaaaacacccaa

SEQ ID NO: 1456 - DNA, 401 bp, Homo sapiens
tttgtaaactcaaatcaaggtgtatttattgcacaggcacaataaatgaacaaggcatcttaagtactacaatgacaggtgagtgggtcaggcacagtggcttggctagtcatgattagcaaaggaacttcaaagagttttggagcctgctttatatctgtgaaatgggaattatttccatctcaaaggtttgaggggattcgctgagagaaacttcttagcatgggatctccagaaactggaagccacagagaaagcagcggccagagggaggaggaatcggacaggctgatcacttggagtgttcgcctaagcagtttctagaaatggaggcagggaccatcaggaagctcaaaacctttgcttcagccgagtttgcagaacgccctgtgaggagaatg

SEQ ID NO: 1457 - DNA, 912 bp, Homo sapiens
actcccatccagcacataaacgctccccacgtccttgtttgaccctgagctgatgacacagcatgtggggaagactcagcagaaatggacggctgaagaccgagaacactgagcagagactgcggctgctgctcaccacctgaaagtctggagtttgaaccttcacaagttagaggcttaaaaacaccacggacttcccaggaacatccagaaaaccacagcttcgcagatccaagactaaggatgtgtcaggcagaagaaaaagccagacagacctgccctaacagcatcaacactgatcctcttcagggtgatccataagaattcagcctgcgagaacaaagcccaacactcttcaggggaagacaacagaatccaacaaaattcagagtctctaccatataaactctaccatataaacagtatataaactaaaattccaacacacaatcaggaagtactggacgtgtgaagaagggataacaggatccatgatgaagggaaaaagtagccaaaagaagcagatcctgaggctgggcacggtggctcacacctgtaatcccaggcgggcagatcacgagtaataggaagctacagaaaacatgggcactacgccctgtgagcctcccaccatgcacaggagccgccttctgaagaacgtgccagaagctgggagggctttgtgacagcagatggacggagctcggctcccaggaaggggctcagcattcgccctgccagtcgctgatactcagagactcaatagatgatgttctccaaacttcataaaatataagcacatttcactacaggaagacaaaggatgaataatgcctagaaaagataccgaatgtctatgccagctctggagagaccaagacctgccactggggagtgtctaccctcaagagg

SEQ ID NO: 1458 - DNA, 593 bp, Homo sapiens
tgagaccccagctcaaagacgacacacggagaagggagccaagcagcactgaccgatgtgggcagcgttattgccgaccaggaatttgtccctggacttcccctccgcactgctccatgctcaccttcctcttctcgggggtctccaccagctgccagctgttggccttgaggtggtagagttcatcgaacttcatgctgatatcctcgatggacagctgtagcaggtcccagaaccctgccaggtcctgggctgtggggcgtgggttggcatcagggttctgtgggccagatggggatcagtggggccagctcagcagaggcttgtcctgctccccccaaccccccaacaagcagggttcctctgggccctgccagcacccgcgggggctcttgaggcctagtgtctggggaagaaacagaagttcttggccatggtgtgacagtgacaccgagagaagcccgattcactcccaggtttctgctcacaggtcacctggccagggatgccctccctgaccaccctgaatgcaacagcaacaccgaccctgcctgtgcagtggacactatactgctcttacccttcctggttat

SEQ ID NO: 1459 - DNA, 2274 bp, Homo sapiens
gccagggctttctgcagctgccccacgcggctctgggcccgggcacacctgcactctgcctcgctcagccggctgctcagggtcgccatctggatgcgggagtcatcctgggcagaaggactgagcctagcctggtacctctgccacctgctgtgagggctgtgccatcctgcccagctgccccacaggggcctttctagagccccagccaggccgttggcctccctctgctccccagctctgcaccacctcctggaggccacctgtgacctatcttgcctgctggatgggaactccctgtgggcagggacagatggtggcccgcagctcgctgttgaaaagcaacagtacgtccttctcgcgggcctcgtcactcagcgcccggcgggcctcctgggcctccctgtgcagcccctcccggctctcctcgacgccctgcagctcctggcgcagtgcggccagtccctcctgggccacggtcagctgtgcccgcagcctctcagcctggggaggaccattcagctctagaggcccgctggggaccactgctccagggatagccacaggggcctgtggcctctgacatggtgtggcaggcacaggtgccctgcccaacttggtccccatgcgctttgctcaccccatggagccaccaatccctagtgctgcggaggctgcagggcggcttccacgggctgaggcagggccagcctaagagcccagaagaccccaccttgagcccctgggcccggccccacgctgcggcctctctggacccccaggacgctgaccactgccgctaggtcctggaggctctcgcgtagggccgtggtctccctctgatgggctgtgatggcatcctcaaactgggcctggagggccttcagctcctcagtcgtggcactgatggtggcctgcggggagaagggagcccacggtggcaccagggagctgggcccagcagtggagggtgaggctgctgggatgaggagacatccacggcccctgacagctgtgatgtcgccctctcccgctgcgcagtgccctggggatggggcacaagccctccatcccggctccgagtcaccgagcgtcccccaaggccccgctgcctggacgccccggccccccagcaggcggcctgcgcgtgcctctgtgcagtcagtgagaagggctcccgttcagaatgggcagagaagggggctgcctcccgcgcctggcaccatggcctgtgttctgttcactgcacactgaaccatacattcaacgccagtcaggactcaatgtgggtgtcctttcctgccgagagtttcctctggtgcagggccagccgcctcgggttgtttctcctttggaaggatctctctgggacagggcctgaacaggacggggcaacacttgatgcagtgcagagaagaaagcttaaaagcccgaaaatgctccatctccctgatggtgtgggagatgcgtgtgagcgagacaccctcagctccaagggtggcacgctgctccgtggaccaggctgtggaagcaatgcctgtcaaatccacacatgtatattctctctatgcccaggcccatctgggggagggcagcccagagacacgtgtgcacctgtgtgggctgacctatgcgcagtgtcaccaatgtctgtgacattgctgtaatggcaacaaagctggaggcaacccagatgcccgtggaaggaagaacagccacaggaagacccagttctggcagctcagcatgcagcccagaaacagaagaacaaagctgcagatacacagctgggaaaggccaccgagatgctttgataagtgagaagaggaaagcccaggagccggcatagacttttcattccttttgtattaaaaatgcagtgttggggaggtaacgctgtatatttctgtttgcaagcaatctttggagggtgttgcataacagaagatgtatcaggtctttgtcctggatcctcggaggaagcttctaaaccctgggggtttctcagaagtgtggagcgtctgcattagtcctggcgggcccctgggaccacacctgagtttatgctaatgaggtgactcagggtgggttcctactgaatttcaggatggggactgtctgctgaaagacccgttattagagggttggggctttgagccacgggatgtcagcccaacctcccagcagtcagagaagtgggcttcaatcacctaaccaatcactccaccgatcacgttacacagtgaaaccccaataaaactctggacaccaaaa

SEQ ID NO: 1460 - DNA, 601 bp, Homo sapiens
agcagaacttggactgagtcctgcaggacacagttgtatgtgaactatgttgaaaacaggatgcatgactggcggccagaacaaagaagtttggtttaatttctatctatacacccagtaaaatatctgtaataccactggaaaaccttaaaatacattatctatttcttgtaaaagaatgatgaaatgtgaatttgaacagcataaatatgtacaagtatctcttctcaacggaaaaaattatgtttgtggatgaaatatgaaccgagtttgtggatgaaatatgagcagcatgaatatgcacagatatctctcctcaatggaaaaaatcacgtacaaaatataagaacccagtttgtggatgcgtgaataatgataaattgaggccgggcgcggtggctcacgcctgtaatcccagcactttgggaggctgagatgggcggatgacccgaggtccggagctcaaatccagctcgaccaatgcggtgaaaccccatctctagtaaaaatacgaaaattagccgggtgtggtggcgcatgcctgtaatcccagctactcgggaagctgaggcaggagaaatgcttgaaccctggaggtgga

SEQ ID NO: 1461 - DNA, 1817 bp, Homo sapiens
taaacctgcactttaaacctgcacttgatcctgagcacagtagagagccactgaaagattttaagcaagagagtgccatacagtgttggaatgattcactcggacagcaatgtggaagatagaccagaaagggcaagtccagaggccaacaataatcttagcctcagagttctttttttaatacccaagaatactatttcattttacttatatttttaaacttttctctataacgctctctctgctcccccacattgttgtctggatggtaaacctaggactggtctctgagtcctggtcacagcctggcaacagaatgtttgagcaaactgggaaggctgccccatggatccctggtttcttatcaccatcctcttaattctacgtttgccaaccagtctctaggaagccagcgtgctcttgcgcccctcccaccaggtttccagttgctaagcgtgtcatgtttgcatttgggtatcatctgcatgagtgaccattttaatctctctttccttgactacttgttctacactagagtctagggtgggggtgagtacagtggtaaagacagggatagcgggaaatttagtcttctgtttaggaagctggatggtagtgtggattttctaactccttgtggtaattaaattctggagcacagtttttagaccttttctgaaatctgttactgttgaagtcagcttcatatatttcactttttttttttttgagacagagtctcacactgttactcaggctggagtgcactggtacaatcttgactcactgcaacctccacagctcccaggttcaagcgattctcgtgcctcagcctcccaagtagctggtactacaggcgcgtgccaccatgcttggctaatttttgtatttctagtaaagatggggttttgccatgttgcccaggctggtctcgaactcctggcctcaggtaatctgcccgcctcagcctcccaaagtgtttggattgcaggcatgagccactgcacccaccctatttcactattaagtactctcttcctgtgatattaatgacttatttgtttcaaacttttttgtgccattgagctttttagtgatccagtgaagcctgtggaccccctctcatagtaatgttttcaaagcataaaactaaatataaaggatcgcaaaggaaactgatcatgttaaaataaagttgatattttcaaagttttatgatccagtaacatacatattctgttaacacaaaataagactgcatggtggttctaaaattactataattcaaattcatatcttgaaatatctaacaactgtaatatatctaaatgtctcatttctattggtgacaaagtcacaggtactctgatcctactgtggactgtttcctatattcgtaattgaaggaaatgttatatttcagttagaagttggtgaaaagaaagatttaaaatttttcccatccaagttcaccagacccctggtttagaggttgtcttaattttacttttgtcattttaagagtaaattattttgttttcttgttcaattctcaattatttgggcttattttactgcctcttgcatgcttttttatgcttgaatggtttttgcagtgttagaacagtaataattgaagacttgggtggaaaaaaatcagcacctgattgaaaatgaaaggtttcaacaaaagctcttgataatgttacctccaggtgtaccatcatgccaccattattggtgctacaaatctgttaatttatttatgcttaagtatgtaaactttaataaaacttggatcatctgcattaaaaaat

SEQ ID NO: 1462 - DNA, 688 bp, Homo sapiens
ctggcagttgctgagttcggaagattaactctgaatgtggagagattattttcttgctcgtaaacctggtttacatattttcattcttaatgctcagtaatcttaaggaaagtcacctgaaagaatactttttcaccaagtactcttctgcgcctgtttgaaggtgtctgtgtgcttgtgaagcgctcccttgttagttccttctgtgagactcgggggagactgaagagggaaatcacctgcggggaatgaacaggaaagcaataagaagatttggaaaagaggcactggctactggaggaagggagaaatcaccgagagagcgaaagatgtaacagatgcagtgactcatgcctataatcccagtactttggaaggtcaaggcacaaggatccattgaggccaggagtccaagaccagcctgcacaatgtagcaagactccttctctacaaaaaaataaataaaaattagccaggcatggtggtgcactcctgtagtcccagctactcaagaggctgatgtagagaatcgcattatcccagaggtcaaggctgcagtgagccgtgatcatgcctctgcactccagcctggacgatagagcaagactttatctcaaaaaacaaaaatttaaaaagatatcaggtagctcatagaattgttgagagggctgtaaaaccaggcttgaac

SEQ ID NO: 1463 - DNA, 5582 bp, Homo sapiens
ccgctccgcagcgcagcgcatggagcccggcggggaccaccggagccggagcagcggcggcaggggcggccccgggccagcagtggcctcggcacggggccgacggctgccgcccgccggatcgagcggcagcgcggagccagaggaagacgaaggcgggcaagatcttcagctggaagggggtgccttggggtcctgggggagtgcccccctgccctcctccagggccaggggaccagcatcttcaggcaggaaatattcagaccactgtgaggcccgggcctcgaggcctggaaagagccgcatccctggccgtgaccaccggcgctactaccacgaccactggcggctggagtacctgatggacttcaaccctgcccggcacggcatggtgtgcatggtgtgcggcagctccctggccaccctcaagctcagcaccatcaagcgccacatccgccaaaagcacccctactccttgcattggagtccccgggagaaggaagtcatcagcaacagctgggatgcacacctggggctgggggcctgcggagaggccgagggcctgggggtccagggggctgaggaggaggaggaggaggaagaagaggaggaggaggagggggccggtgtcccagcttgcccgcccaagggcccaggcaaagccccagctggtgggggctgccggcgccagcggcgagggggcccagtggcaccccgggctcggcgtctgcgcctctcagcctcccggagggccgggggcagcagggggctgggggcccggcgcctggagaggaggctgaaggagtccctgcagaactggttccgggccgagtgtctcatggactatgacccgcgggggaaccggctggtgtgcatggcctgtggccgggcactgcccagcctgcacctggacgacatccgtgcccacgtgctggaggtgcaccctggctccctggggctcagcggcccccagcgcagtgccctgctgcaggcctgggggggccagcccgaggcgctgtctgagctcacccagtccccaccaggcgatgacctcgccccccaggacctgaccggaaagagccgggactcggcctccgctgctggagccccctcctctcaggatctcagccccccagacgtaaaggaagaggctggctgggtccctgagaggcccgggcccgcagaggaggaggaggagctggaggagggcgagggcgagagggcgggggtcccgggccggtcgccgcggggccgcgcccaccgccgccacccccaggagcgctggcggctggagtacctcatggagttggacggcggccggcgcggcctggtgtgcggggtgtgcgggggcgcgctggcctcgctcaagatgagcaccatcgagcgccacatccgccggcgccacccgggctccacgcgcctcggcgggcctgtccaggccctcatcgcccgggagtggagcgagaaggccgcccacctgctggccctggggccgccccgccccgagtccccccagggccccatcccccccggcactgccgcagcctccgacgaggggggaggggacgaggaggaggagccagaggaggaggaggaggagtggggcgacgttccgctgtcccctggagctcccttggagcggcccgccgaagaagaggaggacgaagaggacggccaggagcctgggggactcgccttgccgccgccgcctcctcccccgcctccgcccccgccccgcagccgggagcagcggcggaactaccagccgcggtggcggggcgagtacctgatggactacgacggcagccggcgcggcctggtgtgtatggtgtgcgggggcgcgctggccacgctcaaggtgagcaccatcaagcgccacatcctgcaggtgcaccccttctccatggacttcacgcctgaggagcgccagactatcctggaggcctacgaggaggcggcgctgcgctgctacggccacgagggcttcgggccgcccgccccggcgccgcgtgacggcggcgcggacctcaagtctggcgctgtgtgtcgggcgtagcggcctagcgggcccccgggtcaggtcgggtcgggtcggatcggccccgccccgccctgtgctcgcccggcccttcggctgggagaccctcgcgtccggtgttagcgcttcccgcggccgcgccccccgctggccgggccgggcggagacgggggatcgggtggggccaccggcgtctgcgcggtgccacttgggtccctgagccagtcggtgcgctgcgggaagcgcactctcccatcggcccggagccctgccctccccgcgcagggcccacgttttccgagaatcctcagtggcctccacgtgttagcgccgagcgctcccggccgcaccccgcgagggggttctccgcaggccgggactgggggcgccgtcagtcagtattagggccgaaggggggccgtgcgggctctggctctggccctggctgggggcccagttccctgcagccttgcacgctggcaggcacggctcccggcttgggggctgctggctgcccttccctaattgggattctcggcctctcggaggccccggctgcggactggggcttccagcgggaggctgggccgcagggctcgggagccttcccggggtgggaaggcgcgttggaccgagggcggggctacgcgcccggggcccgggctggaccagctgcgcttacctccccggcaggctcagtgagaaccgtgcgcccggcggccccactctcctcccaggccgctgccacgccctccaggaaagctcttgtaaagggattagcacttttttcctttgctcctcttgccccgagggtctctgcttacccctaaaccaagtccgtgggagcccggggcacaggcggtcccggcagtcagccttcgattcccgccccatccccatccccctttgtccgcggtggatgcggcgtccgttctcaacccgcagggcctggggccgggcctcggcctcttttccccgtggcagccgcaggccctgtgtggcagggatggggccccgcgatctcccaggcaggtccgagagggatgtgtagattcattctcctgtggagaacaggtggccccgagatcaggcccttttttgctctttgtattttattttgaaactgtatttaatgcttttatatgaaagggggaggggcggggacagagctgacccagtcacccttatgtgcaaatgtcttatttattatgcgtgtatcagagataagctgtgaggtggtggagggaggacctgaaggaaggaggagcgagggcagaggcggggacgggaggaccccaactagctgtgctgatgttaatcccgctgggagactccgggccctactgtctgctcttcacaaagccaggctgctgcaggaacagttcccgcggtcctaaagccggggcggggaggctagtgggtggaacttgagggttgggtctggaggaagagatgcctgggcagcgtggtccagcccctgcctcggggtggaaaggcagagagcaaagaggaggcccctcttattccggacccccaggccagagcccaggagtgggaaagcagagggcaaagaggaggcccctcctctcatccctgacccccaggccagagcctaaggttcaagtgcctcaggcccagtccccttgacgcttcctgtttgggagttggattttataccacggattttatagcatttttatataattgaggattgtcagaattggaaagggccctggagatcactagtactaccctcctcaccttcacagataggtaaattggagcccaggaaccgagatgatcacacagccaggtagggacagtacaagaactagaatgaaaatcctagctcctgactcagtgttctttgcacgatgccacactgcttcccaattcgctggtcagttattaaaatttgtcaggcctgccgaaggattgacatgctgggcaatgcaggccaccacggtggatctgtgactcctgaaggtggcaaagccctgcacactgccttgggatgagcacactgagctctgcagggcctcagctggaaggcgccatccaatcgtccttcccctccccagcagaactccagaggtggggcggctgccgcagggcccaaggctgcctcggcagggggctttgtgctttttgttgtggaggccaccagggattcaggaagatcctgaatgggttgtcaattgactgaaaagtaaattcccagtgagtttgaacctccacggtttttgagacagtattaaaagcttgagaacggagattatggatggcaccaggctgggcactgccattcttttactttccttcatgcattttttcggatccagagtattaacaccactttttttactctgcccattcaaaaacagtaggcaaattgggggaaccaatttataatcactcaagcccactgccaaagttcggataagccagggcagaggggttagattcccccccctccgtaggcagagagaggcctcaggagagtggacatctttactgagacagccccaaacacaccagtggctctcaaagtgtgtccctgagaccagcagcatcaccttaggaatctgctagaaataaaaattcttgggccataccccagggttactgaatcagaaacttggttggggcctagcagtgttttcatgagccctccattgatcttgatgcagctgaagtgccgggcaccagtgaaagggaagggctgcggtagtgattccattgattcctgctttgatggaagttatggcctcacaggttagacgttgcaagttgagttggccctcttgcctaggtgtgcctccttgccttgggattctgacatgaacaggtgaagtctcttcatgattttttttgttgttgttgttaatggtatgcttgctattatggccaatatgtaaatgttactctgaatacatatttatataccatgttacttagtgacattattcaaacatttgtatgcgtatttgtgaaattgtttgcatcagtcatttaaaaaatatttcagcctaagttttctaagaggtatgttgaatacatttttaaaagccagcttaagggtcacagcagccttagtttaggagaagagctaatcacaggtgaccactcaagttctttcaatgaagacctgatgatgtatttagttcccattttccacggtgattgactcaatttaagtgtattgtggctatatgtaatttacaggctgctttgcgttgcaggtgggaaaatctcccaggctggtgtgaggctgaactggggtaaaagaccccctgacccctcctcattcttctaaggtcaccacctcttagagggtctcttattttctttcagagatcaaatgcacagttatgctgtacaactaaattctgcagtcttgggaatccttacgagtaccaactattagtcactttttaaagtccccaaagtggagtgaggatagggggagtggaagcagtgtttggttcttactttacccaaactgtgtataaagaataaagttagcagaatgatgccacagtca

SEQ ID NO: 1464 - DNA, 661 bp, Homo sapiens
agagatttgtatccattatattcagtagcctgcatgtgtccaaatcacaaatgaaatgatgtgggcaaatataaattaaaattgaatgttgcagaagtggttgaggaacttcaccaggatacattaatgtacaaactgaaaactgatgaaagacttctgaagagagatttgctaggaaaaataaaaagatatataaatttcagtgatgctgaaggagaggaaggatgtgatgtctttccccatccgtcataagggtcatggccaacactcctataacaaaaggttttgagaagccatctgcagctcacaactagatgagtgacacaatcagatgtgcgtatgcaaaaaaaagcctggagacattgaactaagatcaaatttaatgtattaaatatggtagaaagaagagagaatgaaaaataatgttaacaatctaggtgaggaattgctgaggagacaaattaagtaaatcctgtggaaggaaagaagaaaggaggaaagaggattggatggaagaatctccacttctcagtaatttgtttatttactttattagtttacatccatgtgattggcatctaaattattattttaaagttagatgacttttgctaatatccttgtatttaaatttttaaaaatacatctttttattcttcta

SEQ ID NO: 1465 - DNA, 4125 bp, Homo sapiens
gggtttgctgatttatagtttaagaaactgaggcagcaggattcatgctgggcattctgtgttctgggttccaatgtttaacggctataccatcaagggcacggagccagtcttggtagatgtgaatgatgcttggatctgtcaagatgctagtagtgattggtgtatgtcctcacaactcagttccccctaaaaccagcaactggagtataagtgtgaagactcatggtttgatagcaatgcttgtcaaaaagggggcaagatggcctgtaatcccagcactttgggaggccgaggtgggcagatcacgaggtcaggagatcgagaccatcctggctaacatggtgaaaccccgcctctactaaaaatacaaaaattagccgggcatggtggcgggcccctgtagtcccagctactcgggaggctgaggcaggagaatggcgtgaacccaggaggtggagcttgcagtgagccgagatcgcgccaccgcattccagcctgggcgacagagcaagactccatctctaaaataaaataaaaaacaaaaagggggcaagatgtgctccctgtgggtcaagagtgtcccagacagcttttgggaagggtgacaggtgtgttgctctatttggccctggtcagactcatctggattgttgtattcagtactcagcattgcaatttcaggtggtcatagattcactctgtagttttctgtaaagcacacaggagctctttggccaagtttcagctccaccgaagtcagcgatgagaccgtggacaaagtgcctcatgtccctgagcccatttcttcatttgtagaagaatccagtagttcaggatggttttgaagacccagtcacattggatgtgatctgtataaaagtgctttatgtggtggtcgtgttttatttgtttcatatttcagaagacgggaaggtgggtctcgcaaccatggctggtttggaggcatgtacaagaacctgggctcttcactcaggaaaagagaagtctagggaaacatggtagctgcctccagtagaactgcaatatgaaacaggtcttcagaggcttccagggcgaggggaaaccatgcagggctcctccccacctccccacttctgcttgttgctctgcgcttgtccagagacaagagatgttgactaaagtctatgcagggaagttacttacaccctcctaggtccaaaagctgcccactgcctctggagtgttagagcagaaagtgggcaggcatgggcagggccattgctgcgggaagttaagaggcaccagaggacagttcttccaacttagacggtttttgtgaagtgaaagcagactgcaggcctccagcactggcgcagactctgactggtgcaggcctctaacactggcatggatttagcagatgagaaagatgggtctccttacaaatactggtcactagtgagttgggccttgagagacagagaaaacaggtatctgcctaaggtgtgtctggttaactatattggcccttgaggtaatctacaatttaaggagttttagttcctctaacattttaagaaatcattctcatgtttgagtgccatgtttatagtaccaattttgggggccagggtgggaagattgccctgagcaaagctgtccattttcccatcatctagttggttttcatggagcggcccacctgctccccacctcaggagatactggaggactctagccctgcggtggctgtggtcaggccaagggcaggccaggcttccttcctaggcttcagttcattcccccatcttgctgccaaggtacctttagatgttttggtcccctaaagcatttaaacagactgtcgtgtaaaatgctgtctgaacaaagtctcccatgaacccacggcacagtgtgtacctgaacctcccaagagaaatagtaaaatcaccacatcatcaagttgcagctcagggactacgtagctttagtggtgatgtttgcaggaaaaggtttcagagaaatttgaaaattggcaggtgcactttcttgacctttccaaaaatagtctgagtcactttcactttcagccttcaaactgtgttgaatgaaacctttgtgcagtttacagaaagtgaagaactgtttggcaagagagagaagttcgagctcctaatagcctcggctgcattgagtaacatttcttttgagttgtctattaacactttcctgaaacatgctttttatgacgcctagaacttgtgtaagagtgactgtaatttgagttatttaaaaatgtaagtacaagaaatgtgtcacacgccataagagctaggaaatgacagctcacattcatcttggtggaaggaaactctaattattggaagatgtgattggagtatttgttcttaatacctacggtggctctgttatatgcttgcctaacaccagtattggcttgcaaataacactgaaaagctcctttcttttcctctggtctttgtgggaaggcatggtatgagtcgagattgctaaaccactcttctgagaggactcagagagagtgtttatcctagactatccatggccctggtacttctgagttcagttgtggtgtgatctcattagtccaggctcagaatggctcggtaacctcaaaactccaagccctcggtgcttgctttgcttccctagacttgcagcttatgtacgcccacatgtgcttcatgcgtattaaaaatgcttgcatgtgtagataggaagatatatgttgactgtcctgaaaaacttgacatacctaacatttaaaattgttttgagtttcccccggggataaactagtcttcaaatgtaaacgtgatgagcagcgtaggggctatggtaccagagaaaagagccgaatctcggccctggtccagccctacctctcgtgctctgtcacctgcagcagaggtggagtgggggccatgtctgtgagcgggacctcatcttgtctattcctcagacccacccaagggcagggattcccaaaactgctggtacctgtaagaggtattgtattcttggactccattccataacctctcatcaggattctgggtttggaactctagaatcaatgttgaggaaaaatagaacttggcgattttatttttctagatataattcacataccataaaagccactctttaaattgtacaattcagtggttttttagtatattcagagttgtacagccatgaccactagctaattcagaatattttcattgcctcccaacaagcctagtactcatgagtagtcactcccttgcccattccctccacccccaagcccctggcaaccactaatctactttctgtctctatggatttgcctatttgagacattcatatgaatggaattatataatatgtagacttttgtatctgtttttttttcatttagcataaaaattttcaagatttgtccacagtgtagtgtgtctcagtacttctttcctttttatcactgaaaatacttcattgtatgtatatgtcatattttgttatctactcatcaattgatgaatacttgtattgtttccactttggctgttacaaataatgctgttatgaacatgtgtgtacaagtatttgtgtgggtacatgttatttctcttgggcatacctacagatggaattactggatcatatgacaactttatgtttaactttttgaaaaactacaaaaccaacaagctgtaccattttgtaatcccaccagcaatgaatagggttctaatttttccacatcttcatcaatatttgttattgatctttttgattatagccaatctagtgagtgtgaactggtatcttattgtaattgtgattttgatttgcaattccctaatgatgttgaacagatgttcatataattgttggccatttatatagtctttagagatatatctgttttgcccatttctaactgagcaaaacagacaaaaattgagttgtgaatgttctttatgtatactgtatacaagccccttaacagatatatgatttgcaaatcttttctgttctgtaggttgtttctccatgttcttgttggtatgcttggaagcataaaagtttttattctggtggagtcca

SEQ ID NO: 1466 - DNA, 134 bp, Homo sapiens
aaaaagggcttctgtcgtgagtggcacacgtagggcaactcgattgctctgcgtgcggaatcgacatcaagagatttcggaagcataattttttggtatttgggcagctggtgatcgttggtcccggcgccctt

SEQ ID NO: 1467 - DNA, 4200 bp, Homo sapiens
atggacctcccccgtccccgccatccctgccgatcctgttgctgccgccttcccgccgtgctcgggctgcccgggactctagccgccaggcttcgcgtcgcccagcggcagatcgggctcctgggagcctctcccctggccgtttgctcggcctcggccccagctgccctggggcctagccactagctcccctggcgctagcctaccctgtcttgaccgcaccctgaagatttgggaagtctttctccatcccaagagtcgtctctgcaaaagttggtgtccttcctggtgctgaaccacgcttctgctcaaaatgtgttgagcgtcgtctgtctgcaaagcacggtgccaggagctttggtggagaaggcatggggtacatgtgtaaagagtacaggcttttggttaaacctgaagtcctcctctactttctgggggaccctggccgtccttgctgagcctccgttgacttctctaatggggacggtaatgcctacctgaccacaagctgatgagtaaatgagctatgagtgcaaagtgtggtgcagttctggcgtgtgccagcctctcaagtgtcagtttccgtctcattcctcttaatcttcactaaaatggacaagtattcattgagcacctaatgcgtgttcagtatggtgggagatgagggatgacagtattatttttctattttataggttagacatagaacaaaaggttgagtctattgcccatagccgaacttttcttcattttctactgtggtttagaagtcggtatagtaagttaagggttgttagatgtgcattttcacagctcccagcttccacttaggagtagataacataggggactttgcgagctggtctctttccctcttagcttcagaagggcttcgaggtagccaccactgaattagttgagagacaaggcacccctacggaggaaatctcaactgcacaacccctactgtgccccaattcagcaggaagcagttagagcggtggtcaaacctccccaatagcacttgggttttcctgttgagagggggtactgagagacaggactagttggatttcctaggctggctaagaatccctaagcctagctgggaaattgaccacgtccacctttaaacacggggcttgcaatttagctcacacccgaccaatcaggtagtaaagagagctcactaaaatgctaattagggaaaaacaggaggtaaagaagtagccaatcatctatcgcctgagagcacaacaggagggacaatgatcaggatataaacccaggcattcaagccagcggtggctaccctctttgggtcccctccctttgtatggaagctctgttttcactctattaaatcttgcaattgcacacttttctggtacgtgtgtgtcacagctcaagctgagctttcgctcaccgtccaccactgctgtctgccgctgtcacagacccacagctgacttccatccctctggatccagcgaggcgcccattgctgctcctgatcgggctaaaggcttgcccttgttcctgcagggctaagtgcccaggttcgtcctaatctagctaaacactagtcactgggttccacgattctcttccatgacccacagcttctaatagagctataacactcgccgcttggcccaagattccattccttggaatccatgaggccaagaaccccaggtcagagaacacaagacttgccaccatctcggaagtggcccgtcaccatcttggaagcgacctgccaccatcttgggaacttggggagcaaggacccccagtaacatagtgaccaggaggaaattcttcctctcaacagctaatgcagcaggatctcttacaccgtaccctccctcaccttgctcttgctcttcatggtagaacacgtaccatatcttagctgtactctatcaactgcgcatctgaagtaaagagtgaagtcttctttgtttccagtcatggagcaacaacttgctatgatactggccttctgtagctgactcttctttgtctacccaggcactctaatggaactttaattctagctaaagttattttctcagactcctttgaagcaaggggcagccatttgacacacttcaagccaatgagttgaatgttgaacttattgctgaggcttctaagaaagcatatagatggaagggctctgcgaatcagagctcatctttgccctacacctgtcttccaggaggaacgtgaagagctacagcactcatagttcagtcatgaaacaacaaacaggagaacaatggcctgcattccaaggatggcagagcagaaaactgtaaagaggctgggcatttgatggcattgtggtgccaccagacaagccctaagctatcttccctaagacttcttgttttgggtcaaattcctgtttaagccaggaagttttcacaaccttcaccacccagtcctgcagctgttgtctcatgcttgtgactcagacttccaggaatcctttagaagtgatgtggtgatctcgtttggcactatgcaatgtacactattaatgaaggtaccctaataattataaatattaagacagaatgtgcatttcacagtgatttaaacactctttaacactctttaaaacagtccatcaaaggttcgctaacacagagaaaaacatttaaaattgtaataaaggctgggcgcagtggcttgcctctaatcccagcacttcaggaggccgaggcaggcagattgcttgagctcaggactttaagaccagactgggcaacacggagaaaccccgtctctacaaaaaaattcaaaaataagccgggcgtggtggtgcacgcctgtgttcccagctactctgaaggctgaggtgggaggattgcttgaacccagaaggtagaggttgcagtgagctgagaccataccatgcactccagcctgggtgatagagtgagactctgtctcaagaaagaataaaaagtaaaaataaaattgtaatgaacattcaagaaattgaaatatacgggtacaaagatgatatagtatcagaaaaaatgattttttttaaattttacagccacttgaattaagtacctaaaaatgcttttgatgctgttgagcttggctatgataacaacagtatgtaaatattccacttttgttaaaatatgtataaacaggtatgtgtacagagcagtgtatgaaagggtggtccccagaatattgatagtgtttgacgtggaatttgggctaggaaaaataattaccaatgaggagatacaagatagcagcagttagggagaggccgtccatgcagctgcctatttaaatcactgtccatgttaacagataagaactggaaatgtcaaagaacaattgcccagctcagttaccatctgctactaaagatagccccagctgggtgcgatggctcacacctgtaatcccaacactttgggaggctgaggcaggtggatcacctgaggtcaggaattcaagaccagcctggccaacatggtgaaaccccatctctactaaaaatacaaaaaattagctaggtgtggtggtgcatgcctgtaatcccagccactagggaggctaaggcaggagaattgcttgaactctggcagcagaggttgcagtgagctgagattgtgccactgcactccagcctggtcgacagagtgagactcagtctcaaaaaaaaaaagcccgtaatgagaactctcaagagtaccatggtaatataatatggtaatagataataaaagagtcatgatcattaataataaatataatacttctacttcaactgaggaatggaaaactaaacatcatatgttctcatatgtccctaagctatgaggatgcaaaggcataagaatgatacaatggactttggggactttcagggaaagggtgagaagggcgtaagggataaaagactacaaattgggttcagtatatactgctcgggtgatgggtgcaccaaaatcttaaaaatcgccaaagaacttatgtaactaaataccacctgttccccaaaaaactatggaaattaaaaattaaaaaataagtataatttctgctttagcgatattaactattcagtacacaataagtgagtttagcaattcagtgatttctgactgttgggtagctctctttgttaacaaataaaatataaatttgaagaaa

SEQ ID NO: 1468 - DNA, 6411 bp, Homo sapiens
aaacagcgattcttctgcagtgaatcacttccagaaatgaatagccacagttttttggaatgaacgttgtgaaatccctcctttataatggcaggttttcagttggtggttttatcagaatttctcaagatcaaaacgaaaccttctctttaaaaaggaaagaaagtactatcgatacagaaagcaaaagtatttccagtctcctactgaactgtcacggcagacctctctgtatctatatttagagctgtatgtccatatatttgcctgaatgtgtgagttcttggaagtatggattcattgccaggagctggtgatttcctaagcagaggtcgctaactacaagaaatgttacactcggacaagtcctgcgcttggggatcctctgtacgcccgttcactggtgcaggtcttctgaacaaatgcctcctgaggatttctgtgcctggaaaatatctgttaacagactgcttttacacctacctatttggtgctacttctactcctcatgaccaaagctggctttcatggtttactcatgtacttactgatgaaaccctgagacttggggccagtgactgttcagaggtccatgtgaagatgcgctgaatggtataaaggacagagcagtaaagagtgctggctgaatgcctgggctggcaatcaggcatgttggagtttgagtcccagtctgccactccagctctgtgaccaagaggaagtgaagtcatgtaccctttctaagtctctagcccctcttctgaaagacgaagatgccaccaccaaccatgttagtggttgtgaatgccaagaaagtccatgtgaagcacatagcatagtgtctgccatgcgttaagtgttccaaaaatggaagctatgactatttcacagagtacacttcccatcacttttcagttcattttggccttctccctcaaaagcactccagtgttctgatccagctgataaaacaccaaacattcacatagtgctttaaaagtgacccactgtttttacagactgcattacatatgaccctaacaaccactgcaatatagaaattcgcatctccattctccagatcaggataccgaagctcagaaaaattaaatgatttgcccaggatcacatagttagtaagcagcccagccagatcctgtgttaacttgttcatccgcttcctataagaaaacatccattcaaggcacatggggcaacaaagaaggacttagagctgtgtggcccctcgtcagggcagtaccagttgcacccatagtccggcctgaatactcagcttaggactattgtgtccaatgtcccaaacattttgaagctacatcttaaagaagtgtcctgctcagatgcagttctccttgtgaaatccgcaggccccaaggaaagtgactttaatccagtttgctcatgcaagaacagactggcatttcacatccaggaaaacaatggatttgtactgttcagcttttgccatgcaaggagttcctggtgtggtttattaatttacatctcaggctccagcttcactatcaatcagatttggaagaaaaaagttacaaagaaaggcagcttgctgagaaacagcggaagcatgacggtacagactgggttttgaaatggagacacattctcatggcttgtgggctgagagacactgagaaaggattttgttcttgaaagatgattgttttaatgctggagatggagagttttgacaattttaagtgcatgttctgtgtgtaagaaagagtcattacgttttttttttctttcagatgttgccatgccttaaaattgctgatgattaaaatagaacatcctgagttacagaaattcagccctagtgtatcctggcctaaaaatacagaacaatcaagttgattgttggaaatgagaggctaggcagggttggaaacatgctaatgtttactgagtgaaatctttccttctcagtagagttgcccttgcagctgaaagtcactgaaagactcaacaaaataagcagatcccacttgtctcactctgttctcctatgcatgccctggaaagagaatgaatgagccctttttaatttatcaactggttttcttccatctctttactagtgagccatgggggttttttgccgttaactgggtagccagtctcttcatggagacttattttcaggaaactagcctcttgctttatgtgaaaacaaggacccaactcaagatgtcttatcacagtgtgttctgttgcgtaacagttgcatctgtagtccagcctcaatactcaggttgggactgttttgtcctgatgtctcgaacatttcaaagctacgttcttaaagaaatgtcctgctcagatagagctctccttgtgaaatcctcaaaccccaggggaagtgaccttaagccagtttgctggcttttcatgtcacagaaaacaatcgactgccactactcagctgttgccacacaggagtacctggcgtggtcactacttgccaactcagtaccccactttctccccaaggacataaaagcaatgtgggaagatataccaaatgaccttgtcacactgggctaatatgaagagcccacagatgcaaaataatgtatcatacctttattcttctgattttttttttttttttttttttcggagacagtctcactcttttgcccaggctggaatccagtggcgcgatcttggctcactgcaacctctgccacccgggttcaggcaattctcctgcctcagcctcccgcccagctaatttttgtattattaattagtagagagagggtttcaccttcttggccaggctagtcttgaactcctgacctcgtgatacacctgccttggcctcccaaagtgctgggattacaggcgtgagccaccgtgcctggccttttttttttttttttttttttttttttgagatggagtctggctgtattgcccaggctggagtgcagtggcatgatcttggctcactgcaacctctgcctcccaggttcaagtgattctcctgcctcagcctcctgagtagctgggattgcaggcatcccatacccggctaatttttttgaaacagaggcttgctctgtcacccaggctggagtgcaatggcacgatctcagctcagtgcaacctccgcctactgggctcaagcaactctcctgcctcggcctcagcctcactacaggcatgtgccaccacgcctggctagtttggttttttttttttgtatttttttagtagatatggggtttcaccatgttggccaggttggtctcaaacttctgacctcaagtgatctgcctgcctcagcctcccaaaatgctgggattacaggtatgagccaccacgcttagccttctgctgaatttttgagaagcatacataaagacaatgtaaaaaacttagcatatttgtttggccctgctaagggcatggttgaatatatagtgtgtgtgatgtatttggtgtatgagatatatatgatcttatcagacataagtaaaagaaattcattcttcaggaaaaattttccccataactgaagtgtcaatcatttgaaaaaacttctaggcagtaggcaaacactgtgactagttatttatcaaaaataagcagactttagagttttgtaactgatgagaataatctggctgcttcttttgtacttcagtcactgatactgcgaattagagtagcatatacagaaggatgcagggggtccctaaaggaatcacagaattagtgaaaccattatttgagagttgcagtgattcttctgtcctggcacttttcccagttttggtgcttaaatttactatccacttgaaatgtgtcactgcctgtcacttcacaaagtatgtgcctttcactgcagtcaacaagctgtttacatctttgatgaaatgattgccacgcatctccatagccctggtgttctattcccttattcacagagattttttttaaaaaccagcctagcagcaataggtatgtgctgtggatgcttctccatgatgataaaggatgagtttgtgctgggatctccttatgaaaagataactggccaagcccatgaggaacaagaatgttatgctaatcagacccaaggtaaacagcctgcagtgcacctcctgactgattagcactgaacccacttggaatcatcaaccacaggcacgtggtaattggatgttcttctaatacacatagtgagattgtaaaatgaggatgatatatgaggaaagtcagacggagaaactaaagttcagttcttaaatacaagccaagggaacagactaagtgaatggtacagccaggattggagcctggttttcacaaggtggtatgtcatgataaaacaagccaaagaaaaggttgggtagtgttttgaggctaaaagagaccaaagagtcttagtgaatcaaccttgatgcgatctgggtttgaaaaacctataaaaaaccttttgtttggagaaagtgggagaagttggatgtaggctggatatttgtgggtaccaaggaattgtttgttttcttaggtatggtaagattttgtggttatgtagaagagtgtcttcattttatagaacgacctcaaagtagttaggagcagtgtatgtatgggtggttatcaatttactttcaaacaatgcagcaaaaaatatgtatctatattacatataattaaagcaaaacatgataaaaaggaatagttattgaatttagatagtatggatttaggaattcattgtattgtcattccaatttaatgtataaaattttttataacagtttataaaaacagtgcacacccctttaattaggtggcctgggtacatgaagtatctttttggatgcctagaacacaaaaagggacgacaacaggccacctaataagatgataccaagaactataccatgacggcgaaaaagaactgctgcaaaaaataatttgccaaggagaactcagagtacaaagccttacctttggagtagagggaaggagagtcttaagtaaagctcacaaaaacccctaactcatagatgcagtctaaggaattcattccggaagcgacattagcatctcattagtgccattatgtgacttacttggcctctgagctagtctattttcttccctagaccccaaaatctcagtaatcctttggatccaagttatctccaagtgaaaataataggtttaggaaagcgtttttcttcaacttctatggagcacttgcttgctttgtcctatttgcatgtccgacggacggttctccagcaccactgctagtcgtcctccgcctgcctgggtacttgatcacaggatgcctctgacttctcctgcctttacccaagcaaaggattttccttgtcttcccacccaagagtgacggggctgacatgtgcccttgcctctaaatgatgaagctgaacctttgtctgggcaacttaacttaagaataagggagtcccaggcatgctctcccatcaataacaaattcagtgacatcagtttatgaatatatgaaatttgccaaagctctgtttagaccactgagtaactcacagctaggtttcaacttttcctttctaggttgtcttgggtttattgtaagagagcattatgaagaaaaaaatagatcataaagcttcttcaggaagctggtttcatatggtggtttagatttaaatagtgattgtctagcaccatttgaaatcagtgttcttgggggagaccagctgcgctgcactaccaacagcaaaagaagtgaatgggacagctctgaagtatttgaaagcaacagcaggatggctgtgagaacctgcctcacatgtagctgaccccttcctcacccctgccaacagtggtggcatatatcacaaatggcagtcaggtctctgcactggcggatccaactgtgatcgaaagttttccaaaaataagttgtgtctgtattgaacatgaacagactttcttcttgtcattattctctaacaatactgcataacaattatttgcatacatttgcattgcattaagtattctaagtaatctagagacgatttaaagtatacgggaggatgtgtgtaggttgtatgcaaatactacaccattttctatcagagacttgagcatctgtggattttggtatccaaggggctttctggaaccaatccctcaaggataccaagggatgaatgtaattgtacaggatatcgcattgttggaattttatacttctttgtggaataaacctatagcacttaatagatagtacagactcattccattgtgcctgggttaaagagcccaatgtatgctggatttagtaagatttgggccctcccaaccctcacgaccttctgtgaccccttagaggat

SEQ ID NO: 1469 - DNA, 5296 bp, Homo sapiens
ggctgccgtggtgcagcgcccgggctgagcgacagcaagtgcagcgggctcctaccccgggtgaggggtggcctccgcgtgggatcgtgccctcttcagcccgctcctgtccccgacatcacgtgtattccgcacgtcccctccgcgctgtgtgtctactgagacggggaggcgtgacagggcccgggtcccttctcagtggtgctctgtgcttcagggcaagctccccgtctccgggcgcacttccctcgcctgtgttcggtccatcctcctttctccagcctcctcccctcgcagccaggcggatgacccggacgacgggccagtgcctggcaccccggggttgccagggtccacggggaacccgaagtccgaggagcccgaggtcccggaccaggaggggctgcagcgcatcaccggcctgtctcccggccgttcggctctcatagtggcggtgctgtgctacatcaatctcctgaactacatggaccgcttcaccgtggctggcgtccttcccgacatcgagcagttcttcaacatcggggacagtagctctgggctcatccagaccgtgttcatctccagttacatggtgttggcacctgtgtttggctacctgggtgacaggtacaatcggaagtatctcatgtgcgggggcattgccttctggtccctggtgacactggggtcatccttcatccccggagagcatttctggctgctcctcctgacccggggcctggtgggggtcggggaggccagttattccaccatcgcgcccactctcattgccgacctctttgtggccgaccagcggagccggatgctcagcatcttctactttgccattccggtgggcagtggtctgggctacattgcaggctccaaagtgaaggatatggctggagactggcactgggctctgagggtgacaccgggtctaggagtggtggccgttctgctgctgttcctggtagtgcgggagccgccaaggggagccgtggagcgccactcagatttgccacccctgaaccccacctcgtggtgggcagatctgagggctctggcaagaaagtgagtttattcccaccctagaccaccatctgaggccccctggcgtctggtttgaggtttaagtggggatgttcctgttcctggccacaccccaaggccagtaattcggtcgatactgtccccttgtggcagctgcttgaattacaggcccagatcctgggagccagaaccacctctgcacggtgttgtgaccttactaaaataagccaggaagggagaagagaggtcccctcctgcctcgacacctccgtggggtcttactctctccctcccaactatctgcagtcctagtttcgtcctgtcttccctgggcttcactgctgtggcctttgtcacgggctccctggctctgtgggctccggcattcctgctgcgttcccgcgtggtccttggggagaccccaccctgccttcccggagactcctgctcttcctctgacaggtgcccagatggggctatgctggggggcctgcgggtggcagggctggagtgaagagcatctgtggctcagacccaggcagggagtttgactcctgacttcacaagctgcctgctctcctggaatctccgtttcctggtctgggaaataagtgatgggatgatgtctgccactcagggctgtgccaaccatggggtgctgtgtctgtagggaccttggttgtgagggtggctaggatggacagcgtaggggccttggcaggcacagggacaaaccccccattcccttccctcacccctagtctcatctttggactcatcacctgcctgaccggagtcctgggtgtgggcctgggtgtggagatcagccgccggctccgccactccaacccccgggctgatcccctggtctgtgccactggcctcctgggctctgcacccttcctcttcctgtcccttgcctgcgcccgtggtagcatcgtggccacttatattttcatcttcattggagagaccctcctgtccatgaactgggccatcgtggccgacattctgctgtacgtggtgatccctacccgacgctccaccgccgaggccttccagatcgtgctgtcccacctgctgggtgatgctgggagcccctacctcattggcctgatctctgaccgcctgcgccggaactggcccccctccttcttgtccgagttccgggctctgcagttctcgctcatgctctgcgcgtttgttggggcactgggcggcgcagccttcctgggcaccgccatcttcattgaggccgaccgccggcgggcacagctgcacgtgcagggcctgctgcacgaagcagggtccacagacgaccggattgtggtgccccagcggggccgctccacccgcgtgcccgtggccagtgtgctcatctgagaggctgccgctcacctacctgcacatctgccacagctggccctgggcccaccccacgaagggcctgggcctaaccccttggcctggcccagcttccagagggaccctgggccgtgtgccagctcccagacactacctgggtagctcaggggaggaggtgggggtccaggagggggatccctctccacaggggcagccccaagggctcggtgctatttgtaacggaataaaatttgtagccagaccccaggtgcctgctctcgtctttctctgggtggcctctgatcttgcaccccgtcttcaccccagggctcctgaagactgtgggtcattcctcagggctctgggtgagtctctgcccttctgggctgggcgactgagatgggggactgctcttctccgagtgagctggctgagtgtgaccgtgagtcacgcccctgcttccctggagcctgtcccttgcctcacaggcctggctgaggtgggggtgggcactgccctttgtaccccagaattcccactgtcagggcctccctgctcgctgcctccccgggtcctggatatggaggccacggctgccagctggcaggtggctgtccccgtcttggggggggccagcagacccttggtgagtgcctggggtggctcccgggcctcctcctgccccctccccactggcgggtggggtgggaagggggcgggtgcagccggctgagagcttgatgatttcctgccctcgcccggcgctcaccacagcttcctgccgcaggcgggcgggagggcgggcacggagaggcgggcgccgaggaggggcaggtagggctgggacgcaggggtaactggatcccccgacttcagcccaggccctggtctgaccaccctgggagcagggactttccacagtcagctggacgcacactcagcccagtaaaagaggggacccatcccgggagccccggggagggcacagctgcctcctcccgggctcccctgccacctggtgcctacctgccccctgctccctgccgggtccggtcctcaccccatcttcatctggccttgactctgcccttgaggggcctaggggtgcagccagcctgctccgagctcccctgcagatggaggaggccatcctggtcccctgcgtgctggggctcctgctgctgcccatcctggccatgttgatggcactgtgtgtgcactgccacagactgccaggctcctacgacagcacatcctcagataggtgagtccgccccagccgccctgggtctccctccacaccccatggcggggcagggctggggcttccatcctccatcttccagccccatccccaagctgtgtctcctttaccagtttgtatccaaggggcatccagttcaaacggcctcgtgagtacaaggagggtcccctaccttgggtgccagggagagggtcccctggtgtgggagtgagcgtgaaccttcagacttcccctgccaccttggggctgcccacatggccttgacctgagctgggagaggggagatggctcccccaggcctgtccagggtgtggggctttcaggggcttagtctgttctttgaggccttgacgatgtccggagtccttctttcaacttggttctgtgtcctcagacacggttgccccctggccacctgcctacccacctgtcacctcctacccacccctgagccagccagacctgctccccatcccaagatccccgcagccccttgggggctcccaccggacgccatcttcccggcgggattctgatggtgccaacagtgtggcgagctacgagaacgagggtgcgtctgggatccgaggtgcccaggctgggtggggagtctggggtccgtcctggactaggctgacccctgtgtcgttacccccagaaccagcctgtgaggatgcggatgaggatgaggacgactatcacaacccaggctacctggtggtgcttcctgacagcaccccggccactagcactgctgccccatcagctcctgcactcagcacccctggcatccgagacagtgccttctccatggagtccattgatgattacgtgaacgttccggagagcggggagagcgcagaagcgtctctggatggcagccgggagtatgtgaatgtgtcccaggaactgcatcctggagcggctaagactgagcctgccgccctgagttcccaggaggcagaggaagtggaggaagagggggctccagattacgagaatctgcaggagctgaactgagggcctgtggaggccgagtctgtcctggaaccaggcttgcctgggacggctgagctgggcagctggaagtggctctggggtcctcacatggcgtcctgcccttgctccagcctgacaacagcctgagaaatccccccgtaacttattatcactttggggttcggcctgtgtcccccgaacgctctgcaccttctgacgcagcctgagaatgacctgccctggccccagccctactctgtgtaatagaataaaggcctgcgtgtgtctgtgttgagcgtgcgtctgtgtgtgcctgtgtgcgagtctgagtcagagatttggagatgtctctgtgtgtttgtgtgtatctgtgggtctccatcctccatgggggctcagccaggtgctgtgacaccccccttctgaatgaagccttctgacctgggctggcactgctgggggtgaggacacattgccccatgagacagtcccagaacacggcagctgctggctgtgacaatggtttcaccatccttagaccaagggatgggacctgatgacctgggaggactctcttagttcttaccttttgtggttctcaataaaacagaactt

SEQ ID NO: 1470 - DNA, 587 bp, Homo sapiens
accagccctttggtaggtgcgctttgcttcctaacccgttgccgggttggagattccacctccgaagttttctttctgacttttgattttacattcctagtacagtggagaagcccaggcggcctagaatccagtgtcgtccgtgagtgcttggctggtgttcaagtgcatcttccagcctgagaccgcgtggactcgctcatcgtgagggcgagaggaggataagcccattgggctgtcggctgagagtgaggtgcgggattgctgatgaaatccttggcatcgtcggagatctcatcgaatgcctcgtcgtcgaagtcccaggtggctgaggtaacgttggccaaggtttcgttatcgttgtctcccatgaagggggaaaggccactgactctggagagacaagagcaggacagcaggtgtggctaggagagggcgcgacgaccagatgagggaattgaggcacagcccaggctcaagtcacctgcccaaagattcacagccagtgagattggaagccagcttgccaactcccaattccaagctaagtatggtattctgcccactggtgctgctgcctagccttc

SEQ ID NO: 1471 - DNA, 497 bp, Homo sapiens
cttctatatagtagacactcaaaatgcttattaaactgcatttacattcagcagagataaacagagtggaaagctgccatagcattacctgtggaaatgaatgaaagcctgtgattcggatcctaatgggagaaaagtgccatggcagaaggagattctgttgagaagataaatgccctctgactatgtcttcttcaatcctcaaaaatattgccattatgtttgagagcagttgataaagcatagtgtgctgggaagagtgctggagaaggagtcagttgaccttcacgactgtccaattctgcaatgagcaagctgtgtcactttgggcaaatcatgggttctctgtttctctgtttcatctataaagtgaggcaatgaaatattatgatcttaaattatttctttacagttatatgacattaatcaattcctgacttccttcttccattggtcataaatatgtgtatgtatgtataatatattcatagataatg

SEQ ID NO: 1472 - DNA, 366 bp, Homo sapiens
ccagcagaggtgggctggacactgctcctggcaaagctggccgggaagatgcagcccgtgggacactccccaccaccactctcacagtctgactgactgcgaagcttcacagaccagaaggttcattcctcacaagaaaaggaaaaccctggtctgatactactgttctgaaatttaacagccagttgggtccagcagctttgcctctctacccttttatcaccaaagtatactgctgagaaagaatcaaatgaaaagaaaaaagactcaacaagacctcactcatattaactggactctacaagcagtgagcatccagacctgcatttggttacaaaagaagccttcaagctattttcatcagct

SEQ ID NO: 1473 - DNA, 476 bp, Homo sapiens
aagatggcggcgtttgcacggagtgcaatcactgcgtccttacgggggttgcaaggcgtccgaagtatgagtccactaacaaaagtccagaaactcgccagttaatagtattgtgtctcttcaaaatatcggagaataatttctttctcgctgatcgcctaacttctactgacgaagcttggaagttgcagaagaaatacaaaaaaaattctaaaacttgtatggaactacaaaagacattaaataatcaaagtaatcttgagcaacaaggacacagctggaggcatcactctacctgattttgtaatccattatcaaaaaactgtggtaccagcataaaaacagattcactgaccagtggaacaggaaagcccagacataactcatacatttccatccaattgatttttgacaaaagtggcacacagaatggggagaggacaaataaataaataaattgttttgagatatctgta

SEQ ID NO: 1474 - DNA, 539 bp, Homo sapiens
ttaacagctcgcacagcattcctgttgatgtgttgttgctgagagcactttccagtaatctttctgcacacaaatcaccagctcaatctgtttcctggggaacttgaactacaacagaatgatactggggagtttgcaaaatcaaactaaacataggcagcaggaaggacacaaagcaggggagccccagaaatcttagtggtagaaacttttaaacctcttagggtaccaccagggtatctctgctcaatatttaaatccctggaagggagcctctgattggccttgtttgggttgggaatcagggccctgtgattagaactacctggggtagtggagaggaaagagaagcaacctgtgtcttccagaccatggtatctgaagttttcttggaggaagtcaaataaatatgtgggttgaggatgggagctctaagcagaggatgtggtggctcatttaagatcacacattgacaaagagcagagtggtgtcaagattctgggacagaggcaagttagaaataaaactcttgtttttcc

SEQ ID NO: 1475 - DNA, 362 bp, Homo sapiens
ctaggcccacagtaggccccgggcacattttcagctgcgaagcggaggactagcaaccggtgaggtagaaggagaaccaagagatggtgggagaatgggaactgagctgagagagcttccggaaggttgcggtggcctagggcgatccacgtcattgagaaacggcgttaggctgatttcacggggcagatgacatggaagtgctgctgaggaagacgctgagctccgaggtgaaaagggatgaggacgcctaagaagacacgagcgcaatacctaatacaatttcctgaaattgtttcatgtcacacgttaaaataatatgaaacacgttaaataataaaatggtatgaaggttttgtctg

SEQ ID NO: 1476 - DNA, 2592 bp, Homo sapiens
gaggtagccttggcgactttcgagactacccaggccgagcacacccagccccctcagacccaggcatttctgcgtcctctggtttggagggaacccagggggctgaggtgaagcaagccaggactgtttctctgactcttctggaagacgacccgctgctcgggccgcctcatcactgcgggccacgagtgcccttcttcattccagacatggtgctttgaacaatttgacttggaggcaagattgcgatatagaaaatgggccactgtggaggagataagtaaatgctttgtcgcttctaagtgacaggggaaactgatcacgattggtatacttctgacatgtaactttctatatctttagaagatcgtcagggaaatagaaaaaaaaatctgaaatctccaagtaggttctactttgtgtggttccaactaaatgaactaaatttgtgtttaaagattgtaagtctacatgtaatggtgaaagctgaaggttttacactgcacagaaatagtgatttccccccgtggagggcaagaagaccggaataggaggggtgggtgggggaatcaatgtgtaggccaaatatttgaaatttcagtgcaatcttcttagtcatcactttcatttctgtcttctagggaaatctgacacagctagaaagcaatggaaaacactaagagttgcatcagatgttgaagaggaactgatattatgggataaaaaatgattctttaagggagataactggtcatttaaaggtagcagcctttttgggaaaagctaacaagtgttcccgaggccagcctgtctcttgttagcaacattggccctgtgttagaaggaagagtggatgtgttttgatgctattccttttcctctcagcataaatttgcaagcatgtactgtaaatgaattttcatgtcttttcaggatgtttccctatagagcagtttctagattgactctgtggaacagtctacaatagatttaatatggttaggattttgcctaattctgattgtaggtctgggtgaggcctgagagtctgcattttcaataagcatctagatagtgcctgctgtttatggactacactttgaataacaaggacttagaagatgaagaacaaagagcttcatatagatcagcaacactctttggtgttcttcctcctgtgttcaagtcagtgattacatatcctttttggacctcagtttccagtcctgccaaataagggactaaggctggatcatgtttcaagctgtcctgaagagacctctaactctgcagagaagcctcaggaccccaccccctcaccccaagaaaagtgtgaggctagtgtgaggaggaagaggagcagagaagccaatggagaaggaactattctttagaaaggtttcaacggtgacctgccaacagctcccaaatctacaggtttcacccaatttttgactcatgacctgttgacaacctccgcctggatatgtcatgggtttcctcaaaacccaacatttacaaaactgaacatcctcaaaacatcttccctttctcaccattcctctcagttaacagcatctccatatactccatcacttgggtggaacatatcagagtccacttagctttcttcacaagcctttaatggaggaaatatttattgagtatctaccatgtgccacccactgtgccaaccactgtccatatgatggtgaataaccaagacaagggcttgctctcatggagcttgcagtcttgtggagaaaaagataatagaaagtaaagacatactttactttcaggtagtgagtagtgctgaaaataaagcagtgggagagagagtgatagtggaagctactttagaaaatgtagccagagagggcctctcagagagaccacttgaatgatgagaagggccgtgaaaagaagggggatgataaaggaaactgcaagtacctgagccctgagacagttaaaaaaaacatctgagagaccagtgtctggagtttgggctgagcagagatgaacttggccaaaccacgctggacttgtacaatgtggtaaaaatgatggatttaactgcactttatcttaatatatctcttttatcaacaccttcctttccacgctcccagccgcattgtttatcaagaacctgttacatttcacttgactatttaccttctcaacttttccaactcctcttcctcaggcacctttgctggctcttctctttctctctttacccgctatctctcagcaggcctcagacttctctcctgtctctcccaagagtgctaccctagaccagcctgcctcagattctgtttcggcctagaagggccaaacatctggtttgtcatcttccttgggttttagcacattatcacacacacattaggtcttagcacattattagaactcgcaaatcccttatttgatagaagaactgatttcctttttaaccctaattcctctcccctacccccatttgaatgtgtatcttttcatttggatgtgttcttgtggaatgtccattttatttgtatgcacttattttaaattctgtaaatgatattatagtatcccttc

SEQ ID NO: 1477 - DNA, 3473 bp, Homo sapiens
gccaaacatccctggactagaagttgcaggggaaatcaaacagcccagaaagtttattctccttgctggtatttcttccacttgctattttgctgagagatgcatgcaaactacccttagactttcagatgcagtgcgttttacttagccgtgcctgacaaacacacagaacttttaccgtctggtagatccgccttgactttaccagcgaatactaaagtcacttaaaaaaaaatcacaaggctcgaaaacagcagcattagaagtagactttatggtactctgctcagctatgttctcatttgattccaaccactacacggcagaaaagactgatgagcttctctgtgcaagggtgcctttttggagcaatgtccccattcggtccattgatatgaaccacttcattgaatgtcttagacggaaagaagactgaataatgattggaagaacgccggagtcatcaagctcttttgataactgcatatgtgaactaggtcaagtcactctccctcaacggatcaccagtttacccaactgtaaatggcaacaattttgaactgaacgttcttccttctacagccaaaattcttcgtttgctaggtttgtgaagtgcttttatatgtatgagcgctttcttaactatgaagatatctgagtcatcgaacttttggtgggggcaatctcatgatcagtcatgactagattttagagttttctcatccccatactcaaagttttttttttaagaataaaaatgaaaagaaacaataccccacaatatttctgagcctcaaaggacagactaaaaaagctaacttttaaaatacttcattttgaaataattttgaacttacaaaaaaatcgcaaaaataatacctggagtccctgtatacccttcacccagattcccctactgttaaatacttacataaccataacacaattaccaaaaccaggaaattaacactggtacgagactcttaacaagagatcttatttgaatgtcaccaattttcttcctaatgttcttctgttctaggatccaatccaggttcccacatggcatttattcctcacttctccttagtctcctccaatctgtgacactttctaagtctttccttgtctttcatgaccatgacactttggatgagtactggtcatttattctgtaaaatgcctctcactttgtgtttgttgaatgttttctcatgattagaccgagaccatgtctttttggcaggaacatcacagaaatggtgtgtatcctatctgagggtatgtgatattgatatatcttatcactcattatgttaaccttaaacacctggttaaagtggcatctgctgggtttctccactgtaaagtgactattttccctttatttatttattttagaaacagggtcttgctgtgttgcccaggctggagtgcagtggcacaatcactgctcactgcagcctcaatctcccaggctcaagcgatcctctgcctcctgagtagctgggactacaggcatgcaccattatgcccagttaatttttttaaaaatgttttgtatagacagggtctcgctatattgcccaggctggtctcaaactcctggcctcaaaagatcctcccacctcggcctcccaaagtgctgggattaaaggcatgagccagccaccatgcctggtctattttttattgataaatgaaatagaccatgcctgttctatttttaattgataaatatcctgggagaaatactttgggacaatgcaaatatcctgtttctcctccaacttttacccactgatttcagcatatatcagtggatcttgcctgcaaccattattaccatggcatttgcctactagtgattttgtgtttccttcatttgttctccatttattaattggaattcttctgtaaggaggagttgtcccttctccccaacttatccatttattcaattttttttgtaaactatggactcatgggcatctattttattctatgagctataattcaatactgtcatcatttagtttcttgctcaagttattctaacttcagccattgggagctccttcagactggctactatgctgtcttgtcatgcccccaccctttctctagcactttcttacattcttacaccaaaagacattacagcctcatcttgtattttccctgcttctgtccagaattagccattattccaaagatcccgagttcctttattggagaatgatattagacacaaagatgtgggtactaagtatactcgttgctgttggggtgttaattgcttctagggcttcccaagacagagctaggaaatgaaagcatacataataacccatgcatacacacagatcaatatctattcctgtatctatctgtatacatactcatgtgtcctttctaatccacaccacggtattcatcctaaccttccctttttatttttaacttttttcctctgatagtgagaaaataggctctcattatctactctatatacatttatttgttcaacctcagtatctacatacttacatatgcctgtgaggaacagatttactaactagaatcctgtatttgtgtgcaattctttttatctttattataaatatagcacctccaggcttctttttattagtgtcagcatgacatagcttttcccatctttttactgttaatattttaaactcaaaaaaagcaaggaggaaaacagtatgctactatctgtgtgaaaatggaaaataagtatggatatatttgctcatatgtatatatataatatctatgggagagggaaaaccaaaatatcagtttggaggtcaactgattaactggggaaaagagatgaggggaaaacttcgctgcatactctactatcgttgaaatttcttaaactttttcattgagtataattcacaaatcataaaactcacccttttaaagtctacacatcagtagtttttaacacatttatatacaaagttgtgtaactatcatcactaattccaggacattttcatcacccttaaaaaaaaagccatgtacccattagtagttaattcccatacccctcacccctcactcacccatctactgcccttcacaagaccctggcaaccactaatctgctttctgtctctatggatttgccaactcttgatgtttcatataaatggaatcacacaatatgtgaccttttatgtctggcttctttcacttaacatcatgtttttaaggttcatccatgttgtagcatggatcagtactttgttcctttttgtagctgagtaatattacattgtatgtatataccatattttgttgatgtactcattagttgactgtttttctaaatttttgaattatgaaaatatccattcaaaaattaaactttaaaaaatagaaacaaaatgaaaaagcccttctcataaaaaacagaaaaatgtaaaaaaaaaaaa

SEQ ID NO: 1478 - DNA, 3994 bp, Homo sapiens
ttagcaatctggagaggactgaggcaagagcttgtattgaaacacaagcaagctccacgtatggttttggacatggaagaaagagtactgttggggtggaatgacctaagtttttaataggattaggatttctgtggatttttcccaagtgatagaagttttcttcatctagcagggagcctcacccaattgcttctctatgttcatttctgaaactcctttgttaaaactaaatagcaacagagaagaaactttcttcaaaaaactcttcatatctgtcatttctcctattcttatggaacttcacaattgctttttctttattcctttttttttttctatatcagctcatcagtctttgtgggtgacttggctaccccactaatctaattgcctttttgatagttaaatcaatatggacatcaacttaaggctatatgtgaaccttaaatgcatgatattccctatacttgattccacaattgatattctgtgaggaaagttggccagatattcccttctgtgaagtcagaataactaccgaccctaagaataaacattttgaccaattctttatatgttgcaaactattcacacaactagaaagtttagccattcacatctcttcccctgattttaagtcccagattctgagactcagaaagtttagtgacttgttgagctttctgtggaaaatctgttgtaaaaacagttcagacattggaaaatataaaatagcccctagagatcccaataaagcttcctctccccaaatccctctacaagtttatcctcgaaaaactttctgaaaactgatgagaaaatactgagtaattaatgctcaaatgggaaagatgacatgtaaaagcaaaaacctgttaatggcatctgttcatatagttccatgtgcctttttacttaactgcactgataggcaatgtaatgaagaagtttccttttaaaacgtaaaatgtaattaaacagagtttatcttaaattggctggacccgcacagcttgactgagacatacacagctgtcttcattttgaagcacctacactagtcaagcttctttctaacccgcccttagggtttgcctgttggtctgtcttccctactgggctgttaatcccttggaggcagattgtcttgtttcccagagtttttccagcatataccatggcagacaattttcaccttatctattctaactcgtaagcctcagctagtgcctccatcctcgggtgcatagcccagtgacaggcatgtaacagactttgcctacaagcagttgctgatccataaatgacgttggcaaccttcttgtggcagtgagtaacatatttctttcctcctgataggcttggaatcctcatccccatctggcaattttctttccatctttcctacactcacaatggagcccacacgcctcacaacccccttgactaaaccagatgacagcaagaatgcctagttccaagtgagcaagggtgaagccttaggcccttgtctcctccagacctcctctctgctctaagagtatactgggcatggggtgtggtcggggggttgggggcggaggagtacttaacctcaaactgagaaaaagggtgtcctgagcaagtttcatagcgtagcagcttccatttgaaatgtgaagctttgaaggcctgttgctacagtaaccagctagctcctgactccaatgcctgtctaatctaaggtggaaatgtcccagaaacagaccccaggctggcagctcttaactatgacccatctcataagcacatatccagctgtagcctcttggttgctggggtgaaggggcctctgtatcgccacaggaaaaaaaatctgataaattacgggctcaagaagggtgttgcttttttttccactaacagactttgcaacccagttcctggtgaaagggctccgcacccacccgttttgtgtgtataatgctgagctaaagtgggaaggagcagtaacaccaaaggaggctaattctcttcctgtcagtaggagagagtgtctgcccccagtgtgtgaaaagggaaggcatgagaagtgaaaaatcagccttctggaagcaccttcttaccacgagaaaacaggtgattcttactatctttgagactcatccagattgtgtctgtttaactcttcaggcaatatgaaggcagagaagccatttcagagaagagattttttaaaaaatcatttcgttctttggcattgtcacaggattatgatgtgggttctcataaaaatttcactccccccaaagccacccaaaggaaaggcagtgaaatggggaggaacacacatttgcctggcatcgcaagagctgccttgtagtcatgggttccagtgatcttggaccgatctcttcacttccctggacctcagtttcttccatacaaagaagttgaactggatcatagaaaagatgctgtccagcttggtaatatcagatagggagcagaagctgtctcttagcacatggccagattccggaacaacgatgatggtctccatgtttgtcctaaaaatgcatctcatctcagtagagattttcttccacctcatttgggtctcaatttaaggaaggaagaaaggaaagaaacccggggattctcttcttgaaaggaatatacttcactttctctaggcttctaggataaaaacttcctatccttcatttttcctctttaaacctgccaaaatcaagttgagtaaagataccatacagatatgaaaaagaagccacatccttaaattttcatggagtccaagagcctgctcaccgccagttagcttttcccaggatggtggtggcactgatcatctaggttgcacttttatgttcatgtcccagagcgtttcccatcagccatctcatttcatcttttcatcattcctctgaggaaaagacttcacacatgtataggactttctatatcacaaagtatttcatatccaatgtcttatttagatcttgacaatcactgtttaaggtaatttggcaagttattaatactcatgtcctcattttactgaagaggaaactgaaatgcagagagcttgtcttttgcccaggatcactcacccagtttattgggaggcagcagcacggggattaagaacatgggttatgccgacaaccaaccaggcagaattccagctctgtcagtagttagctgtctggccttaggaaagggatttcacacctctgtggcttagtttccttgtccattaaatgctcataagaatagagctttcctcacagagattgggtgggcacgggagctaaatgagctcatacgtttaagaacaacctctagcacacagtgcataataaatgtcattattattagcaaagccaggacctgggtcttccagcttctagctcagtggcatttctgctgccccacaccaggactatccttcgtatacaggtatgaacctaaagccttcagtgtttcaatgaaaagttcacccaaggtctttctgttcagtaagtctagagctaagggctcctggcactctgttcagtcctttcgctggtaaaccacgctgccctccgttgctctgggcagaatgtcaaaccttcttatgtttttaaaatttataaatcaagcactcttatttaatattactgacagcccgaaggcagacgctcccactctcctggggaagagggtcttctaatctgccatcttaaggaggtaaaagggcttgattgggtaactcattgcaatgggcacgtatttattactgtctcccggccttttctcatgctgtttgtctgctggaattaccactagtgccaggccatttgaatatttgaccatttgtcttagaattctctgaatacaaatgtttttcatacctttactatgtactttttaagaatgaagactatgttgcatgttggtttgtactctctcctgcacataaaaaatgcttagtaaatagatacacaaa

SEQ ID NO: 1479 - DNA, 814 bp, Homo sapiens
agcccagcgtgggatgaccgtgccccgaaaacatgccagtgaatggaaagaagccaaggtcccctccctccctgcttataccctcaactttgccaatgaggaccctaaataccagctgcactacaggggatgtaactacatacaccgtcaccaaagttgcagcctggccaagaaatgccaggggacgtcgcggcgattgcagactccgcggtgactgtgtagatacgtccagaattcgcccttgtagcgcggggagaggcgagagtgaaggcctagaaaagctggagtgcaatggcgccatctcagctcactgcaacctctgcctcccgggttcaagcgattctcctgcctcagcctccggagtagctgggattacagaaagaagaataaatgggacattacacaagttcctttaaagattcttcacgttgatataaggagcctgcttcctcattgccatttgggtgcagagttcttcctgtcagcccactcatcatgctcatcataccttgctgccaggcctctctatgctgatgactcgaggaaaacacgctcctctggttgcaaagaaggcattgtttctaaaggcacctgtctcagagctctagatggattatgacccacggcggtcattggactgtaaacctgacacaggtttaaccttctgatggagcttggtttttgtcctagaaaaactataaagagaaaaacagcggcacataaagaacagtatatggtgtaaagagaagcgggagtcctgggtcgatgttagaagacatgaatgcaaatccctggctggctattaacttagttt

SEQ ID NO: 1480 - DNA, 572 bp, Homo sapiens
gtgcggggaccagagggatgtgggatcctgaggatcactgtggggcacggacgctcaatcctcagtccccaaggccgcggcggcgaggcccgggtggaaggcggcggcgatcccggggaggacgcggccggagtgcagcagggccatggtggaccgtaggagggcagtgggcagccgcaggacggagcagagggcgagcggacacacacacagggaaccggctcctgctgaaggtaattgtatgacaatggagaggtgattactgcgctgaaaatcagtttcctgaagtgaaaaagggaatcaagttacgtcacagagcctggtgtgagcggcgctctgtcaacaccagctcttcatgggttgtggtttcctccagttcctggatgtgtggagttcatcctccactgactggcgccccggttgacaatgaggtctggaaattggcaactgatgaagggaagtgtatcagtccgttttcatgctgctgataaagacacacccgagactgggaagaaaaagaggtttaatggacttacacttcgacatggctggggaggcctcacaatcgtggt

SEQ ID NO: 1481 - DNA, 2314 bp, Homo sapiens
tagcaacatcaatgactaaggttttggtcaatctctcaaaattgagtaaatgtccaaaaggggggaattgttaaggcaaactaaatatgtcctgagaaagcctccatccttctatatttgcatccttgtggatgaactgtaacctagcttaatagtcagacaaaactgaaaacctaacttaatagtatgtacctgtaacaatgactgagtgttggccaatcccagtagccatacttcaaccactcatagactgctgaatgttcaaactgtgttcagaaatgttgagctgtaaccattcttactgtttctgtacctcacttcagattcctgtatatcactttatcatttttgcctataaaattgttctttccacaagatacccctggagtctctatgaatctgctgtgattctgggggctgcccaattcatgaatcattcattgctcaattaaactcctttaaatttaatttggctgaagtttttcttttatcccaggtctcacctctttataggagtggtataaaaaatttgtagtcattttttaaaagcaccatagcacccaattcataggtttttttttttttagagttttttttttcttttcctaattatcttacaaaaaagaagatatctggcactttataggaggaaaccagaggcaagtcctgtgttttactataaagtcaggtgcaggaatactaaccaattcctttatatttcccaatattacccagttcattcgttggtacacagtaggttccagaaaaatgttaaggggaaaaattgattgctatgagaatttcacatgaattatgtttcttccaaggctccttgcagtcaatcaggatggatgttgcattagtgttttctctgatgtaacagtcattaactacagctctattagctgttcatttgtggcatgaaatagatccaaatacagaggactgtatttgaactgagccattgtttcatgaatattagaacacaaatcaatgcatattgactgggcttgtgtagatgaatgtgatagcattgccctcaacaaaatatggttcatttcttcagaacagtgtgtaaagcttagaataaaaataagaagcacttaagtttttcaagatattgaactctaggcactgagttaataagttcatttttatagatgcttgatgctgtatgaacagatactatactttctaaagcagctacttctgtgtggatggtggtgggtaagaggccagagaaggatggtaactataggtaacactcttatggcactttaacgagcatctatcctctctattggcactcaaaagaaacttgtgaggcaggcactatcatcccaaatttataaacaagcaaattgataccacaggttctatgcagtatgccaaaagtcactgtcttgcagtggtggaattggagatttaaattcctcagatatgattgcctctggagagtcacatctgatcctcctcagacaaataagtactctttctctgtgttctcgtgatatcttgaaatatatctatatccaccactttgtgttgtaattatcttcttatgtgtttatttctctccacttgagttcaagaaaaaagaaaggtccttgtctcatatatgagcatccactaaggatttaacccaaagtgaccagtgaatgcttgcagaatgaaagaataaattattgaagatcctttaactctaaaaatctctaccaatccatgatgcattttaagaaaaaagtgttctgttagaatagggtgaagaaaagctgatatttgtgagtaggatgcaagggaaccatagacatagagacctgcaaatcatctgtggccttgttttatcttattctctggaatatactgggaatagtaaggaggcatgtgtgcctgagcagaatgattaaggggaaaatattaggaattgaggtcaaagagttaatgaggtgggggtaagatcatatatagccttgtaggacagttaagaaatcccgagtgacctgatcagagcagacaaagtgatccttttaaaacctacaaggaaaatagatgggggctgagcaagagtggaagtagagagacctatcttgattgatttactgaagtgatcaagatgagaagcatggttccttggacgaaagtgagaagtggttggattttggatgtattttgaaagtagagccaagaggaccaattagatatggggtgagagcgagagagaggagtgaaagttgaaaccagtatttttggcttgtgcacttaaaaggaaggaattaccattagttgagatgggaaaatgtacatagatgaagca

SEQ ID NO: 1482 - DNA, 1993 bp, Homo sapiens
attgctgatttggtaaccacctcagagcctaccctatttattcccagcatggacctaaatccacttcagccaaaaatgaacaaagaaatgatgaagaacagagcctgtttctttctcagtggtgtactcagaaaatggatgcaagagtagaagctgatcctcgaggcttgcaaaagtggggttctttctgaaagtgaagccagcagccaagagccacccttcagaagatagaaggaagagcagctgcatgagtgatggccacagcaatgcatgggtcctgtctgtccacgtagtcctctccatctgcccgtagcttgccaggtctcctacccacactggggaaattccagctgccggccctctttgggttgcacctcccctttttgcacagggctctattgggaaagcagctgtcatgtgtctatttgaaagacaagaaaccagtctagttatagaaaagagatttagattacatcagaataacaatgcaaatcatttgtgcagttcttagtacagaaaacagatttaggaacaaaaattgggagggttaaagaaagtggttttttattctgtcatcaaaattgttttttaaaaacacatctgtagtaagataaataattgtgtgccgacttcataaacagaatgaatgactgaattcacacaatgttatttactgtttcagggcacacacacatggtttccaagtggtttcttgccactttggccttcaactggccttgctattttccattgaggggtgtctgattgtctcctccacagccctgagtctaagcaaaagcccatgggttggttgactggtgttcttgttgtccttggaagtggacagactggcagatgtggggctagtggggaagattctcgtaaacactttatttgttgtaagaactccagttggaatgtggcttccaatcatgggaggaggactgctttagaacaggaaactttctataataataccaatacaaccaaagactattattctgaacagaaaacaagaaatacagctggagctatttcctatctacctgatgaagggcactaccaggcggtcactctggctctgtccaccgatgcctgtgcccactttgtgcgacgtagcttccatggagacaagagcaatggtaatggaagaagaaagtctggatgtactcttgcagaagcagaaagcttcatggaacaatattaatcttctggtcatctctgtgctggtctagttgcccataaagttgtcagattgactttggatttaaagcctgaaaatgagtcccaaggaaatccgttgacatgaggcccaaggaagacagtttttggaaggggcaaggagggacagttctctgctccactgaagctaggtatggccatgtgacccatgttgccagtgaaacaggaggagaagggacatctgggtggaaacatttaagagtcaagtgtatttctccatactctctttctttggctttggcagtgatgaaggtcaatccaattacagttgattcttgaacaacagaggtttgaactgtgtgggtcaacctatacgtggattttcttctgcctctgccacctctgagacagcaagaccaatccttccttttcctccttctcctcagcctatacaatgtaaaaatgacaaggatgaagacctttatgatgattcacgtccacttaatgaacaacgtacctttcacttcccaccatgattctgaggcctcccgagccatgtggaactgtaagtgcaattaaacctctttttcttcccagtcttgggtatgtctttatcagcagtgtgaaaatggactaatacagtaaataggtaccagtagagtggggcattgctgaaaagatatctgaaaatgtggaagcaacttttgaactgggtaacaggcagaggttggaagagtttggagggctcagaagaagacaggaaaatgtgggaaagtttggaacttctagagatttgttgaatggctttgac

SEQ ID NO: 1483 - DNA, 2231 bp, Homo sapiens
ctttcagacctttaatctctgtatatagagatatagaaatagagaatattctttaaatatctgaacatttaagtattactcatcccaatacaatatatacttatacaaatagatatatgtatgtatactatacataaagatctgaggtactaaatattccatggttttttttcattcaacaatgtattatgaatgcctttcaatagccatactttaatagttgcatagtatcacgttgcataaacatattaggtcagtgcataagtaattgcactttttaccattttaatggcaaatgaggcactgattaatcagtgccttatttttcacaactacaaaaatattgctgtgagatccttgaaaatgtataattgcccatttgcatgtttctttaaatttatagataaggaattactggggcaaaaagtgtgcacaatttaaatttgatgtttttgtttttgccaagctgctttttaagaaggttgtactaatgcacacttttatcttgacactaagattttaaatatgatcagaaaatgggtttctgatagtaaaactgtctacttgtaataattgtggcattagaaaagacctttgtggcttcgttcctcaaactcatttacgaattataaatctgaattccaaatatgaattaactcacacaagataaagctttaacagttagtagcagtactgtaactagagtgcatgttttctgtctccagaaataacattctttttatgccacatttttttaactgaggtgatcattctccaccctcttctttccatgtttttccatgtttgttcaaacttttcattaaatatcttgaggctctaactaaattaagggtggccattaaaattgtatgtgggattccctgaaccaactggtaatgcactaccagcatataaggtgtcctcattaaagcagttggtgattggtacatgggacctcactcatgtatgtttgcatctacttgtgagtcaaaaagttttcttaaagtataggtgggatcatgaaagacatacaattcactggagaaattgtgaaaaagtaaaagattatgaatttaggctcaaagccaatttccctctcatttaattctacatgagcaagtcaaggagtttggtagagctttatgaaatctctaaagattgaaggaaaacaatcactaaaatcgatttgataaagtgcaactaagtagtatgctagcctgttaatggattttcatcttgtcatttaagtttcagcaattgagtaccacactagaacacccacaaatgagattctgttacagagtatcttttttctactacagaacatactgtagacagttattcagtggttaacttgtggaaataatcagaagatgcttttcacttttatgactggatatattttaatatttatcatattaagagaaacttaggttacttacagctcataaacgttgctatgaacatcattcatttattcacttatttatttttatggtgttcctagaaagaatttcctggactaaaggatttatgctttaaaaatattggtagttactgccaagaattgccatccagaaacagtgtagccattcataaactcaacaacaaggtatgagagtgcctgtttcctcatatcctttgtgacaccggattttatcaagcttaaagttttttcattctaggtgggtgaaaatggtattccgttattgataatgtgtggaaatcaagttctaataagtttggggggaggttaattctttatatgtgctgtatgaattaatgccaactgtatgcctttgagagtgaaatcagaataatgtctctccactaaagcaggacttagagcactagttttccaaatgttgtctacagatggaaacactagcatcacctgggtactcgttagaaagtgcagattctctggcggtaccttagacctcctgaattagaaactctgggggtagggttagacatttgtgttttaaacaagccctccaagtggtttcaatgcacattcaaagttgagaaccaatcactgatagagaaaaagcagcttgggtagaaacagttgattatttgcaaatttatattttaaaaagataggattcttaacagtaagctctttataattcaacaatgtgatctttactcctacccccgaaaaactaatatgattttagtgtgtggtagctggatcgaaaacataataaatactcagatatgcaaag

SEQ ID NO: 1484 - DNA, 2147 bp, Homo sapiens
tttccctacctctcacatacacagtgggctggatgctggatgcaaagctccctcgtcacagccccaaagacaggacttgaccatctcagtgcaatgaccctgtggtgccttctcccgaggacctaagagccccctgagcgcttgcaaacactgcagacaaagcgagccctggcaccagctccctgcctgcctgttctgtgaagggagcctacaaaactggcagcccctgcagttctgagctgcagaactgatgagctggggcaccctgaaacctgactccaaaatagcagcaaacccaaggccaaaaggaagacaagcgagaatcccccaaaagccaaggtcatcatcaagccaggatgaggactggaggaggagctgacagctctgcctcaaatggatttgggagcgaaggctttttccataagctttgggggtaagtcacagagctaccccaaatgtaacttagtctcggggtctccttccttttcaccagctgtcccctttgctggaggaagctttccagcccaaacgaagggcttaagaggagtctggccattcctggcatccagttagacctggaggaggtgaacggaggagaagcctgagggaggggtgtgtatccggcctgggaattcctccctctcccttgctagcgccccaacccgccctcatcctgttcagagagggcacttacaggcctcggaggcaggggagggtctcctcctggggaaccatccccgtccagatggtgcccccaaccagctgcggcggcatgatctgggcggctggtccagggcatgggttgcggatcgtgtagggaagaggggaacagcagtcgagaccctactccaagtacgcatcaaagacgtcgagctccgagtcagcatcgtaaaggcccgagccggggtcggagagcacgccgaggtccacgagcgcctggtccatgtcctcgggcaggaagacgaggcccacgttgaggacgatgtactccatgaggaaggcgtagtacaggatcagcacattgacgaagaacaggcccacgtagaacatagagggcagcagcggcggcggcacgtaggggaccagggggcccagtgcgtccaggtgggccgcgacccgggcgccgagcatgcagcgggtggcaagggcggcggcccggcgatcccggcgaactcagccgctgcggcgcccgggcggccggcgagggcacagcgcagccatccaggggtaccctggagcccgacagaagcagggccgggctccagatgtcccctggcaattgcgccccgacccccgaaatgcgccgggcgggtcaccgcaccccgagatgtgcccccaaggatctctcgaccgcccgggcggcgaggcgggcccccctgaagtggcccgcggctgcccggctccctcgtggcgcctccctggcgctcgcagggcctcgcagagccggtggggatcccaccgcggctcagtgtctagggccggtcccggcagccttctctcccgccccgccccgcaggtcctcgcgcaccccccgcgcccccgcaggcccagcacccatggctgcggccgccgcgtagccctcccggtggcgctcggagctccgcctcccgaggggccccgagctcattggcaggccgccccctgcacgcgctaattggccggctcaacgcccgcgctgattggctccggccgccagggggcgggtaccgcttcgctccgcccctcggggccctagcgtctgagttgctttcctggttcgggtctgccctcagatctcaaatcgaattcgctctgcgtatcgaatagggggaggtaaaagagactgaacacagttcaaacctagacataatgctaaggccgcaaaagccgaaggaaacccgggctaccgctgcaccttgctgcatgcctctttgggactccgtttctcctttaaaaggaggcggggtcggggaggggcgacggacggttgccctggaaattttggacattcccaaagcgccaattttcatggtggagatccaccagtgtccccttcgcttctccaaactctggttgctggaaggtccgcccactacggaacctgcatcctagagttaaggaacacctgaataaagagattccgaggtagttcagatcttcaaccataa

SEQ ID NO: 1485 - DNA, 987 bp, Homo sapiens
gaaacgtctactagtgacggtcaagccacctacaaccggtcccaaagccgcaaacgagtcaggcatcgtggtaggacctggcgagtggggccggggagagcgggacgcctggatcgggaacttgtcgcattcacattggctgctaggaggcctcggcgaccacttccggatccggggcgggggtcgcaactcccagcccttgctcagagggctgaactagaattcccagaagcctctgcggccgccttcctgctccttcactcctgcttcccccacaaataacacttcttctttaggcattgaagactgttcctttctgggtgaaggagaatcacgtagcaattgggagcaagatgcatccatgtaacccagtactggaggtcaagatggagacaatctccacagccaccatggcctttccctgagtgctactataactcaggaggaaagccacccagatactgcagaacaccaacatgctgaaggcaaaccaaagagaagaaagactttgtgcttgagagttgaaaatgagaccaccttgccatgtcaattcaggtctcttaaagtcttcccttgcaggagaagagggaagtgaaaagatcttcttgtgaacagggtctggtgtggacctccagcaaactccaacagattaattcattgacagaatgggattgtcttgtgaaagggaaatatcttggatcccttcaagctgggaacccctcagggcaaatctgcctacttctgtcaattcatcaatctcattctccgtccagttttgtgcccttgctggagaggagttgccatcatttgtcatacacaagtatcaatagccaaattgatcacgcaaaagaaacgatatcagagattgaagatcaacttactaaaataaggcatgaagaaaagattagagaaaaaagaatgaaaaggaactaacaaagcctccaagaaatatgagactatgtgaaaagaccgaactacagttgattg

SEQ ID NO: 1486 - DNA, 457 bp, Homo sapiens
gtagctaaattttttgtattttttgtagagatggggttttgccatgttgccaggctggtctcgaactcctgcaatttgctctccttggcctcacgaaatgctgggattacaggcataagctacagcacccagcccttacgtttacttttcattgacaggaagagtgtcttcatctctgcatccctagtgcaacagagcatgacaaaaattcaacaaatatttattgaagagtcttgatgtcttttgggaaaggaactctatggttacctttactctaagattagatgggtgttactgattcttacctcagagaagagaatgtcatggagacaaaatgacctgcttagagttctgcaccccccagcatggagagcagagcgcaaagatttcttccggactcccacattccccttggaatccaagaactggtctactgtcacaacactttagtaccctc

SEQ ID NO: 1487 - DNA, 1298 bp, Homo sapiens
gttaatctcctggagaaactagaggcagccagggaggatgctgttgaaccagttaggaggctgttgcaagagatcccaggaaaagataatgataatgtggacttggaagatggcagaggagttgcagaaaagtatccagattttaaagatgtccagctccaacctggtttcataggcagtggtaatactggaacaacctcttctccaagattctcaggcaatcaaaggccatggaagagccagcatgtggggaaacttctttattctgctatccaaatataaaatatatacagaagtagctcctttgtcccttaaccttagtaagcaaatttgattaagcatttgaacgctatagaggtgcaaggtgggagaaattctgcctctgctacttggcagctctatgatattgggcaagccattcataccacatttatattccttatatccaaaatggacataataataccttcttacttatctcactgggttattagaatgatcatagtgtttaggtggttggttgtttcaaggaggtaataatgtatgtgaaaataattggtatatggaaaagcattaaataatagtgctgaaacattatacatattaacatgcctttaaatctgtctccctaccattccatcatttattttgggggtcagttttactgagatataattaatgtattaatataagtgtacagcttaatgagttttgacaaatgtatacagatatatgactactaccacaatcatgatatagaatatatcaatggctccccaaatttcctcatgcccctttgcatttttatactttaaaagtcaatatatacccaagagtggttaaaacataccttcccaaaaacttgtgcgtaaatattcttagtagcattatgtatgatagccccaaagtggaaacaacccaaatagccatcaactgataaatggataaataaaatatatattcatgcagtggaatataattcagccacgaaaggaatgaagtaccaatgtctgctacaacatggatgaaccttgaaaacactatgttaagtaaaagaagccagtcacaaaagaccacacattgtatgactccatttttatgaaaggtctggaataggcaaatctatagagacagaaagtagtgtttgcctcacattgggggctagggaataatgatgaatgactgctaatggatgtggaatttcttttgggggtaatgaaaatgttctaaaattgattgtggtgatggttgcaaaactctgtgaatataataaaaccattgagttaataccatttaaa

SEQ ID NO: 1488 - DNA, 110 bp, Homo sapiens
gcgagggcgagtggaacagaggtcggagaccttgctaagctgctggccttttcacgtttcggaccctgagaatatgtccaccgcattacaaatgggattctctggcatct

SEQ ID NO: 1489 - DNA, 2237 bp, Homo sapiens
agtgtgttaaagttattctgatattgactgtagttctgagctttgtctctatcccaccaaaccactaacttctggaaattacttgtagaccaagatgggaggactccgtgtgtggctccctctcttcatgtgacaaagaaacttcctaaaatactaaaagctaaaggagattgttatctaagcttgagatggaaggttgccagcggaaacttggaggatcacagccagtcgcctgggattgaccacagggagtggcagaggcagaaagcaaaagaccagttgcaattatccaggtaaaagatggaggctgttgcaataatccagaatcctgaattgagcctgtgttcccagttcctagaaaccctcaaggttattggtttcctcctcgcttaatagaccagtggaagaaatctacctccagttctatcttcacatgagcaactgtttacagtttacaatattactctgaaaatcagttcttttcaagttttatctaacacccaccagaagaaacagaagattatgaaaatggaatttgtcaaagttcctctcccaacaatatgatatttaattttgctaacatttttttttgaacacttactatattgcagacaatggtctaagtaaagcattttatgtgcatcctatcatgtcatcatcacacagccctgtgaggtagatactattattattaaccacatttcacattcaaaaaaactgaggcttagagagactaagtaaattgtccaaggtcacacagccatgaagtggcagagctgtggttaaaacctatgtctgtctgatgtttaagattttgctgttagcattactttgaaatgacaatatgagggcattttatgtattttttttgccccaatatgatctgcagaaactatgtattttaagtactacatttcttttatttaccaaattattgtcagataagaaaccgaaataaaagtttacagggtctaggattcctccataatgaatgaactttggggtatttcagtgacaaattggctttaacgcgatcaaattccatcctacaatgaaagtgtgttagtttgtggtttcaagtttaaaaacagcactgtattgtcttccagaaatatataaatagaaattcaagaagtatttcaatgaatacagataaaattagttttgttagaacatcaaatatgtgggtttcatttcttagctcagtttagaaactgtaatttcaattttttttagcagctgtggtaaattttgagatttgaaatttcatataatataaatcctcatttattgagcatttaaattatatgcccaacaatttactgtgtacattacttcacttgttcttaactataactctacaaaatattattgtccttgatttatagatgaagatattgagactcagttaagtaacttgcttgaaattcaaaaacgttaactgtggaaggcagtatttgaacccagtgttcaaaaccccatgctctttttattatatgaccttatttcctattcagtcttcagaagatatattgtcttattagattattctcgttctctaaataagtgaccttgggcaactatctttttccctggtattttcccctgcctttaaaacaatgtgatcaaactggaagtttttcacgatctctcttagccctaaagctccttggttctgtaattccaccaatagcccatttcaaaaataattctacagtaatcagtgggactcctgtttttcccatcttttttttttttgaaacagaaaattgaaacttttaaattagtttagtaaatacatctactagtttttttcttttatagtcatggttatattatttggtccttcttagttgcaacatgtttccttgctgtcaatttataatacctctcatcaacaatagcctgaagaaatagatttgaattgctttccctaatttatagctggaaaactaggctacgctggtatcttaaattgactttcctgaggtcacgggcactcagtgccaagaggagttggtacctacgcatttgaaatttctggatttctggtcttactctgtacttagtcactcttttctttcatttggccctatggtgggcaaactacagcctacaggccaattccagcctaccatctgtttttgtatggtccatgaactaagaatggttatcacattttaaaatggtgggaaaaaaagactattttgtgacataaaaattatatgaaatccaaa

SEQ ID NO: 1490 - DNA, 467 bp, Homo sapiens
agtccaagacaaacagtgtaaaggaaaatgtcaacaataaagtcatcactggtgggacctcaaggcagcagagtggaatcacaactagatcctgcaatgtaactaatcaaaatcttatgaatttttttttacaaagcagaaattccatacgttttgacccacgaaggggagagcttcagcacatgaaacagattcgtctggagtaataggaagtatgtccaaatgagggaggaggcatccaaaaggacaagacctgctaagcactctgagagcatcgtctacacctgctgcttccagatcatcatctcccagttgttcccagcagcccagcagtctgacttccatccctaccatcccaacagaactgccctcgccaacctcctccacatgcaccatggtccgaagataatgaacactgctcaggactcgcctaactgggacaaaattgattcctatctggacgtgca

SEQ ID NO: 1491 - DNA, 2691 bp, Homo sapiens
taggaacaacacagaccatttgctctgattcaacgatttttatgagcaccattaagtgaaaatgggcaagtaactctgtggctcagggcaaagcccccacagcgatgtgatgaaaaatcttggcaagaacccatgaaagagaacccttcaaatcaaatcaaacaaatgcggatctactaggaggaagggccttgtttttcatttaaaataatcttttaaagagtagacaataatccaaacacctctgggttactatatcttctaggagaatactgattttgataaaaatatttaaatcaaaaattttaggtaattttaccttcaaatagcttaggcaccttagaccaaagtttgcacattctacaaatattgacacaataacaccattttaaatctttacccaccatttgttgggttatgtcaaatgtaactcaggataaaaagttgttcagataagtgattggtacaattggaatttatagattaaaaatttgttacaaggaattaaaagtttttcttacctaacctctcaataattttccaaagaaaatgtgtgatgtgtcccttgctctgcccttcactctagtgttttattttgcatcatggatgcatttcttttaattttcttcatataactcttcacatgtactcttgagattgcatattgcttcaacaatccttgcccagccactaacttctttcttaaaataattttcctgccccccttccttcaacagtaatcaatgtctaccaccgcctctattaattctgccactgattttgtgataactcttcacaaatactgaatgatgtaacttgaaggcagtttttgttgtctgaatctgcttgatgccagcttatggttggctataatgctcagaaatagaagcaatgattagacaatacaaagagatactagtttaatgtaaggaagaatattttcatccttatcacttactgtatttactttatattccacattacaaggagccacttcaacatgaacaccaagccatcttaagtttattaagatcctaataatgtttaagcattggttatgtgaatatagaatgatgatcccactttggattttacattcaagtataagaaatatctattaatcaacttctttcaggagtgttacagatggtagagtctgtttcaactttgggtgcagggcttaacacattctttaacacaataaatcaacattactgagaaacaaagtaattataagaactcttctaattctaggaatcaatgattttatatcaatcatatggaaagaggtaaaagtgcatgcttcatgttatgttactttcttttgcttgagaatgctaaatttgtaaaactatataatatgacatacttgtgactgaattgtaagagattttatctaatattgctttagaatacagaagtaattgtttcaaaggataaaggatggaagattctgataaagcttgcttactttttgggggaaggcgtggggggaaatgtctcagtgcccaaggtcagtggccttcctgactgaagactttcccagagtagaggataagagtgggaacaggaagagcagtttaaagtcatcttcacaacattctggtgagtgactgattgcttcagcagcaaacaggcacatggtaaaaatattggtaatgtgaatttagtgttgttactgtcatttttttctttattaactatgattttgcttacagatagcagtcagagtagtagtatattgataataatgaacctcttagggttgctggtttggtgtttcaaagtttttcagttatccatattaaacttttaaagatatcttgtgtgaaaattcatttcaaattacatagaattaagatactatgttatttaggatagacaaattaagtgtgtttgtcatgattctataaattgatcttatttgctatcaaatattttaattcatgaatgtagtgtgataaaatttgttaaaaataataggcacacatattttcattgtatttaaattgcaatctggcctattcaaaattaacatagattgattttgaccaaagaggtctagaaagcaagaccttttgtaagagaagtggaaaacagagtcatttcttagtttcattccactaaccaagatgaagctgggtcacagattgctgtagacatttttaagtaactccgtggatccctctccttccacccacttttctctgctatattcacagataattctctacatatttatcgtttgggagggaaaatgactctccaagagttaacttcaattacacattggtgggcagtaactgtgctgagtgccagtcagaactgtatgtcaaaaatgccaccttctctcttattaatgctgacttagcaaaaacagagggaatttagggcaagtcagaattcttgtttcattgtcctattttcagtaagagaaggaatttaggacaacttagaattttttctcctgccctattttattgcacgtatgtttattcatattcagcaaaaagaatcccaattttagcctttgttgtcttcatgtccaaaaagtattttcccaattaatttaatttttttattttaaaattaatatatctggctaaagacattagaaaaattatatcaactgaacaaaatttttaaatgactcatagttccaccggcaaaggaataaactcggctttgagt

SEQ ID NO: 1492 - DNA, 364 bp, Homo sapiens
ccatgtgaagaaggtgcttgtttcccctttgccttccgccatgagtgtaagtttcctgaggtctcccagtcatactgctggttaagcctgcagaacggtgtacttgtttgaaatgtatctggcccaatcgctgagcgtccgcgctgcatttctccaaactgcccagcagggggcggtgctacctcggctccgcgcagccacggcttcccgctggcgaaccaagggcgcggaatctggagagggcgaggaacatctttcctcccacctgtcccccgccaagcctgccagacccgtctcatccgtgctgctgcttctgaaaatcagaagagtgaggatgaaataaagtcttcataaaggaaaacca

SEQ ID NO: 1493 - DNA, 740 bp, Homo sapiens
ctgaaaactggaacagggatgtcgacagtcagaggaggagaagggcagaagtgtgcactagaacaccagatgtttgaggctgaaaatgatatggatgcagaataaatagccccaaaataaccttctatctgtggtgtcccgtccccctccttggccaggcatcaaagctacatgttgttcatttaaaacatgaacatcctgatcccaggactttgaagataggaatcacccatcccaaaccagacacactgcccacagtagctgagaaagaagccaaaggtggtgaatgattagcagaactgcaagacagctccagaatctaaacacagagtactgggaaagctgttttgtgggggaaactcagactgaccaaaagagccgaggaggtcctttgtggcctgtctgctccatgggaatagctccaggagagggaagaccagctgccttcatcaggaactcacaggtggcatttctatggggaatcagcacaagggaaaaggagacatttcatttccaagttatggtggcatcgcaattacaccattattgcatggactgaagtgcaagtggaggacaaggggttgggagaggaagtggctttggcaaattgtccttaagctggtaagaagcagatctccaagactttctactgggatatggagttttggggcaaaaaggagagtggagatcaacactaatatttatttattcatttttaaataatacactttcagatagaa

SEQ ID NO: 1494 - DNA, 501 bp, Homo sapiens
agggatgttaaggcactgagggccagagcacttgttctcatcagcatcatcatcagcctcagcatcattgtcaccgtaatcagcatcattggcatcagcatcatcagcatcaccaccctcatcatcatcagtagcatcaatatcactatcatcagcattagcatcagcatcatcagcagcatcagcaccatcagcatcatcgtcatcaggatcatcagcatcatcagcagcatcaccaccattatcagcatcaggatcaccatctaacattttttgagggcttcaaatgcacaaggcactgggctgatttctttacatgcattgtctcacttgtttccaacaatgacagcccccaaagaacctcaccagcaccacaggacccaccaccaccatcacaagccttatcatcacccctgccttctctatccctgcagcagtccggggatagacacagggagaggacagccatcttaccagccgaggaaggaagcctcagagaaa

SEQ ID NO: 1495 - DNA, 480 bp, Homo sapiens
ggcacaggaaactctgggtggtttggctccagctcttgaaaacaagttccttgtttgccctcctgagttgatggtctggtggagaatttgtctgaaggaatttgttccaggaaaggtccagctgcatttgacaggaaagggagaaaagagagaacgaggcataaatctctggccttctgcctcttgcttgggaatctgtcctttccagcctgcacccacacccttggagcccaaaaccatgccatgcacatgtaaccaaccagctacatgtgaagatcacataaaggtgttcttgtcctggctctagctaaggttccagctctcagtcagcatcaattgtggaagatgggagtgcatgagcttttagatgatttcagtcccctgcctttgacaccaagtggaactgagatgatctttccaccgagccctagtcaaactgcagattcatgagcaaaataaacaccatcattactgaagcaa

SEQ ID NO: 1496 - DNA, 558 bp, Homo sapiens
taaggtcacctcaccaaagaggcccatcaacatggaagaatatttcagtgaatcttgactcaccaagctcagtgacttttcattgaaaagggagagcagattacattatcaaaagcaccaagttgaaacatttgcaaggtgaggaaactgagcactaagacactaaataacttgcccagggtcatacgacagacatgagaggtttatatcaggcagtctccacccctgttccgaagtcaagaggctgactcgggttgctacttcttgacagaccggaccccagatcgccgaagaccatttggacacacttctatcaaatcctggcggtctccttctaacagggagtgggatgctgctctaatgataccccgaaatgtggaagtgaccttgaaactgtttaacaggcagaggttggaactgtttggagggctcagaagaagacaggaagatgtgggaacgtttggaacttcctagagacttgttgaatggctttgaccaaaatactgatagtcatatgaacaatgaagtacaggctgaggtgttttcagatggaaatga

SEQ ID NO: 1497 - DNA, 3312 bp, Homo sapiens
atcagctagcaagtattcacaggcacatccaacctccatccttacattccacaaggatttgagtgtctgttataggtataaaagcctgccgttggtggaaaaggaaaaggtggtccagttagacaagatgccaccggcttctgaaaccagacatctttgaaaacccacccatctacctgcaggaaaaggcaagggacctgacctcgcctgggctcagggaagaggttgctgggatcataaccccaggaagagacgggatggaaggagagcatgcagggagcagaggacaggctactctccaaggaggagagggaagaggccacagaaatggaaaaggggccaggacaagtcagtggagagatggtcagggcctggcgaggaggagcaggacaaaagcggtggagctcagccccgtggcggcagggccactcccattcatctggtcctctacttctgaagttctcgaatgcagaatgagatgtacagatgggccagcaggtgatatgctatctgtcataggttaaggcctcattattttattcatttttaaacttttttttttttgagacagggtcttgttctgtcgcccaggctggtttgcagtggtgccaccatggttcactgtaaccttgaagcccctgggctcaagtgatcctcctgcctcagcctccagagtaacgaggactacaggtgcacaccgccatgcccagctaatttcttaacgttttgtagagaaaggctctcactgtgttgcccaggctggtcttgaactccttgactcaagcaatcctcctgtcttggcttcccaaagtgttgggattacaggtgtgagccactgctcccagccacaagttttattttaaatgtttacctttcaatgatcacttcgaggagatttaagcttactctttcttttttttttttcttgagatggagtcttgctgtgtcgtccaggctggagtgcagtggtgctatcttggctcactgcaacctctgcttcccaggttcaagtgattctcctacctcagcctcccgagtagctgagactacaggcatgtgccaccactccctactaatttttgtatttttagtagagtcggggtttcaccatgttagccaggttggtctcgaactcctgacctaaagtgatctgcctgcctcagcctcccaaagtgctgggaggcatgagccaccatgcctggctcattgtctagtttttaccaagaagatgatgagatatgccagagggctccgtatctgctatgagaacgtcccccaagagcagctggccgtggtgctgcagctggagctgtgcttggagctcttcttcacccccatggcggtcaccaccttctgccactggcactttgtgcagatcatgctctctggccccaagtggggacctggaggtgctgaagagccaagagactggctgccgtgaccctcttcaacttcctggtctgcttggaccctgtgctttgtctcccatggtgggttcccccagtggaagagtcaaattggtgggcaggcgcagtgttgttcagtgctctcgatgctgcattgaccccttgattttctttgtttttgtttttattttgttttgttttgtttttgagatggagtcttgctctgtcacccaggctggagtgcagtggtgtgatgatcttggctcactgcaacctccgcctcctgggttctcctgcctcagcctcccgggtagctgggattacaggcacccaccaccacacccggctaatttttgtatttttagtagagacgaggtttcaacccctactcaggctggtgtcaaactcctgaccgcaagtgatctgcccaccttggcctcccaaagtgttgcaattacaggcgtgagccaccatgcccagcctaaccccttgattttctgtttctcttcctccaccgtgcgcaaagcctttgacagagggccacggaggtggcagcacggcgggggtctcactgtctgggtggtggtgaaagctctggagagccagctgcagagagaagatgtggatcttagggacggccaatgtcaccttcacaggagattagaggcgccagcttggggtaaccttttggggaaggagggctcaaaaagaggaacaatgaaacagaactaaggtgagttctcctgtgcccagtttcagaggtcaaggagagtagtagatagctcaaacccaactcagccattgagtgagtgttttcattttgttccttggggtctatgatattttctattttcttttctttccttttgttttggtttgtttgtttgtttggttggttggttggttggttggttttagagacagggtttccctctgtcacccaggctggaatgcagtagtgtgatcacatcacactgcagcttctaactcatgggttcaagccatcctcctgcctcagcctcctgagtagctgggactccaggtgcacgccaccatggccggctaattgtttattttttatagagacagggtttcactatgttggccaggatgttcaacaacttctgccttcaagcgatcttccctcctgggcctccccaagtgctgagtttacaagcatcagccaccacacccagcctatgacattttcttcattatggctggtactgcctcatgaaaagggggttcctcatgctggatctgaacaacccagcacaggcaagtctggggagcaaggcaggagcctgcatgtggactcaaaggaccggcacccgaaacaaagcagtggctggcacaggtggacaaaccaggcaagaaaagcaactgtccttcggagcagagtccacgtgatgggaagaaacagacacagtctcactctgttgcccaggctgaagtcaacggcatgatctcagctcactgcaacctccacctcctgggttcaagcaattctcgtgcctcagcctcccaagtagcttggattacagtaaaagctgccaaggtcctcttcaacgtgatggcgtaaatccagctctttctgcaagaaggctcaccagccttcccaccagctcttctccccaccccagccctgcagccctgcagcctgaccctaggtaatgagtggtggggagtgacccaggcatgcacgacctgcccagaggaaagggagttcaaagaaggacccgagaccctcacaggaacctagcagattggcacaagtgccagatgtatccaggacagacactttccccaggactccaggggtaaaggagtgccccacctctccactccttgcctttcttaactgaattcagattgtcgtgaacattcaagaaaagcattgtggctg

SEQ ID NO: 1498 - DNA, 364 bp, Homo sapiens
attaagaactcttaaaagccaaaaggtaaatgaaagcagaacccacagataggcattgaagtcagcttccattcagacgtcattggccaaaccagtattgagtcatcactggtaagtagcagctcagccagagattacatctccccatcacacatccctcacatctgtatggaacaacaggactaattctcagtcatagaaggtgaatacaaaagattcccaggtcccagaggatggtggagcttcaagaagaaagtagccttggtccctaaattatcacatggagaaaaggggcactcccaccagaaacacctaaattggactattatatgattgagaaataaacttttattatgttaagcta

SEQ ID NO: 1499 - DNA, 863 bp, Homo sapiens
ccaaacctgagactgggtgactcttgcctaggctcacagatcgagccttcccagtgttgcactgggaccctagggtggccctggggtgcccaagagatgcgcaagcatctcgcgccttccaagcgatcagcgaggaaaaacggggtccaaattcgagtagaatctgcgggttgcgggaagatggcctgcgagtgcggtgggggacaataccctagggccccgtgcgccctcgctttcccggggcactctcaccatttgtagcctctgccgcgcttgaacttgagggtgagcgcagtctccaggaagagcaagaggttgagcagcgcaagcagccagtaccgcggctccttcttcacctcggtcactcgccagaccccgaccagcgagtgcagcaggaacagcaaccgagtggccagggcgttaaggaagaccagtccctccatgctggccggagcactctgcctacgtccccttgcctgcgcccccaggaccctgccgggcgtgcccggagcccaccggtgagcaggaatatgacaagcactgagacctgctgctgcttgtggtcccttctcaccctcagcgcccgatgccggtagaactggtgcgcggctcgcccctcccccaaacttcctgagaactcttcaaagagggttgtgatttgaagagtaaccttcttcagaaaactgtggagacttcacagaaatggcagaagctagttgaagtctacaaattacctaatggaacaggtgttattcccatgagattcccaaataaacttcctgcatgcaaatctccatctcagcatctgtttccctgaggaggaaccaacctaaaatgaattgcaaattaaaatctcagtgggt

SEQ ID NO: 1500 - DNA, 219 bp, Homo sapiens
ctccagtgggcgtcttgggccccggctctattctgggctgcgggcctgggaagggctcgccgggtgccaaatgagctgtcctaactctgcggggctgcagcttcctgcatgatgctggggagcttggcgcctgacccaggatctagaaggcactctgggcaggccgcgctccgcccacgaaggtctggcttaccacacgctcctccccattcccagtga

SEQ ID NO: 1501 - DNA, 525 bp, Homo sapiens
attttcatcaactgcaaacttggatgctggatcttcctactagagctcactgattgcccagggttgaggtacaagaattatgaagatggcaaagtggatgctaagaacaattagtggatgctaagaaaattagtgattcatcaaagtcaaaccaacagaacatgacagcaaatgacaggattggaactcagtcctggaactcgggttgattgattgcaggaaaagtgctctaaatgatgagaacttttctactcccggcctgatataatgctaagcaataaaaagaagctaatgtcttaataaagccaatatagtcaggtgtattgcaagtgtcagaaaaattctgatacaaagtaagtgctcaataaatatttacttaatgaaataatcaactggagataaaggcagtggaagaaaatcagaaatggcttaatatatgaggcaatgcctggaagataaataagaattttgacaagaagggatgatcttcctaactcatctagctcatttcagatgattactttt

SEQ ID NO: 1502 - DNA, 1064 bp, Homo sapiens
gtggtgagcccggaggaggacttgcgttcggcccgctggtcccagtgtgtccggaattggtgggttcttggtctcactgacttcaagaatgaagctgcggaccctcgctatgatgatatggaagaaaagcactctttggcctgttgtgactgggacagttgacagcacccaggtgtcctttaatgaaaatgctcttgacaccaatgcatcctagcatcacagcttcaggaagccttctcaagtgtgcatggggagtactatgtctttcatcaataatgaaatcttctgatttgtaagacatgctgccaagagatgtgccattctattataaaagatcagtagcttcctttaccgacgtgtatattctatctagaacattgagctatggaagactcccacctaagggaattagttttacaccttcagataaagactgctgagaagagcaccctctggtgttgtcacagaggcaagtgctaccgcacaggcatgctgcagtgaatttaactgatcctctgtccctgcaaccgttgtttaaggatgctattctgaaaagactgtggaggaagaaaaccctttaccctgttgttcagggagaaactgacaccactcaactgcctggcactgaaaatgtggcatccagtccactttaccatcagtgtttaaggaaaccatctctgataaggatgactgaggaagagtactctttggcttgttgacaccagcacagctgacacacccagatatctgtttggtctcctgtgaactttcaaccaggatttaaggatgccactctggttaaaagctgaaacaacttcaaggaaacttcagggaaaagagaaggcctggaatctgatcctccacttcagagaacaggggtcagcttactgtatgattaagtaacacaaggcacagtagccatctttttcattatgttgcaacactgatcacgtgcctcgataaaatggctgattcaacaagatgatggcaacacgaaggggagactttggattgtctatttaaaatctaggtaataagtaagtaattaataaaaactctatctt

SEQ ID NO: 1503 - DNA, 440 bp, Homo sapiens
agaatggcctgctccagatgggaagtttatctgcctggatcctgaaacgaagacgacatatggatcaggaactgagtcactgacagactacagctgacttacaacttaagtgctttcaactgttttaaaactctacaaggtgtggggctgcagatcggaccggatactggggctcggcgtggatgggtctttcatccattcgtcggattcccacaggcttgatggcatcaggctccacagtgtcaggctgctgcagctggctcaagtcatagtcctgcaaaaagacaaaatcaaaaaccgatgggagatgggcacaaagatagaaaattacaacctcgctttttaagcacatactcagaacacatagaaatgaggaaaatttaacataatggaaaagttgccactatgagtttttcatgttatgattaaatatttctttc

SEQ ID NO: 1504 - DNA, 737 bp, Homo sapiens
ttgctgcccttcctcttccccagggcacagaaacactctccactgcggccaaggattgcaggagaggtggcatcagtgattcaagacttcttttcctacctcttcagtgtttctttcagtgatctgaagttaaagccagggggaatatcacagaagtgaagtgcaattctcatcatgtcatatcaagagcacacactaacaaacaacatgacttattgctgaatattgaacttgatcacctggctgaggtgaataaactgacactggaacattcaggaacttcttcatggtcatggtcacccagctagagtgtggaagccaggctgtctgattccaggatctgtgttcttaatcctatacataaggaagccataatgagtcaaccactatttttaagattcacagatgttcgggtccaattcaccagaatgccaagttatacagggttgtggaatcaaaaactgcaattagtaataaaatgtgatgctatctagaatgtttttcatacatatatatgcttcttgggactctccctgcaggttaagagaaattgagaaacgatggagaatttaagtgttttagatcctacatacattagacttaaaaatagtaactatgtacatgagtatttgtaaacttaagaatgaacataacatgaaccatgtggcacctataaaatgaaaataaaatacctacaaaccaaatgagagcaataaaagaagctttaaggactttca

SEQ ID NO: 1505 - DNA, 2916 bp, Homo sapiens
cagccttcatgaagagcccatggcaactctgtgggaatccttccagcagcccgcttatggctggagacagaggtgtggcttctatctaagcttttccctctgactcagtccaggaggcaactgtcttgggaagcaaatgataacagcatctgggagattctcttctggatggactagcagggaatcaggacatgaactcagtggactaactgcaccgagactcacctggtcattacttgaaggtcattacttaaacctccatgaatctcctgatgaactccctcagaaggtggaaggagcacctgacaccgacccgagatcagcagcagctacgcccacgctgtgggcagttaagaggcagccagtggtaccagtcgtgagcgatcagatttgaggactcaggattctggtttcctgagtgtcatggacctgcgggctgcagaaatgacagcgacaggtcttcaggcaggtgccacagcacccacacactgccagcattttgtgcaaaatacccaaagccacatcaccagatctgggctctcctagcttccctttgctaaaatgctggccaaagagcttaacgagccactcaggggcacaagataggtgaaacctgcatgttttgtttgttaaactatttgccacatggcacaagaaaataacaaaaaataaacaaaaggaataactgcagcatcatggttttgttaagatgtcccaaagctgatcagggcttcctgttgaaatctaaatgagactcttcctaggtggcttacattcagtcagctgtggctctgtgcaaagaaaaccagtttcccttgctcagaaatttggagccactgataagagaagaaaagtgtgattccacatggagggtcatgatacaatctgatctctgaccccgtggaggtgaaggggcttgttctgcatgccaggctgaggactctcgggactgaggcattcagagtcgcagctttaaatcataagggttccctgcccatttcatcacaagtcagcagcatccaaagagtggcgttgaagaaaatctcatcaccgtgggctcagtttagattgctagtcggctcagaaagctacctgcaattgcgtttccaggatgcaccacaaatactctccacatgagggagaacatcagtggatgaaactcagcatgcttagtgcggggccaagtcctctaacaaaggacacagcggttaacctgcatttcgaggacaggcactgtcaagccctcatcagggatccatccagagaactttggtaattcttgcaaaatccctgtatcacacaatttccttccttaatgtgatgaagtgtaacggacacatctataaagcttcttcagtcctgcaatgcatagatgagcagaaggccacaaagccaggtcatagcactctctaccatcagaatggagcctgcctgaatgtgagctcagtgagaggcagattccattcttgggcccgtccacggtgacttgtctgctctgctccatcatccacttattcacaagttctggggcaacaaagggcacgttttgtttcatcttgtgccaaaccctcgatgtgtactcactcactctacctcatctcaagaacttcagggctgggagtgcatttggagagaaggcatgtgcaatatctggaagccttagcacaggtgggttatactgatgctctatagccaaactataggaacttgggttctaaggccagcaggcccaggtgtcaccccaatggctcccttcaacagcagcataaataagtcatgtcagaagaactcacattagccatctccaggactcatttccctctcaacagcaggagctcctgcagtcagaacagcggtaattttcaaatcaggcatgtggtgatgcagcaggaaagtgcctgcatcccaggtgtcccagcagctttctggagacctctaatacccacatctgcaccacaaaactgcacagcattgagtgataccaatcttcttatacatataggtaagtggtaatagaatgcctcaacagcagaccacccaggaaccaaagacatactggattttcaagtcagaagaatgcttagagatcatctgacccaatagccatattttacagtaagatgcagaagccagtgtccacagtgctaaagccactggtccaaggtgaaagaatttcaaacccataaatacctccaagaagcttccactgggaccctatgattttagtaaaattatcaacattcatgacctatgtctactgatcttagcgtcttctcagtaggcaattattctttctcacatcaatttgcagttgctatattatcagcatccttggtaaatccatcttgtgttctgggtgaagactaacagattcttccttcttggactctgtcattcactctcatccctcataacatctggccactgctctaaacacagtggcctttgagaaatgctgctgaattctgactaagaaagaggagaactttcaaatacaagaaagtgaacattatagagcttaccactcaagatggttttctacaaatgcggacatggggctgatctgcaccgtgtaagtatcatttgccgagtactcaaagagtccatagtaagggttgaagagctcctgagacagaaggaagaagaactcccgcgaggggccactgtagtccaggctgcaaagaaagcagaggtccaggaagctcattctgtgcccggaggtggggggacctgtttgcacccagattctagtgtgccctttcagagttgggtgctggggaaagcagagagcagcctctgctctttggagtgaatgccaatggcagcatcaatttgctgtagaaaatgaggatgcagtaattggtttggagatgtttcttaaccagatgtccatgaataaactcttatggcagcttt

SEQ ID NO: 1506 - DNA, 77 bp, Homo sapiens
aaccaatgatgtaatgattctgccaaatgaaatataatgatatcactgtaaaaccgttccattttgattctgaggtt

SEQ ID NO: 1507 - DNA, 1965 bp, Homo sapiens
tttttttttaatgtgagaagcagaatgtgcttctagaaactggttttaaagagatgagctgagaaagaaatgtggaatggagtatatttgaggaggacaaaacataacttcacttttgaacagaaatcactctagcttgccagcatgggatgtaaaccaagagagtagaaatatacccatcttattttaagttgggtttatggcatcgctcatatatgtaaaagcactacaaactctttaaagaaaattgggaaactacagagaagtcaaagaaaaaaaaaagtaacccatatttctattgcccaggtataatccttgttaatattttggtttggtctcctcttttttcccccaatatagttgtaaataaatgatgtctttcagagttgacatttatcctgtagcttgaatggcatgtaaatgccagttgtatattttttcatgaagtgtaggtttggaatacactagagttagctatatgcttgaatgctgatcactggattctgagactgactactgagtctacctttttaatcaagcctaacatgaatgggctccaaaaagtaatgaatgtaattgtactttttgatgtgcctctgcacttggcttggtgagtcatcataaatagctgttaaatatgtgactttacagattttgatatgttcagattgtaaaaaatgaatagtttatttcattaattgatgggcagtcaagaatctccctcccttcagtagggctgacacttaggagttaggtcatggttgtggttacttggcatggctaatcagattttgttctggtcagaatttgcccaagatcaatacccagcagaaactggagttaggctataaaaaaccattcatgtttccgagtgatcatttcagtcagcgattcatgttttacagtgtttagttgttgattattagaaaaagtaatattttcttccctttatgattacatcattataaatcaagtccttccatgaacacatttaaggtgtgtggagatgagatctctgaatccatttggggatgggctgcatttttggggaactctatgcctgtccagtgaagagtgcctaaaacattaattatagatcaaagatgttctgttgagggacaaagcttgatggtcatcaaacacaaggctttgtaaaaatacgaccacctattccacttactggatctgtcaggtgtgtaaaacttctctcgccagttcatcatgcttccatgagccctcaggactgggatttgagccttcctggctctttatcccttggggcagacatggaaccatctctgagggaccaggtggatgctgaagctcacccagtcagggcccctctcctagctccttttacactgaaattaatctgaaagctttcatagccaaggctttgcctaggtgctattattccagctggccaaagagaagtcttgggccagattgggattctcaatggattttatagacataattcccctgcaaacttaaaaaaataaataacccctactttataggactaattgtttgaattgtatctttctctgtatgttaaaccagatttaaaactattttataaccacaatatgtaatcagagcaatatagtgttttcagatatataccttgttttataccttatgtaggtgtcctacataagggtggcatgcccactggctgtggtaaaatttaatcctcattgctttgggagtgacttaaggccttttgaagtggagcttttgcactttatactttttctgtgaactatgataactatatttgatattaaagctgtaagtggcattttcagcaaatgaatatgtacatgtttgtgtctatttccaaaatgatttctgaactatctgcagtgaaaatgtatctgatggattgtagagcaaagcacattgcctaaattcatttgttaatgaattgggtaccattgttattaaaaatgcgtaaagtaa

SEQ ID NO: 1508 - DNA, 2078 bp, Homo sapiens
gcaatgcgcacgcgcagtggctttgaaggcggggcaacaaagcctgtggccgatgtggcgctcctcggcccgcgcttcagtggttatgacagtgttcgctctaaggggagaaggaatgtgtgaccatttccaacggttaacttgcattccccagatagtttggatgagttacaacctaaatctgcaaactcaatacagccagaccctgggaagtgactctctccaagcctcctgtacaagtcccaggaaaagagcctgttttcccttggacatgtgagcagtgaattactgctcattcagaatttcatgtgtatgtgttactgatggccaggtttagagataccaacctatttatttctagaggagaggtgatttgataaccttttcagatatcactatcagtaggcagaaaagggttaatagtatgatagggttaatatgtcctgaggagagtaaagaaattgcaaactgcagaagcacctgatctgtggccctggccagcatctctccatatcctgattctgtaagatcaagtgtttatgcagaaagagaagggactgatgatttgaatgtgaccagatgcagggcatgcccttattgccatgccagcatttgctattcatgatgttagtattcaaaaatcaagaaacacccttcctgggccattggtgtctactaatccattggaagaaaagactggaatccaccacttactagcttcttgggcctcagtcccctcttttctgccatagctaaggaccacctaacctagatggctgttgttattgttcaaagggacatctttagagcctcaagcccaggaatagcccgtggcaggcacctggtaaatgttagttttcattgtcctatcccaacactatgaaacatgcagcactctctgcaactgcccctgtggatttccataggcaggagagtatccagtgttgagtggagctggtattctcagaaacgaagcccctttcctcattttgcgccaatctcttcagtcatttttaccctagtagtataatgctttgtcaaagtcactgtcatctgatgttaacagttgttttcgccagatgacttttcaaaaggtaacttcaccataataccggttaatgtgataaaaacactgcatgtagccaattttttttttttttgagatggagttattggctcttgttgcccaggctagagtgcagcggcgtgatcttggctcactgcaacctccatctcgtgggttcaggtaattctcctgcctcagcctcccgagtggctgggattacaggcacacgccaccatgcccagctaatttttttgtatttttagtagagtcggggtttcactatatgttggccaggctggtctcgaactcctgacctcaggtgatccgcctgcctcagccttccaaagtgctggggttacaggtgtgagccactgcacccagccaaatattttcttatttatttatttattttagagacaggatgccattatgttgcctagtttggaatgcagtgtctatttagaggcgtgatcatggcatactatagcctcggctcaaaggaccctggtctcaaaggaccctgccaccttagcctcctgagtagctgggacaagtgtgcgccaccacacctggctaattttttaaattttttgtagagatagtgtctcgctatgttgcccacgctggtctggaattcctggactcaaggcctcttcctgccctcagacttccaaagtgttaggattacagggtgagtcaccacgcccagccagtgtgaattttctaatgctgagtaagttgtgatccagaagtaaatgtatctgcaagctgatttaaattgtagattttctcttcattgcatattttctgatgttgaataaagtctgagtattaactaaagtttttgcttcttaaatatgtaagaattgtcctcaaaatctctattcttgagcacagtagtaaaaatatttttacatacattgtatttcaagggttctgcataagcaaccttgttttattgtgacaatttatttgggaattgtatcaaatatataatactgagatgttctca

SEQ ID NO: 1509 - DNA, 568 bp, Homo sapiens
gcacttgcagtcagaactccgggcccctcggggcgtgactgcccagctgtgtcacccggagcagctcatgctgcttctaagctcagcttccttgttggcaaagggccctactgtgtggcacacgccgtgcacgtcaggacaagcacaacgcatggcgcacaccacctgctgggagaggcaattgtgcactctacagccacagggacaggacacagcgcggtgagcccacccggtccaggagcgctgggaaagggccccaggagaggcagcagagctgagacaggacgacgaccaggagcgaccaggaaggggaggaggagagtgctctgggcagaggggacagcgtgtacaaaggcccggagtctcagtgtgccacattgaggtgtcacgcgccacactccatggcatccacgctacagatgccaaaggccacgggaaagcgagttcgccattctgctgaggtgggcaggctactattccccgggacgtggctgacacccctcacctgccccgatgtgcagctgaagagacccctcgtccggccttggcctcaggggagggacgatgt

SEQ ID NO: 1510 - DNA, 334 bp, Homo sapiens
cctctgcccagtcttcaacccccgcctttggagtccgtggaggaaaagagcagaaacaggagcccagagaccattccagactcaccagactgggatccccagggacaggacacttagggaagagcagagaggacatggcctggtcaggtaaaaaggtaaggatgaagaagacagtggtccaaggtgactcccaatgcctgaatcacatggctgcttcctgctgccacaatccactggcccactgacttgtaggggaagtaaacaggagcccctgagatcatcttaattcagaaatcttcaaatgtttctactaaatgagattaaaaaaaataaa

SEQ ID NO: 1511 - DNA, 5339 bp, Homo sapiens
agttccggtccggcagagatcgcggagagacgcagaacgcagcccgctcctccagggccctccaggccctccggccccgggccggcgggtgaactggggggccccgggacaggccgagccctctgccctgcagataacggaggcctctgctgtggctgcccactggctgtgcccgcccactggctgtgcccagaccttgaagccgcagcgaacctctctttcccaccccacctcggtgactaatggcggccgtggcgtctcccagcccggaccccgccggcacccgggtctcccgacccaagcctcgacgaaacccccgcagagccgccgggacgcagcgcctttgggcggcgctgggcgtggtgggccgggaagtatggcggcagctcgaacgccgcgcggcggaggccattaaggcgtggacggcccgggaaggcggcctagggacgcaagcaggctcggccgcctctttaggccacggagccgcgcagatccggttcccgggtgaccactctgtcgccattgggcgagacctacctagtcctgacgacaacggacaaaggccttaaggggcctggaaggtgagcgaagtcccgaacgacgacgggtggaacggttagcggccatcgggcggttggtcttcattctaccagactttgctgtcggaagagagaaatggtagaatgacaggccacgtttggcccgttggaaatgcccaccaccctctgggaagatttactggccgtttatggaaggcctgtgtatataatatgaaaaagctgctctcaactccaccccaaccttttaatagaaaacatttgtcacatctagcccttctagatggaaagaggttgccgacgtatgataaaatagagttagaaagttacacatcttgtaaattctcatttgtttaaaagaaatcatagaaaatacatgtcttctggagatgacttttggaaatggagttgttaagacggcctctggaagcgatacgtccacgtttgttaagtgggttagatgacatggagctggaagacctgagaaggaagagaagaaggttctatgctagactggtcatatttagaagacattttcatattctatccattgttttgtgtgcattttattcctcactactgtgtatatagttgacaatgctaagcttttttgaaatgtctcttctttttagatgttctgaagtgcctgatatgttaaaattagaggtagcaaaatcacattttgtaaatacctttttgttacaattcataggaaatatttttgggggggaatggccaaatcacctgttgagtaatactcattgtgtttgtgcagtggttcaggggaggagagaggagggggaggtgcagagagctctatgccatcctgtttacagcgaggcaagatgaatcattatgtctgtgcattttgttttacttatctgtgtatatagtgtacataaaggacagacgagtcctaattgacaacatctagtctttctggatgttaaagaggttgccagtgtatgacaaaagtagagttagtaaactaatatattttgtacattttgttttacaagtcctaggaaagattgtcttctgaaaatttgatgtcttctgggttgatggagatgggaagggttctaggccagaatgttcacatttggaagactctttcaaattataactgttgttacatgtttgcagtttattcaagactgctgtatacatagtagacaaattaactccttacttgaaacatctagtctatctagatgtttagaagtgcccgatgtatgttaaatgtataggtagtaaaataccactttgtaaatatctttttgctaaaattcataggaaatgcttttggaaattgaattgtgaagccacctttgtgaacagtatagtaatgtctatacttgttcaatagtttagaggaggtaggagggaagaaattgcaaaaggtaatattactagtgtgttcatacttggacattttcagacaccatttttctatatgttttgtgcattttgttttgctctgtatatagtatatataatggacaaatagtcctaatttttcaacatctagtctctagatgttaaagaggttgccagtgtatgacaaaggagtaaaattagcatattttgtacactttgtgttgaaattcgtaggaaaacttgtcttctgtaaagacttttgcataggaatttgtttgaccatctctaagcattacacgtgcctgtacttgtccactggattgaaggcagagaaggaagggaggagggaatgattcaaggccaaaatggccacatttagaagatacctcagatgataaccattgttatgtgtgtgcaattttatttaacagtgctgtgtatgtggtggacaagttatatgaaatatctagtctttctagatatttggaagtgcttgatgtatttaaaagtggtagtagaataacactttgtaaatagcttttaaaaactgatgggaaatgctgtttggaagtggaattgttgaaccacctgggaggtgggagggaagaaattgcaaatggtgttttgccattgtttattagaaaatttcagcttaatccattgtgtatatgttacatgcatttcatttaactttgctatactgtatatattgtatatataacggacaaattagtcccgattttataatatctagtctctagatattaaagaggttgccaatgtatgacagaagtagagttagtaaactaacacattttgtacactttgttaaaatttgtagaaaggctgtcttctgaaaaggacttttggaagtgagataacatcagctctaagtgacacgtgcctatatccatcaggttggtggtggagaggagttggaaggaatgaagggttctagaccagaatgttcgtatttagaagacactatcagatataaccattgttacatgtgtgtagtttattcaaccctactgtgtatatagcggacaaacttaagtccttatttgaaacatctagtctttctagatgtttagaagtgcacaaagtatgttaaaagtagaggtagtaaataacacattttgtagctatccttttgatatgaaatattgtcttggaaattgatcaattctctgagcagtacccattttgatatttgtgctggttcagggggaaggaggagcacaaagtgcaaagggctttctaccagtgtccagtgtgtttatgaggaggcacattgaccattgtcccttatgtctgcattttcatttactgtgctgtgtatatagtgtatataagcggacataggagtcctaatttacgtctagtcgatgttaaaaaggttgccagtatatgacaaaagtagaattagtaaactactacattgagtacactttgtgttaaaattcatagggaagacttcttaaaaacaagtgaaattgttaaaaccccccctaagcattacagatggcttatagctgtccacggggttggtagaggtgggaaagggaagggttctaggccagaatgttcctatttagaagacactcaaattacagtctgtgttatgtatgtataccatttattcaatgctactgtgtatataatggaaaacttaagtccagtttgaaacatctagtctttctaggtgtttaaaagtgtacaacggcctgtcgcagtggcgcatgcctgtaatcccagcactttgggaggccgaggcaggcggatcacgaggtcaagagatcaggaccatcttggccaacatggtgaaaccccatctttactaaaaatacaaaaattagctggtcgtggtggtgcccacctgtagccccagttactcgagaggctgaggcaggagaatcgcttgaacttgggaggcggaagttgcagtgagccaagatcgcaccactgcactccagcctggcgacagagcgaggctccgtttcaaaaaaaaaagtgcacaatgtaggttaacagtagagggcttaagtaacacccctctaagcatttgttttcagtacttcctaggagtggttgcatttgggaatggaattgttaaaacttgatgcttaggagcgaatgcagactattcattgggtgtttggggtgggggaagggggggtgggcagaggaggtatgcagggagaggggttctgtgctcctgagattagttcagatggtctaaccattgttctatatgtgcattttagttaatattgtgtattaaaggataagtcttaatgctcaaagtatgttaaaaatagatgtagtaaatcagtccctttgtgaatgtccttttgttagtttttaggaaggcctgtcctctgggagtgacctttattagtccaccccttggagctagacatcctgtacttagtcacggggatggtggaagagggagaagaggaagggtgaagggaagggctctttgctagtatctccatatctagacgatggttttagatgataaccacaggtctacaagagcgtttttagtaaagtgcctgtgttcattgtggacaaagttattattttgcaacatctaagctttacgaatggggtgacaacttatgataaaaactagagctagtgaattagcctatttgtaaatacctttgttataattgataggatacatcttggacatggaattgttaagccacctctgagcagtgtatgtcaggacttgttcattaggttggcagcagaggggcagaaggaattatacaggtagagatgtatgcagatgtgtccatatatgtccatatttacattttgatagccattgatgtatgcatctcttggctgtactataagaacacattaattcaatggaaatacactttgctaatattttaatggtatagatctgctaatgaattctcttaaaaacatactgtattctgttgctgtgtgtttcattttaaattgagcattaagggaatgcagcatttaaatcagaactctgccaatgcttttatctagaggcgtgttgccatttttgtcttatatgaaatttctgtcccaagaaaggcaggattacatctttttttttttttttagcagtttgagttggtgtagtgtattcttggttatcagaatactcatatagctttgggattttgaattggtaaatattcatgatgtgtgaaaaatcatgatacatactgtacagtctcagtcccataaaattggatgttgtgcctacacacaggatctagaagaatatgtcaaactataaactgcttgtgattgtgaatgactttgttctttgcttgtgtttttcaatttcctataatgcacatactaacttttaaaaaataaaggttattttaaaagcctgta

SEQ ID NO: 1512 - DNA, 620 bp, Homo sapiens
cctcttggaagctcctgtctgtgaagggtgtgcacagagagcttcggtagcctgcgaagcagccattttcacttccacggagcagatgctggcctgggtgctggaatatggaaatgaggaagatcctgcctgaggatttcatgacagtgctgcgattaccgacgtgagccactgtgcccagcctcactttaaaaaaaaaaaaaggttatgaagcatctcaacacaagacctcctttgctcatcacaaccacccagtgaagcaggcaagacaacagaaactccccacctgtgatagatgtgaggcctgaagtctcccacatacccacggcagatgcaacgcacagcggtgaccaatggtagggataacaagtattgcttccgcccattcagtacttcttgcatgccagatctgtgctaagtgctagatgaacacagtctcttttcattctcatagctctttaaaacaggtattgttttcttttaaaacaaattgttttgttaaatataaatatcatgtaccttatatatatattatatataaaaatacatgtaatttaccattttaaccatttcaaaatgtccagttcaggagcattaagtacagtcacattgttgtgcta

SEQ ID NO: 1513 - DNA, 3514 bp, Homo sapiens
acttagatatgcagctgaaggggttcctgggtttatttctcctgagaactggcatgggctctgagttttgccattcctggcttcggtcctagcattctaagctgcctgaccttgggcatttgtcaacctgtctgaaccttagtatcctttcctctctgtagagtgggaagagatggagtctgtgaagcgcctggtgcaagctgtactaatacacctaacaatgagctcctccctccctgcctccttgcctccctgcctccctccctcccatggggaggccagaatctggctgcttgctgccacctagtggctctttggggtcatcttccctcataggaaccacagatccagtagcctagagcagaaagggaaggaagattcaacctaggggtgtttatgtttaccgtgtgtctggcactcgtggagatagtgcatgggactacataagtaagacagcatcgaagaggtgtcttggagtgtggttaggagcgagggctctggagtcagacaagctacagactagctgagtgaccttggggcaagttatttcatttcactgtgcctcagtttccccatctgtaaaatttgtataacgataacctacctcgcgtatctacagtgcctagcatagtgccccacataaatgtgttcactaaatgtacgtcgttattaatcataggagcttgcagtctcactagggccgactggaaaactattaagtgatcctcaaagccacaggcgctcagagactggagagatcaaggtgcagaagactcagggaagggtagtcttgagggcagctgcccttaaagggtgggcagcatttagtgaagcagatggagggaagttgaccggcatcccagatgtggggaagaggccagcagcctagtctcctccacggcccagcccccactgtcttaccaaagaacagctttaaccaaacccctctgggcatcaggaccaccgctacacctcttgccaggctgcagagctatgcagtctggaggcccagctctcgtcagaagctggggcatgggctctaggggaacctggggtcggatgagcccctgagcaggtggcaggtgcctacatgtcccagtgtgggttcgtgtttgtgtaaggctctcctgcccccacccccaggcaccagcacagcctttgccttcactctctcccctcccctgtccctgggggattgaataagggaagctggggttggccgtccttctagcttgattggcagcaccagcgctgtgacggaaggatgtgttgtgccagcagcctcttggccgcaggacaaatgcacatttaaagagataacctttttgtgtcctggctgggaaagaggtcagtgcagatgtttttgggtccaggtgttggctgtgagttttcctttcctctatgaactgacctcagcagcctagtggacagtcacctccttacaggtgtaaaatccaagccagtcaaccatagcaggtggcagacttagctgccttccctgtggtgtggtgcagaccatgacccttgaggcaaatgggtgagctggccccacctcgcctgcagcctcctctgaggctcccctgctgcctccccactagccgccctgaatcacctacttcccagcacccccagcccgtggttctcatcccgtcttccatctgtgatctggcactcattcttccagagccaaagaggaatcccctcttctcatgcagaagacagtcatgcctgcccttgtgtgtcaaaagcattgcatttatgccctgttagaacccctgtcacaagcatggtgcctgaacacaggtgcctctgtggtctcttctcatcctcacccaatgggtactatgctagccccattttacagatgaggcaaacgtggcacggagagctccactaacttgcctggatgattcatgcatccatccattcacttagcaaatacttatttaacttctgctttgtgctagctagtggggatgtggcagtggggatgtggcagtggggatgtggcagtggggatgtggcagtgggaatgtggcagtggggatgtggcagtgaggaagacgacagacaggctccttgggaagcagagtaagcaagtgaggagacaggcgggcgtggtgaggctgcgcaggcgctgagatcgagttgctgggggaggcctctctgaggtggtggggcttgagttgattctgaaggacaagaagagccagccctgggggtctgggggaatggtattccaagtggagggaacagcaggtgctgggggcagggaggtgacagatgtgtcccaggtacagagaacagagtgaacaggagagaggagggggccagggcattccaggtggggaaaggcagcaggtggcccggtggtaccacctcttttggcgagggctttggaccttacccggtgtgatgggaagtcctggaagtgtgttaagcaggggagtctttttgatcagattttctagaaaacgacagtgggctgctgtggacctcagagaggcatgtgtgatagtgtgtttcgggctcttcccacgaaactcggctctgcacagtgagacctcatttcctggttctgtttgatgagtgagcgaatgcacatggcaggcggtcatgtcccttgggcctgtgaggtgaggaagggtccctgagccctgtggggatagagactcttccaccattctgacatgatccgagttagcaggcagcactgtccagatggaaatggggatgggagacagaccatctctctcagcgggtccagccatgagccagcagactgtttcccattggcccccatctttcagagtgggatgatctttctaacaaagaaacccacacaggaatttggtgtgtgtgtgcgtgtgtgtattacctttcaggatggaagccggtggggtgtggagcgaggggctggcatggttggcctcgcccagctcctgtaccctgtgtgtgcctagagcatgcacctgctccctctgctgggctgagactcagaggacactgggcaggtggtggggggtaggagggtcgtggctgtgttgggtggggccacatcaggtgtgtggcacagagggggagggggagggggagtggcagtgtgttccacccagcagtccctgtgtttgacctcttcgtacactctctgttgtattagctctcagaatgaaaacgagatacttttccccaatctatgtacgttgttcttaagaatgtacacttggccaggtgcagtggctcacgcctgtaatcccagcactttgggaggccaatgtgggtggatcacctgaggtcaggagttcaagaccagcctggccaacatggcgaaaccccatctctactaaaaatacaaaaatcacctgggtgtggtggtgggcacctgtaatcccagctactagggagactgaggcaggagaattgcttgaacccaggaggtggaggttgcagtgagccgagaccgcgccactgcactccagcctgggcaacaagaacgaaactctgtctcccaaag

SEQ ID NO: 1514 - DNA, 652 bp, Homo sapiens
cgccgccggcgccctccatggtgaatcggtccccgcgatgtcttcacggcgggcggcccccaggctcgctccggcctaagcgctggctccctccacacgcggagaagagaaggaaagactacagttcaactgtcaattggttgatcacccggattttatctacaccttagcctatggttgttcatctcgtctctgcctatggcccattgactcccggatcccagctccattcttcggtactttacgcaccctgcttccagtaccccaaccagaagaatatatatagcagttaactgtcagctggcgaaaaggaggaaaattcaggaagataaaatagctgaatgaattatccccgctccagaacgcagaggaaaaatgaaatggccagacccagatgttaaaaatgtgttccttgctctttcctgccctagcaagggctgttccatgtttaggggatgaatgccgctgagagtattagcaaaaatacatgtgtcattgagtctgaggaagataactgagacatacaggtatttctcataatgcatgtgggcatccatagacatattcttaaatggcttaaggacttggaaactacctctaggaaacctgaaacttgaatgttggtccactagggagaagaaatgttccatta

SEQ ID NO: 1515 - DNA, 1000 bp, Homo sapiens
gcctgattgtcctctcctttccttaccttcagcaccaagaagtttccggtcccggtacagatcagtgaggaagaggctattgacaagtgtggatttgcccaggccagactctcctgagaggagagaggacagaggcaccaaatcagaagggacccttctctgggctgtctgatagtctgcagagacacagctgcttccgtgctctaggagagagggactccttggagatctgatctcactagtagtcgtaattctttggatgggctcagtttgtactgcttcatcctttgggtaagacaaaatcctacggggaactctgactccttgggggttctggaccttggatggtgggtcatcttctaagatttgtgattgtaagttattcttctggtcttgaaaactcaactgatgagtagatttggcatctgggattgatgaagcatgatggccgacctcgcgccctgacttgctctcactgcctcttcgtgctgcttcctctctgggtggactaactttccattgtctgcttgaagcatgggaagccagtgtctgagtcttctggctctttagatggggagaggaatggcgggatgattctgttcttggtccagtctcgggtccccgaggagtgggtactgcatagtgtccaggtcctgactggagggagacagatcgagggtagtctgatgctgaatggggagtggtgggatgtgcagcttctgatcttcggtgggaagggttcagggagactgcagcacttcgatggcttgaggcaagaacgtacccatgtccctgctgaggggatgtgttagtagtaacctcagaccctctctgtgctgaaaccgctaccttggccccaggtttatttgtcttgaccatctgatagattgtgcccttctgagtagatcccgtattttactggctggcttgtattcaggatcctaatgatgcctgaatatttaccctgttttaaagctgctgtttcttgggctcccacaaa

SEQ ID NO: 1516 - DNA, 656 bp, Homo sapiens
caaatcaatcttgtcactcctcggaaagcaatgcaagataataagtagtattcacctgattgctttcctgctccgagacagctggtgacgcatgtcttcctgataaccaggagtttcagatctaaggcagggataaagggaaactggaagctctcggaatctaaatgtgacagtcgatggctgaggagagggtcagaaggaatagaatctgtgacacgtatgagaaaggaacaaaatttatctgctctggttgcaatgattagatgtctctttgtctggctttccttgcagtgggtgactgatcgtacccgccagctggctaatgtcataattaacaaagttgctactacatctgcaaagtttaatcgaaaaatttgccagtgatatgatggccttgtcacagagatcacaagggacacggagttgacttttgctcaaggtggaacgacagagctgtgtaggcaagatgagaaattgcgaacttgttcggccaaaggaggctaataatgaaggggccgggaaggaggccagtgctaccagggttatctcacaacctcagatgctggataagtcgacggaggcagaatcgctttgggatgacattcagaaagcctggagtgattacttgcaagagaaaagcctacctattctttcca

SEQ ID NO: 1517 - DNA, 3192 bp, Homo sapiens
aggtggggaaatggtcaaagagcgatgggcccagaaaagggtcagacccagatggagatgccactggctgctagcagacccccacgctgggtctagcccacccaatcccatggggatgctcctgtgctctgcagacatctgggtgctgccacaggggcccgacagagttggcatctgggtggatctgagccaagtggtgcttctgggcctcagcaagtagctggtgctgattctgggcagccaactgtggcagcatcttcaggtgcgagtgctgctgggtgaagctgcgtgggcagtccagaaagtgacgtgacagtccacagggaccgacgtagggtttccagcccctatctgtgcagatgctgtcctccaaaccatcacggtccctctctggctggggacgtgcgcctgccactgctggcttgccagcatgatcattggttgtgacctgttgagcccatcttgccagcctcacaaaggacagtactagctgcttatgacaggaaagtggaagaacttggcctggatatttctggagaattaccgtgtgtgctagtcagtctttcgtgtcaaccaggccaggctgtggggcccagtgatctcatcgagaggggccgaggtgttgctgtgatcgtgtgctgctggaatgtggtgaacacctacagtcgatttcacctaaagatcatccttgagaatgtgggtgggcctcatcctatcagctgaaagctttaagagcaaaacccgaggtgtcccagagagggaattctgccttgagacggcggcttcccactcccactggatgtccagcccgcggccccacggctgggtgagcccgtcctctcctcgtttctgtctccggacccaccgtgtggccccagaccctccagtgaggacctcccgtatttcttcagagcagcccttgcgtgctggaggcctgggcttcagtgtgtccctgggtgccctggggcatgttctgtgacctcccagctcctcgcctcatggggccgctgtatcaagtgacacagtttgtgtgctgcgtaccatgcctggcacccatttgaggtgttgcaaggaggccatgtttgctcgatgagagcagcctaagatctacaaactgttgttcgagtggatgggaacttgatgctattttcaggctgaatgacaagactccgcgatgcttctcggcctgggctgcacaacggaatctaccagggaggttttaaaaacactggtacttgctggaggtggtggcgcctgtctgtaattgcagctgctccagaggctgaggcggaggattgcttgagcccaagagtttcggtttatttgctttttcagagtcttgctcttgcccaggctggagtgcagttccatgatctcggctcactgcctcagcctcccaagtagctgggattacaggtgcatacaaccaggcctggctgatcttcgtatttttagtagagatggggtttcaccatgatggtcaggctggtcaagatctcctgacctcaagtgatctgcccgcctcggcctcccaaagtgctgggattacagacatgaaccacaacacctgccgagcccaggtgttttgaatccagcacgggcaatggcaagaccctgtcccaacaaacaaaaaaacactggtgcctgaggcccaccccgagagattctgattgagttgatttggatttgaattatctttaaaattttggatgtgaattttttttttttttcttggaatggagtttcactcttgttccccaggctggagtgcaacgggacgatcttggctcaccgcaacctccgcctactgggttcaagccattctcctgcctcagcttcccaagtagctgggattacaggcatgtgctaccatgcccagctaattttgtatttttagtagagacagggtttctccatgttgctcaggctggtcttgaactcctgacctcaggtgatccgcccgcctcggactcccaaagtgctgggattacaggcatgagccaccatgcctggccggatgtgaattatcttaaaaattttcaggtaattctaatgggccaaggttgagaacccctgctctgggcccatccgagcaccaggctgtcacaaacgcatgcatgcactcacgcccgtgggcttggggggcttcggaaatgtgcttctgcttttttgagatggggtctttctgttgcccatcccggagcacagtggcacgatcacagctcactgcagcctcgacctcctgggctcaggtgatcctcccgcctcagcctcctgagtgtctgcttctggttttcatgatgacctggggcccaggcatactacacttgtgctgttcaggggccagtcctgcaccaggagcccatcagccacagctccgccgagaagcactgatatgcagagctaagcagctttgtttccacgtggatcctgcgtaggttttcttggtccatccgtagacaccgcactcctgcagaggatcttctcgggatgccccactgtctctgttttccctcttcactgaacactcagtcggggctcgccatgatgcctctgtgtctgctggcttctcccccattggaacagccttcttggcacgccacactgctagctgctgggcactgtgctttctgcctttaccgttctgccgtgatgttgccaaaatagcagcaacaacaacaacaacaaaggctgggcacctggctcatgcctgtattcccagcagttcgagatcagcctgggcaacatgccccaactggaccctaggcaaaagtgagtggcactcctctgccaggactccaggcaagccccggcatcttcttgctgccgtcccagacaacagaagttaccagatgaacagacttggatgggccacgggggtggagagctggaaagcttggctgtgcctctcgatgatgattaagatttcaatatttacagcaaaaccacaaagcaaatgatagaataaagcaaaacaatggaaaatctgagttcactcgtgagagaggtacgtatgtgagctctgaggaaattacagagggaacgcatgcagcgggacagctctcccaatcgcagcgtgcaaagtagacatccatagtgtcttttgaaaaatgaaaaacacattactttgaacagccaagaaaaaaattgcaatttattaagattcaataaagcgttgtactttcgaaagca

SEQ ID NO: 1518 - DNA, 2017 bp, Homo sapiens
ggtttcaccctgttagccaggatggtctcgatctcctcacctcgtgatctgcccgcctcagcctcccaaagagctgggattacaggcatgagccactgcgcctggccttgttttactttttaaaatttctgtgagctgctctagaaaactaaaggacgaaaactttactgtcataattccaagttcagtcagggatttctcagaattgaggtgtgcagcatccagattcccctttatgtggatagggatccctgtgccatgtcttgcacttacctaagaactataggaattctccatgtacctcctacagtttttctagcagtgttggacaatggattctaaaggttcctgagactttgttaaatttctcataattccagagggaaggccaaaatattgagaatactcaatgataggatgagtttccactctacttccttatcctcaaggcacacaccagagttccactgggtgaggacagggaagtaggatgtcccaacaccctctgagggttttcatgcattaatcccgccatatgggctgatggttggaactgcctttagttctctaagtaaaggtctaaaaatgcacctgtggtttctgaacttgggtatacgctgatacataaggactaccatagaagttacatgccttaatcctgtaatacttttgtgtggtatcattctgctaatatattgtccacagggccaaaccccaagttacacagcgcaacagtacttgtcaaccactccatctcctcagtgacacaggtgctaaagtacctctcccctgaggcaaagtcccgacacatctgtgattgaatgcaactatagaagtattagcataaaaatatgtggcctggaaggaatctctgaagatactgaagaacctcaagttccctacattgctaggagccaagggaaggagacactgtacacctagagcgctgaattagcagctgaggttttagtatttgaaagcaaataatataaagcgagtaatgtctacagtgggtctcagttaccatttggctacttatttaggactcgattaacttggcaacttttacaaaaaacattcacatcacaacatgcaacttaaaaaacagttaatgtaactatgccactgtcagcaaggccagcttgcataccagagttaagaatgagagtgtctgtctgcctagggcttaacattcaaagatatttataatctgtgttttaaggttaaattttatatgacccagttttccttctttgttcactatacactaaaattaaacgcctctacgctgtgcaagaaatcactatgtgtgattttactatttcaaccaatccatagaccctgaggatttggcagcagaattcaggagaaatgctacctaaagtgattgagctgttgctaattctaccttctgttccactcaagtacctccagggactaacaagggaaggcaagggcaactgtgactgactaggtaaccagctattctgttgtgacagaagaaaccaggtaatacttgattttcaaaagataattttaactgctgccctatactacttttagtatagtttggcttgaccttaatagccatgtccctcatcttagatagaataaccaaattggtttaaaattacttgatctatgtcactgaaacctgaaatatgccatcactaagagaacccccaaataaaaaataaagaactaaaaaacacaaccaaaccaaatcaaaccaaaaacctcattctctgtatcatactttaaaactaaaataaaaatccctgtgtcacaggtgcttgctcagggctgccaacttctatttttcacctgagagacatctaaaagcgcaaactatgcttgtaaaaaccaaaaagtaaatctctacataggacaatacttataagcagacctattgataccacttatatataattagtctgttttctttagaaagtatcagagcagaaacgtctttggttaattctttcctctacatgcaaaataaaatattcttaaacga

SEQ ID NO: 1519 - DNA, 943 bp, Homo sapiens
agaggtggttgggtcctgagagctctgcccttatgaatggattagtatcattattgcaggagtggcttcatgatggagagagtggatttgtcatgaaagtgagttcggccattccttgctgtctcacgtgccacctcttgccatgggatgccctcgccatgggatgacagcaagaaggcccttgcttgagtgagcccctccatcttcggctctccggcctccaggactgttagaaatacatctctgttctttgtaaattacccaggctgtagtactctgttatagcaacacaaaacagactaagacactactatgtagatgaagaaacaggcccaagaggtgaggagtgttgtccaggtcttctggccagaggagcggcagagatgggatttcaaccctgggactgtgtggcttgtgaccactcctagcttcagccctgcccggtgctgaggggtttggggccagaacgatggccagatgtttgggcacactgggccctacccacctggaaagaggctggcctggggttgaatgagaaccagaagtgactcaggctaggacccctctgcaccctccctcaggccgtgggtaattacctgcccaggttaatagcgcccacttcccgccacctttcatcaaggctcctggagctgccaggcagtaattaaccctcacagcacccttctgaagtcagcactggaggcagacgtgtgatgaaacacgtttattacaggaagcaccagttagcccagatgcttctcatctttggagttgagctgcaggctggagacctggaaggccctcgcagcgcctgctcccatcctctcacctcacgaaagcgcaggaatgtgggtttggagccaatgaaaagtactggaatctggctctgctctgtgaccctggacaagtcactgcccctctctgggcttcagtttcctccttg

SEQ ID NO: 1520 - DNA, 588 bp, Homo sapiens
aatgggtttttgtttatctgtattttattcagagttccttggtttgaacctggtgtcctgttccaggcatccagccaggatactacattatgtttagtcattgtgtgttcttaggctcctcttggctgtactagtttcttagaatttcctcgtttttgattgtctggacatgatgatcttgacagttttgaggaaaagtggtcaggtattttgtagaatgtccctcatatgataaaaagttttttagttctttgtgcatttcttgcccccactaacacaaaatagactgtgaaagtgccattattaaagatacattaaagtatgagagaaagataaattcttataagaatctgggaaggcttttcatcacaagtaatgttgtccatgaagtaattagttgtgtttgtgatagaatagggggtgtcacgtgaaaatcaagagtgcaggtcatgttctagtaacagactaatagaattgcaatgtgatgcgagtaaggtgcaattagaagtaacagtgttaaagtttggcaggggcctgagagcttttttccctcctgacaccaaataaatggtatcttttccaacaaca

SEQ ID NO: 1521 - DNA, 448 bp, Homo sapiens
aaagtatctccagggagaaaggagatttgcacccatgatcatctgaaggtagatacagttatacacaagatgaatggattaaccactggaagacctgcactactacaaatgttaaagaaagtccttccaagaaagaaaaaaggcaacttaatggaaacttgtgtctaccaaatggaaagaagagcaatgggaatcctaactacggtacactgaagaacacttttgcagctgactaacaactcttgatattgagaaagttatcagaattatttgcaaatctcctctcagatttgcaaaggatgctggcatttctccatgaggcaggtatacaagcaacattttgtgaaattgtttgtctgacaaaattgtgtgaaattttccagaattaaaacagcatgtaaaatttaacttctataactttctttaaaataaaggaaaactgaatgtg

SEQ ID NO: 1522 - DNA, 358 bp, Homo sapiens
ggataatgcaagtgtttaacagatgcttcactattaaaatattttccccccaagtctcaaatattgaagaatctctaaccagaaggcacagatcattcatggggatgtataaccgaaaccagtcctctccaccgcctggggatcttcactttcgcagtctacgactgcctgtgactccagaaagacaaactgcagattggccaagatggattaagctggaataataaagtatatctatgagatgatttctgtaaactctgacttgctgagaaaaaagtgaaaaagctttttctggaagaaacatggcaacttaaccgttattaatctggactaaataaaacaggaaactgcttcttta

SEQ ID NO: 1523 - DNA, 901 bp, Homo sapiens
acagccaagagggaggccgggccaggggctggtggcttcctccgcgagctctgccagtttctggcctcaggtcctgagttgttatcgcaagtccaggaagaatgaggttactcaggcaactggagggtgaggatggagaagagctttattgagcaacagaacagctctcagcagagaggagacccaaagtgggtagctcctacctgcaggaaggtttctgaagggggccaagatggcccaataggaacagctccagtctgcagctcccagaaagaccaacgcagaaggcagatgatgaattagagcggttgttatcgaatctgccaccagagggcgatccaggctgaagatctctctctctgcggaagccagccaccgctctccaaggactctcgagcagctccatctacagattcacatggagaagaattaagggttcctgccaatcaccagcaccactttgccagccttgtaagtgggccaccttggaattggagcctccagttcctactgacatctgactgcaacatcatgagagaccctgagtttgaaccacccagctgagctgcttctgagctaacccactgaaaccgtgaaagtacctgaatgaaacaacacccagtagccactagcacacctagctcccagatctgtttttgatgccattcttcagtaaaaggaagcaaggctgcttggagaaattgctatcaaggactggggtagaaaatatacaagatgaaattggagcatcttgtagtgcttgaaaacagttggcatctgtgtgaagatgtgaatggaggaggcagagtaggcagtgagtgccgcagccacagcttgtgttctctgcagccctggcacagaagataggaacactcatgggggatgcggccactgtgatgtc

SEQ ID NO: 1524 - DNA, 454 bp, Homo sapiens
agttaaaacctaaatgagcaacaaacgaggtgacgtgcgttatcagttttgtcttccatgtcttcctcatcctgctgtttgctccacggctcttgacaggatggagacgaggaaagaacttccacatccacattcaaaacgtctgccagaactccctcaggcgattactttaaaacatgaaagaaattgcaccttttccttaagggcaagatggtgctgtgggctttcctctctcctgatgagatgatgcaaatggactccatagagaaacgctgcccgtgtaacaatgcagttacgcaacccggtgcatgacacatgaattgcagcgcacctgagatcctgatgaaatcctgggagcctggagctgtcaaacatggttttaaaaaataaagggaatacacccagcccacaccctgactttacaacctttaattaattagaggaaagaaagaga

SEQ ID NO: 1525 - DNA, 3946 bp, Homo sapiens
gggagccggtgtgtccaggacacccttgcggagtgtctgctggagggagccagtgtgtcagtgagatggctatgcccctgggctgctgtgtcccaggtttcctcagtctctaaccctttgttctcacaggggatggactcttgcttcttttcccaactccaccaagagggaccgtcccaggacgtccttccccgggcatctggccctacagctgcctgaggtctccatcaccgttggcgccatcagtctgctgtgcagccagctgttggtttggagagcctgaagaactgcagttcacgtctcatctaaaggagctgaaatgatattgcagctttttcttttggttgcgtgcagtgagaatctgggagctgaacctgttatctgcatggtcttcagaaatcaggcaaactcggaaaatgccaacgccaaaaatgctgatgggtgacaaagtgtcacaggtgtgatgcattacaaatctcaggacttttgttcactggatttgaaaggtcaagcttcacaggaaaatgatgaagtcccaaaagaccagaaatatatttcagaagatgccagttactactttaaatgtcaaaccaacatttcagaaataactttcaatgattatttcctgccaagaaggtgaacgctggagaccttaatggtggaagatggagggcgtctttccttctgttaagctgacaacttggcttccatcttgtgaggacctcaccctacctggtggcagaggacgtctgacgccctcaatcattgccgttacacttcccagcctggtggtcagtctcctggggtctgtgtgttaacaaaccatcgactggacaatcgcagttttccttatgaaggcttactttaaaaaggctctggattttcagaagcgaagtcgctttcatccccgattcagacccatcctagtggaggaaaaatcctaccagaagaagggctgaccataggaacttgccatttccttgaccccatcatatctgaggaaaaaacaacagaaaaggtcaaaacccacgtgtacgcccaacgtcctgattgacgactttgcctgcagcttctgctttcctgaaattcgctgctgcctttagaacccttgtctgcagccagtggggagttcaggacttaggcggagctgccccaccctcctgcttggcaccctgcaaatacatgccctcccttccatcgctgcagacctcagagtgggcgtccggtctcctgtgcgggatgagaatacacaccctcccttccatcgctgcagaccttagagtggatgtccggtctcctgtatgggatgagaatacacgccttcccttccatcgctgcagagtggacgtctggtctcctgtgtgggataatacacgccctcctttcaatcgctgcagacctcagagtggacgtccggtctcctgtgtgggataatacacgccctcctttcaatcgctgcggacctcagagtggatgtccggtctcctgtatgggatgagatacactccttcccttccactgctgcagacctcagagtggacgtccggtctcctgtgtgggatgagatacactccttcccttccactgctgcagacctcagagtggacgtccggtctcctttgtgggatgagaatacactccttcccttccatcactgcagacctcagagtggacgtccggtctcctgtgcgggacaagaatacactccttcccttccatcactgcagacctcagagtggacgtccagtctcctgtgcgggatgagatacactccttcccttccatcgctgcagacctcagagtggacgtccagtctctctgtgcgggccaagtgtacacagttttgttccgtcacaacttccacgacaggccagtgtgaggtttttgagctggtgctgactgaaaactgtcagctgcccaaggacctgggagctctgctccccactcctggtgtgcggtcttgcgcctggcctccctgcctaggttacatgcagtggtcatcccggtcgctcccacacccgtgtgggctctgggatcccctcttccagccagcccaggggacatctggctgtctcaggacccagccatctgtaaaaattaggcaggtcccttcagtatgctcctggtcaacaaagaaaaacttcaattttgagaatggcatctgtattccgaagtgttctctcagatgtttgagttccactaagtagattttcttagtctgctgtatcaatgacacagagagacgtgcattaaaacctcaaccatgtggatctatttcttttcagttaattttgcttcatgtatcttgaagctctgttatcaggtgcatgcacatttgggattgttatgctttcctgatgaactgaccttctttcattatgcaaggggaagaagatgctgcatacaggatggaatatccaggggaagacgtctaaggagagatgcccagctgggagtcctatgcaaggggaagaagatgctgcatacaggatgggatatccaggggaagatttctaagaagagatgcccagctgggagtcctatgcaaggggaagaagatgctgcatacaggatgggatatccaggggaagatttctaaggagagacacccggctggaagtcaagatatgtcagttgtttccattataataaaaccactcatgttagatgagctgaactttcccttttccccagttcttacgatcaaaaagtggctgtcctaaatttcatcactcaatatccttgctagagtcttcctttgtcagccaggctggagtgcaatgtgcaatggcacaatcttggctcactgcaacctctgtctcctgggctcaagcaattcttctgcctcagcctcctgagtagctgggattacagggcgctgggtgcccttccagggtgacctcacgggtgcccactgcagttcctgcttctccccacgggaactgagcgtgccgctgggaacacagcactcactgtgcacagttctgcacatggacttatgtggacaccacctgcttgcattcatcccctcctcctcatctctcccttgctgagaggcagcgtgcctgccgaacgcttcgtgctgtttctgcaatgctcacttgcggtcacatagttagacatccggatgatggatagatgaggagacacagtgcagactgggcgtggctgaccaccacacgtgcccctggagccatgggccgccggcttcatttccagggtggtgttacaatcaaaagaatgaacacatcaagagtgatttcaagtccaaccccttccctgtgttttctgcacagcttggaggccgtgcccaggtcctggatgttcctggtgacctttcctctttgccctttgctctcccacttggagctccatgctactccctcctgttgtactgaacctggccctcgttgccccttacgagggaagtccttgtcctctcatggcttccttcttgtccccttccctcagactcttcgtaataattatacaatactaattccaaatggaaactggaggcatggagcctatgccggcgtctccagcttctccagaggtaggaatggacactcaggtctccactgcatgctggtggatttgggagagtgtgatccatccaagccatgcgaaaatctgcacgactgagtcatgggacagtggagctttgtgatatcgcgtgcttttaaatccgaaaggacagtcatgatttaaggatttgaaagtcacacatttaacatctggattcacagtcataggtcttaaaccatgatagcttgtgcttctgaggtgcactgaattcatgcgtggctttcctagactttatcccatggaaccttcacgtgtcaggctatgtagagccctgaatctcaaagggagagcttggtcccagcaggtctcattattttgtattatattttaatagtttattttccctcttgcttcttca

SEQ ID NO: 1526 - DNA, 381 bp, Homo sapiens
acaggctgtgtctgtggctgccctggcttagggctctggctggcccctcctttccgacctggtctggcagagcagccccgcaggaccagctcgcaaggctcctggggccagtggggctctgtcctgtgaggcggtccctccgcaaggacagagtcagagagaggctgaaaccaggtcctgaaaaacatcacagaaactacagctggaaatttcctgttgaccctgatagactactacttgacaccagccgaccgatctgctggctgcccaccatggtcctgccacaattctgatgggacagagaattggccttactttctttcctgataaatagccatagacctcaagccagccagttttggccagcttatagagactgta

SEQ ID NO: 1527 - DNA, 2798 bp, Homo sapiens
gggtcgtgagaaaatacgcaggaagagataccccgtggacatgtttcccttggaaagtggagggaaccctctgagccgtgattccgcctgaattaagcagtggcgggcactggcctggcaggcggcttctactgccttggatttgcacctctaaggggtcacaggggccacccccgaaacaagacaaagtgtgatcatggacaggccctcggggggccggaagaaggaacggctccagtgatgaaagctgaacgccagctctctccccatcgttctcccggaccaggagagggctgctcggcagggctaggtttaaaaaccttccatgcaacttacgaaggcatccacagtgacttctgctgctgtggtacgttctgccctcccctcctccccgccccatcctgttctcggctacaagttatttatatgtacagtgtcatctgaacgtgcacgggcctatcccaggacatcacacacaaagaggcggcggtgaacccaagccgccgggccggcctgtggctcagtgtgtgtttcagaagtcccggccccaggcagctctcctgaacagagccactggaactcaggagggtcaggaccacagcccaaacaactgcgaccgaaaacaccctacagggcttgagaactaaaaaataaggagggatctgggcagccgagctgcctcctaaagaagccacgtcatagagaaaactgcttgctctatccatgagacggaggcggccggggtgtcctgccagcagacacgggtctgtccatcaccggccaccacgctgcctctgtccttcactcccatttaagggaaaacgatatctcttcatctttctgccctggacattggaaatcagcggtgagaacagtgctcttgctacaaaatgctcaggttctagaatgctcccatctttccttccattccacatggagtttatccaaagcacaaaggccagtcacggcactgacatccgtggtgcccgctcaccggggagtgggaagcacaagcctgtcctcagaggaccgtgactgtgagcccgcagctgcttgtgggtggggccagcccgcagctcctcctggaggcctcgggcttcttgctgctgcatttctgtgacatgtggagggaggatcgttttgacacctgcctgggaagtttcaaaggagatggcctctgggcaggggttttaaactgaagggcaccacacagatccagatgtgaactgtggctgttgtttgcaattgaagcagagatgcagaggatggaacaggagtgctggccatgctgctctatggccttggcccagccaagacctgcagtcaatggggctacgggacccccgctacacagggacctgggaaccacctttgccgcggttgaccgctgggcccgccatgcaccgcccacacctggctgtgcctggagactgagagcagggggtgacggtgggcctggaagagtctctcccttttgcaaacgccagccacagaggtttatttttctccctgagagaaggaagagtgaaggctgagactgagacagaaggacagaaggagaagacttagaagccagtgagcccggaaccacgagacgcgctctgaggacacggggcctcggggaaaccgggcacgggcaggggttggtcttggcttccccgcaacattgccgcgagctcgggtgccgtctccactcgcaggctggcctgtcctctgcagccacgagctcaggcaccgtctccgttcataggccagcctgttctctgcagcctgaggtccctgtggtgccaacatccagatgctgagataattctgccagggtgttggctgatcggtgattggtggttggctgttccgtgagttctgcattgatcttgctggctgagcgtccaatgcggaggggcaggtgctgttagggtctccactcccatccctctccccaggactcatcacccactgcaaccgtaagctgctaggggctcacagccgtgagtctttgggacgggtggtcccacctggcatgtagctcaggctcctagccccaggaccctgccgctgctcccctcccgcccacatcttggcttagccgtcttccctggctgccagccccttcccctggtcttagttggcttgagccactaaactgaaatagcacaccctgaggccttcaacagcagacctgatttctcaccatctggaggctggaggtccaggatccaggcccccaaggctgctttctcccccactcccccacccaccttccaggacacgcagactccaccctcttgctgccctgtctcagggctgtccctctgggcaagcaggcccctggcatccccgtgtgtcttctcctcctgttcttataaggacaccagtcatactggatctgggcccaccctagtgacctcatttaccttaatcacctctgaaagaccttgtctcaaaaacagccacattctggggcactgagggttagggctttaacatgggaatttgagggatgcaattcaccccataaaacccagaccattcccccagtaaatcactttcacaagagctcttctctcaggctttgcttctgggggatcccccttgagatggatccatctagcttcctgcttctcaaagaacagaggggagagctctggtgcgaagggaacgggtggcctcggggacctgcggataagctgctggcactgccaggggacaggctgagctgaaagccaggaggagggcggcgaggcccggggccggacctcattcttctgagtgttataaaatctggctttgctcagaaa

SEQ ID NO: 1528 - DNA, 492 bp, Homo sapiens
acgccacggggccaggcagttgagggcagctagggtgtcagacttgcccagagggacgtgggctgcagcaagtggaaagagaatcatagcagccactggctttgcagccacacggaccaaagttcaaatcccagtaactcacgctctggcagtgtgatcttgagtatcacgaacacctctgagcctcggtgtcctcatgaaatggggagaagagttgaggttctcgtagtgatcagcgagctgatgtctgtgcaggcctagcacagggactggcacacagggactctgatcaggggagggaaagcagtgagagagcatagcttcccagagagctctgaaggggtcgggggaccaaaggggaaagaaaatcacaagctctctttgggactacctgtagggtgagccaggtttcatgagcaaggaaaacctccacttcatttccagtctctccataaagcctgatgttcctccttttgtgttcctctgggttat

SEQ ID NO: 1529 - DNA, 476 bp, Homo sapiens
aaagaagaaggtgataaaggaaaacagacgatagtggttcctatcaagatcttagagaaagagaacattaagggagacaaattggagtgatatccaactaatcagaagctggatgtagctgaaggacttcttgttctaatttatctggctgtgtcttcactgagcggaagtatgctgactgttttacatgtggtagctacaaaaatctcataaaatgtagagcaggatgcctagaggaaactgaggctgagaaagatgcaataacttgctgaatatcacagaaacaatacgtgattcaaagactcacatacagccctcttcatgattgcagaatctcaactttcaactatactgattctccacaatgatgcatttctcgttgtaatttaatataactctacaaggagaacatggaatgggaaaaatctgaccaacattgcataatatgataaaaataactcatgattaccttaaaa

SEQ ID NO: 1530 - DNA, 278 bp, Homo sapiens
gggaaagctgtctgagacaatatgaaaatcaatgatgccactctagcattagctgaagatccccttgatttcatccagcagccaagacactaagtgacccaaaggaagaaaagggtgatcagcgtggctgtgtgcctactcagcgcgaagacaacaaggatgaaaacctttatgatgatccacttccacttaatgaatagtaaatatattttatctttctttataattttttaaataacgttttctctagcttattgtaacaatacagtgtataatgc

SEQ ID NO: 1531 - DNA, 626 bp, Homo sapiens
cagggcctacctgtgcatccacatctggccctttggaaacatgcaatcccatcaactgggtggaccaatcttatcttgccaggagtaactaattgtgggtatctgtcgccatacaagcatatcagcattgccctttcccctagttttgcagccagtatttaacatctccttccgcctccttccatgcagggggagcagaggcacaaataaacttgcccaatatagcttaaggtgctaccttactttcaaggaccagcagtatatcacatgtacagcccacacacgctgaattaaaccatccaaatctccagagacctgtttgcaaatactgcaaaaacccttcgacataaggcctctacttcaccactaatcaccaaagctgccttgctgaatacagtaagtctgcatgatgaccactgtcacagacaatggcagtccacaggaggactgcctttcagctatgctttacaacttgcaagagtggcaaatctttgcaaaagcactttcactcaacccaaatattgcttatttagaatccaacatcatgatctacccaaacaagtggcccgttctccctttcttggttaaacggatgaagaaataaaaatgccattttcatttgtaaa

SEQ ID NO: 1532 - DNA, 487 bp, Homo sapiens
ggctgaaagcaatgatgttgccattcatcctttcacgtattcattatggtctacagctgagaagggctatttggggtttgctttgcctgatggtagcagaagaaaaccaagaggcctctctacgaaagcttgcagtaaggagaaagttctggagactgggaagagcaacacaaagatattcagttgcttggtgagagctgctctctgcttccaaggcggcaccttgttgctgcattctccaatgggaaggaacgctgggtcctcacatgacagaaggtggaaagggtgggtcctaatccactgtaacagctgtccttatatgaaaaagaagaagacagatacctgtgaaaggcagatcctgagaagacacagggagaaggcagccatccacaagccaaggaaagaaggctctaaagaaattaaccctgccaacaacttagtctctgatgtttagcctccagactagtgacagaataaatttctattg

SEQ ID NO: 1533 - DNA, 682 bp, Homo sapiens
tctcgaactcctgacctcaggcgatccgcctgcctcggcttcccaaagtgctgggattacaagtgtgagccactgtgcccggtcggggtctgctttctctttattccccgtcctctcacaaactacatccaggggcggtagctgctaaaaggactcaattctgcaacctcagcttctgacaccttcaaataaattaaatgctggtcctagggctcgctccccagctcttctgatgtcactgccaggttccacagccagttgtcggacatctcctgcttcctcagccaagaacacctctcagatgagatcaaaccgcccagctttcctcttagcatcttcctttattttccacttctggctggtggaagagagatcgtagttctctattccctacattttaactccacgaatattttagattaagtgaagtcttgctgttcttcctgatggaaatggtaattataaacatacaaagatacccatacacacattctttactcagggccctcttgtgctttggcaaatgataaaaattatctctaactcacacaacgaccctggaagatctggacaatgctatcactatttcacagctgagagatcgggagcatttaaagccacagaaggaatagattggcttcgcttcatattgtttccttgtgaaataaaaccagtgaaacac

SEQ ID NO: 1534 - DNA, 3265 bp, Homo sapiens
agggaagaacctggctgagacgcacctgcaactgtttggagctggtgaccttgggcccagcacaccctcgctgctggtggacacagcccctcacaagcagctgcgaggccctcgggcagtggcatgggcgccgtcgcttcctgctaaccccacatcctcatttcccacgcttctccttccaccttccatgatcactgggacctactgcctcaggaaccgcctcagagggacagagggaagcagaccacccttttcttcagagagttcatggcccagggagggaacgctggctggggacgatcacaaagcctctctggtgcccggccagcgacagggaccctcggggctgcggggggagaggacgcccctgccctggccgcacagggttgggttagaggtgagctggggccggagaagccacgggagccatgtggcgccttctcaggaggtgctcccgcagcttcgcctcctctcgtcttccgtgcgcagggagggaccagcccagtgacagctgggagcaaaactggtcacctcccctcgggctctgggcaactgtcaacctgcagctttgagtctctccccctggaatcttctatctggggtatgataatgttattacatacgttggttatttacagcacaacatgaaaaggcaatttgtaaggactggtccgtctaatcggggcgaatcaccagtcttctgaggcatcgtattgagtttagtttccgactgattgctaaatgccttcacgctgcgtggatattgcccagctctgcctcccttgctgcaggtgccctgtggatgctgagcttccacggaggggctgctgccccctctgcccccacagctcagctcgagttcaccagtggggaaggccgagggcctgtggaacgagggctccgttcccccaccgcaaggagtgaacggcaccgaggttcccgccgccgagccgcagcgctgtgcaagcccccgatgggcgacggacaccaggccccagcccaacgcgcttcctttggctcctcctgaactggggggggggcctcgcacccgccttgccagggccctggcatctgtctcactggcctttctcacctggtattccagtgaggagggtgcttcagttttactccctttgagaggcaagatcttctcaacccacaagaagaggcgaccaggtcctgggtgactgtcgaataagcctggtccaactgggaacaagtcttctgggccctaatttcccacatggtgttcttgtctgacaaaatcacagccttccacgttcaagaatcttcattcatctctctctttcagcgaatgttccctaagctctcccatcactgagcactgctgccaacagcccagctgcatgctaccactttggtttgatggagagaagggctcagaacctcgtgcaagtgggaggcaagcacaagtacaaaggcatcttccggagccaaggtgggggcgcagagggcctgtctcagtgagatcccactgtcttccagggtttgccaccgcagcagtaagccctggagtggccccacaccctaagatccacgggggaaaaggtggatgtctcagcatgggtttgtaacattgttctcttaaataagcagaggatgcagaattaggagcaagcattccgaggggtggccagctgtggcttccgaggggcacctgacctcccatctgccttctgagcaccagctgccccaggtgaggtgtgtggagttccacagctacgatgagccgtcgccatggagaacagcagctcacgattgctttgatttaaattgaattaaggtgaaaatgaatcagggcataactctcttctttcagccagacgtctttctgaaccggtgtatatatgacttaaaaaagtcacgagggttttgggcccagggatcaggcaggaaggaaaggcagtgccgtgcaaggaggggtgggttagaaattgtatccagaaccgctgtggcttgtactgaaggaagaaacttcgtagttctgcttctatttctaccacaacaccaaggaaggtgtgtggggtggggagcaggtacacacaggtccttggtattaccagtggtccaggattgtataattccgcttattctacccatcccacagcctgaccctgactcaagtcctgcagccccttggtgccctgagccccctcccctgcctgttcctaagcaatcaatcaccctaagaccccgttctaggtttcagcagatgatgacgagttaatcagacaaataagccatggggtaggcaggggttgtgggtgctgcttcctggtccctctggcaaaccagaagggagctgcctccctgcggtccccaccctgtctccaagcttcccagcagagccccacatccagcaactgggcccagctttaaccagacggaggagcagcctgacgtcctgccagccccagagacagatgtgggcacaggaagggaaggcagggaggagaggaagccaataaaaagtgttagcatccgtcagggtgaccctttgcagaacctgcgtcagcctgaggacgcagggaaaggctgcgcgggagaagccgctgttagcatctgccagggtgaccctttacagaaactgcgtcagcctgaggacgcagggacaggctgtgcggagaagccgctgttagcatccgtcagggtgaccctttacagaaactgcgtcagcctgaggacgcagggacaggctgtgcggagaagccgctggcctttgccgcttgaaagctgggtccctgcggcctcctcaccccagggctccctcagagaaattctcatagaacccctaagcaatacgcggggaaagaacggatgccacccggaagcatgccgaggaagagtccattcatgggaacttccagagccggtcacagaggccagatccacgatcaggtgcatggcaggggcttgtccgcaggaccggaaccttgtggaagatactacattcaacacagacgtactgtgtgcctcctgcgtgtgaggcctggtgctcatggcgcgtgtccttgcatgcaaaattctactcttcatcttgacgtttctagacattcagctgttcctcaggaaacgatttaccttccctctgccttttctgtaaaatgcatggactgaggaattactaatgcataacactttgtttgctggataccaagtagacgcactcttaccatatacagggctgtatctaggcagccagttattagaataaaaacagaatactatgttcatccgctcagat

SEQ ID NO: 1535 - DNA, 1517 bp, Homo sapiens
ggaggagcagaggcggaaggtcccggcggcggcgaggatgcgccccagggcgggagcgggacgctccactttaccctggctgcccgcaacgggccaggcctgccgtctctacctctctacctgtgagttttttccctgcatttacttcagtctgccgcgtcttctccccgcccttctctgtaaggtaaatatgtggaggaaataattcctattaaaggtaaaggaaaggagagcaatttgaatgaagaaacaggtagttgctatcgtcgttttcagccaaagccctctggctgctagagagtatacatggttctctggtgtcaaggcctgttttccataagctttctggattctcagcttagttccctcaaagtgatctctgcaagtcggctcttcggtcagaagacctcctccaaaaacagaaagcccaaagattccctaactcgattgaaaagataggaagatacgaagaaaaactaacctaaagaattgtgtggtttatctgcaaagagttctagactaaaagccaacaatgcaaagatagtatgagttaatatgtttgttgtggctctcttctgccattcccgcttcctcaaggtaatgtgccccgatgcctggtagaactgttttgtagaggcagccaatagtgatccagttattgtctttactggtcagaccacctctgaagtgctgtgttcagcatttgaagactttaatcaagctggcattatatcagggaagagcaaaatgatgacgagaactcaaaaacagggcaagtgaagaaggattgattaaaccttccaggactcacctagaagagagaaaactactggactctctccaaatatgaaatgacctatcatgtgaagttgatttgtttcatgtgatgcaaacttcagggaacagatttaagatcctgaaaagaagatgcccttgtagcacgacccaaagaattgcctaccttagcatgtgtgaatacctcaaccacagaattttgcttcaaggagattctgaagctcacttaatagggacttggtacaggggagccacacatcaacagaataattagttgatggttttgttaaagatatttccagtcttgagattacatgtgtctttggtcctggacttcatagagtttacaagttagttcatgagacaagacaaatgcatcacaaaaataaataatgcaaggaggccaagtgataatgagaggtgctgataagtgctaggaattcacatgacagattattcccatcacagttccagaggcttaagggagaagagaggaactgaaaatagactacctagaactgccctatccattggggtagccaccagttaaatacgtctcttgacatttgaaatgtggcttgtccaaactgagacatgcaatgagtccaaaatgtacaccagatttcaaagacttagaaaacaaatgtaaaatattgtaattcttatgtcgattacatgttgaaataatatataatggatcaaataaaatatgttaaaattaa

SEQ ID NO: 1536 - DNA, 3088 bp, Homo sapiens
taaagctggaaagatctaaataacccaacaggaaatgcggatgaaagtgcaagagttggtttgtggtcatctggagtccatgtctccaagactgctggaccttcaaattctgcaacttgttagatcatctggatgtaaagaacttaatttcagtataaactgactctgggcagcattggtgatgctgtatcctgagttgtagcctctgtaattgtgaatattaactgagatagtgaaacatggtgtccggttttctattgcattttttcaagtggaaaagttaactaaatggttgacacacaaaaattggtggagaaattgtgcatatgccaattttttgttaaaaccttttgttttgaactatactgctttgagatctcatttcagaagaacggcatgaacagtcttcagccacagttgtgatggttgttaaatgctcacaattgtgcattcttagggtttttccatccctggggtttgcaagttgttcacttaaaacattcttaaaatggttggcttcttgtctgcaagccagctgatatggtagcaaccaaagattccagtgtttgagcatatgaaagactctgcctgcttaattgtgctagaaataacagcatctaaagtgaagacttaagaaaaacttagtgactactagattatccttaggactctgcattaactctataatgttcttggtattaaaaaaaaagcatatttgtcacagaaatttagttaacatcttacaactgaacatgtatgtatgttgcttagataaatgtaatcactgtaaacatctatatgatctgggattttgtttttattttgaaatgggagcttttttgtttacaagttcattaaaaactaaaaactgtttctgtaaggaaatgagattttttttaaacaacaaaaaatgccttgctgactcactattaaataaaaatctccccaattttttgatagactacttcaagccatttgttacatggtattcctttgcaagtcaatttaggtttcgtgttataacttttcctctttttttaagaaaaatgaaaaaagtaattcttttgtctgaaggggaaaggcattctttcatttttttctttttttttttttttttttatgacttgcaggcacaatatctagtactgcaactgccagaacttggtattgtagctgctgcccgctgactagcagctggactgattttgaataaaaatgaaagcattaaagggtttccctacaaaacatttttctttttttatttgaaaactactttagcaataattaattccatgattatcacattctgccattaagggatattagtaccgtaatactgaagaaattttattaagtctgaacttctggggtaggcagcttctttgtttcttttctatccacccttgtcggttgaggtatttgtttcttgactaataaaccctttgatacttttagccagaaatcagtctcataaagctatttttgagtatagtttgtgtaaaataaaaatgtttagctttggtaataacttccaagctgaactccctctagcaagatatttttcagtgcttttatttactatgcacttagactatgcactttttctgaaatatttttgtaacacttttttgtatttttgccatttgaaaaggttgtggtgtagttggtctgtaattaagttgcagatttaaaactgctgttagctttgtaaatcaaaatataggtgttttttgtcctggtatatcgtcattccatctgcagctggagctggaatcccattgatcttctagctaccattcattttcttcactgttcacaaaagaagagtgtgaaattcagtgaatgctgttactaatcctgttacgagatgaatctcatttcaccaaaattaaattatgtttttccgctaaaatgatgatacaagttgaagacacatcactctgaaattggaagacctcaccacttaaggctccacagtggcttactcagctgaactctaggttactactctttactttgttcacccattggggggtgcagtttttttaaaatgttgggagatggccattctaactactgttgaatgtctctgttttgggaaggtataacaagaaataaaaaagaatatatatgaagggagagactggttatctcctcccatatggttgtgcttatcctcttatggcttacaaatgaatatttggaggtttgctttcacaatgatttcccatcaacaaatatttttagtaggatttttcctgtttctgttagtccttgcagtactcataaatgttttaagctgagcatactgtaatagtcataagtttaatttcattataataaaaataatcaaacaaaaggactttagaacccaagacaatgagctagttttccctaaagtttgctgaactattaaggaatatgttcttatagcttttgactagaatgagtcatgggaattctaagaagggatggcctagacatttttagctcagttaaattcagcatttaatgcaggtgagttcctgggtcgttttccaactagtctggaacagtctggttctgactcaaactggtataaagcattattttaggttttctctttgccagtttttaagcagttataaccatgtaaatcaagatgtgaggacatctatatgaagtatagtaaagaagtggtgtcagcagatcaatatgtgtgtcctgggtgtgctgctctcttaagtgagactttgtgagactatactttaaatgcattattaccattgcttacattttgggggattttcttcctcctcaaaacttccatttctattgtaatattcttaatgacaatctttttttttttttagcagtgtatgtttgaaacagccaaagatggcgatgaaccaagtgtaaattgatctaagcagcccatgcagtttgtgttgaatcaacaaacagtgtattgttgaagtgaaattattttctgaaatgacttgttagaccagttttgaggacatactcaaaagtagagtaataatggctcctgggatggagaaatatgagatgaacctggaacattctattatggtgccacaaaggaaat

SEQ ID NO: 1537 - DNA, 867 bp, Homo sapiens
cgctgaccaagtgccaggcctcactgaagctgacctccgcgttaaccctggacacaagccgagcaggaaggataatgccggcttgacaactccactggtttctgctcccactggccctacctctgttagaggtgttcgccaggcaccccatgcggtcaccagcagacagccgctttctgcacaagttccaagatggactcacagcagtccccgccagccatgacgctgagatgggtgtacacccagctctggaggaacccaaccgcctgtggtctctccacaacggctgcaaaatactgcttcagttttgattctttcatggaggaagacgtaacttcaagttaaaagcagcaggcgcaccgctcacccctggacgctgaggctagacactgggtggaaaccggttccttccggcccccgggccctgcaccagagctcgacccccaccgcctcacctgtcctgatggcgtcctccagcctggggtttctctctccctggagaagctggtggtagtagccgggattctggtccatctgcgcctgggccccactcagcaccatccagacgcgggcacggtgctccagcgggacccctttccggacatagcgcttcactgaaggccgagaggacggacagcgtgtgagctggaccaggggcctgcggggcccacgcgttcctgccacactttccactctcaccagttctcttcttaaatcaaatattaaagagacccagaacttcgtccatctccaccaaaactggtacatatactcctttaaaaattctgctctcctctccctctcaacagagcacaaaccagactggctacagaaccgcccccacgcccacttcaccattcaatgcag

SEQ ID NO: 1538 - DNA, 526 bp, Homo sapiens
gtgcagagctgtgcgtgcctgccgaggctgggcagcagacttcagactggagcttggggactcctccagagaaacagtaagatgagttacaagccgtgaacctgtctcagtaggactgtctagttacagggagctccatattaagagaaattggaagaaacctgtaatccaatcatgaagccggggatggtggggacatcattagagatgccacggtccagaggaaggacacatcggctgatacagctgaccacaggttggagcagtgcatctctggggaacatccatgaagaccaacagagaatgagaaggacagagcagcaaagggcacctgcagggatggaacagccaccaggagccagatgctttaactgaactgacttgagttgaaccctcacaacagacccgccatgcaggtacttattagataagagagccgaggaccaggaaggccaaatagctggcccaggttcccccaggtgccagcggtaggactgcaattctgctcgtcgaagccctctctctt

SEQ ID NO: 1539 - DNA, 820 bp, Homo sapiens
ctaggaaggctgacacatgatgagaagagtcagtggtcctgaggtacagtacttaagataaccctgtgaaggctgagattgatatttgaaattcacaactgatcttggagcctggtacagcagtcatggagccatattggattgtgaaaggaactcagttgacctggcctattgcagatttattctgagaatttcaattcagtctttgctgctgtttggaaatctttcatgaatcttttaataacttccttacatacatcttgttccattaaagccccaaatttggctttgtcagctctctttcttcataatctttaggatttgttcatgtgtggatgtgatggaactgaagtcgctaggttcatgctacctggaacatgagactgacaaatagaggagcactgagtcaaatgaatctcggagaaatggagctggaagaaaactggagtaagcctgtccctgaaagggcactacatttggatatccagcagtgggactcaatattttttcttgttgtttaatctcatttctgttacttgcagccaaaggctcttaatgagaaaatggctctacctagttttctgaaattgcctcagtctctccactcttccctattacaaaggtcatctctttaattcacatccaataactgatagtctcttgactaatctacatcctctcattctctcctaattcacctttcatactgttgccaggtgacttttcctaaaagacaactttcatgatgtcactctacttcataaattcttataatggtttctttttgcttttagtccaaactcctcaggttcgttttcaa

SEQ ID NO: 1540 - DNA, 548 bp, Homo sapiens
aggacttcccaagagtgtcccatggaacctgagttctaaggacggtacatgaaaaaaatcaacatgggttccatgatcaaagaagtttgggaaatgggctaaatgaaaggacttccaaggccttttatctgctaatgagaaagaacaagccctgtgaaaaacaagctgctgtccctgctagaggcatcctgcaatccatggatgtttatcaccaagccattgttaacatgaggtggtttccaaaaggaaaagctttgggagatagaagtcctcgttttgacctctgccctccttgtacaccaggagccagaaaaacttcatctcttttacaagaaacattgagattcctgtaaaattaagaaatcacacaatttgatggtctacattatctaaagcaaatgagacttctatttggaacaaagactaccttgttgggaaatgagtctgcaagttaaagtgttttctggcacctgtgcaattgtttcctactaccctgcgtgctgcttaagtctgatgaagacattcttctttggagtctgacattaggt

SEQ ID NO: 1541 - DNA, 540 bp, Homo sapiens
aaatatgacccaaaatccactcctcacttggacactgctctggttatgatggctgacaagaagatcctggtggttgctggcttgtcttcctctaataaggagcctgaatttagaaggtgatgatatgagaaaacaccaaatattcagaagccatccaggcctgctttggatgtcttttgggacaagagagcatgtgagggtatatccaggctgcaaatagcactgaagatgtcatctctgtggctgttctacgttctacttcactcccaaagaccatgaattacttcaaaatatgcctgatctgatttttttctaaagtactgggcagctgtgcaaacaatattaaaacagaaaaaatattttgtgccatgcactgccttgattgtacacgcccttaaaataggaaacatagactctttctaaaaaatacagttatatcaagacctgctttttaaatatccgtaatgtattattaccttttgtgtttctgttcagtaagtattacattcactgagagtgatttgaccaacaataaaaaca

SEQ ID NO: 1542 - DNA, 2044 bp, Homo sapiens
agaaactaaactggagcactggccatatggttgtgatcagcttaaagtattttcagaaatctgaggggaacatcacctgtgctttattggttattttgacaagtgaaatagaggacaaactgctttgatttgagttgatgtctacacatgtgaactcatgagaaacagcaaagcccacaatccacatggacatcatcatcgttcgggaacaggcatggtctccattctttccatgcacacgccccggcttcaaaaagacatctgaaacactagtgatgaccatcattaccccatctgtgagctccaggcacggcacagccctgcaaggtaaatgttattactgaaggtcagagaagttccgtaacttgcccagtcacatacctggcacggagctaagccaagcttcgagctcaagtcctcctgatgcgaaagttatttccactgaaccagcccaggcaaaatcctggtcgggtctgtgttactctttgctttcaaaacagatagccttgaggagatgtgtgtgtgtgttcatttaaaaaaatccagaaacgaccaaactctggcaactttctagaacatattttgtacctaaatgaatgtggctcagtattgcctttgtttagactttgaataaaattgaacaaatcattagaagccctatccacccaaaacagtaatctgcctaatttaagaagagatggagattttattcatgttatcactgttagaatgctgattgtggaagaaatgcattaagaataaattttgtgtggaaaacaccatggctgatattaaaagtagaattaccatatgattcagcaattgtacttttggatatatacccaaaagaattaaaagtaaggtctcgaagatatatttgtacatccacgttcattgaagaattattcaccatagccaaaaggcgagccacctcatagaggactgctcgtttggggaaaagctgcagaatgttttccatgacccaagagtcactgtctggctgggacaagagacctgaaggagtaggcgccagggagaggggaggagatccttggcctctctctgggaagatagttgctttttacatggtggctgccctgcccagggaggaggcattacgcccagaggggtggcaagttatcagtgacaagagagggaagagaaatacaatttctagaaaatttgccttttgggactgaccttcaagaaaaactgagagagaaatctccaaggtcaacaggaaagcaaagccactagatgtcaccacagccagtgctccggtcattaagtccccagatggaggaaagagcacatcagcatgcctgcacagacatggaaaagctggctaagacatgcacatgggtccaaggcactgcagaattccatttttcctacagttaatatttatggcacaaaaatgcaatagctacagtttaagactgattcattgacacgtgacacttgaaactgtccctctaaatgtggatattatccacatgttactggactaagcatccatgcaagacttggagaccttctgcaggcgcagcctgtccccccacaccctgctctatcggatcccacctcgcaaggtgaaggccgcattctctcaggacaacctggtctgctatatcccctgggaaccatttcgccttggctcctgccagatgctgccctttcccttcaggctggtgtagagtggacacctgaaagtgctccccatcccattcgggttggggcatgcagagatccaggttttgtcctaagaaacaaaagacagagtgccttccacaaagtgcctttgcctgcccagggctgcgttatctcggcatcattccctggggccatctgcactcagctccgcaacgtttctctcagcctacctttatgactgcacacacaagcattcctgagtgaatatgcgtgcagcagttcctaattctaaaaccttctaaaggaaactcttttccctgaagataaatattaacctatgctcacgttcttaagttttgtggtgtacaataactaaaaatactctgtaaac

SEQ ID NO: 1543 - DNA, 499 bp, Homo sapiens
ctgccagtttcgctcccggttagcccaggactttttatagcatagagttttaaagcaagggcttagaatcagacctgggtcaaaatcctgccttccaccttcaccaaggcagtgtgaccttgacgttcctacataagagattaaaatacgccaaattccagcgaaacagctgatgccagccagcttgaagacccctgccacagaagaagggaatcagcatgagaatacagcttcttcatctcgctgtcccatgacttcgccctgtactcttcagccaattaatgatctccacacttgggaccactctaaaacccttaagaacctgagactcaaagtcctcctggagacgaatttgaggtttcctcctatctgtgtttggtggccctatgattaaacctctttctcttctgcaacctggtgtcccagtgtattaacttgccatgggcatcagacaacaaacctatatatagtatcccaaatatggtgctccactttgaaa

SEQ ID NO: 1544 - DNA, 436 bp, Homo sapiens
ggaaggaaggaaggaaggaaggaaggaattagacagagattcacttttccactgttcctccaatgtctctgcccaccctttcttcttatattaattcataaagtatcatctctcctcacttctgctcacttcatcaagccccattccacaaggtgaccagtgttggctttagctttggatggctccttttggctcactgcttgattcaagcatcatcccagatctctgcatagctgtatcttcctatccctcaagttgaagcattatcgaaaggtccatattgcttgatctgagcatactgcaaagtgtcctaaaagccatatgggagatagacttcttcgcagctgcaaaggaaacatttgcagaacagaaaacaccagaaatcacaatacattcttagtcatagtaaaatggaacgcacgcgaaatattgaaaa

SEQ ID NO: 1545 - DNA, 2190 bp, Homo sapiens
gtcttatttcttaatatctgcaaccagctcagagccagggataagtcaagactccaccagcccatgtatggctgcccggctgcccccagccttgccctcagttcttccccgagggcatgtcctgttgagagccggtttcacctgtgcagtgtggcctgatggcccagcacccaggagctctgcgcaccctgccgccatgggccatccgtccccagacctcttcccacagggtcactgtggtccaccgtcctgccctcggggaatctcagcctccctctcacaggtgcacacatggggagcagccaaggatttctgcagaaaaattcactccagaggtcagcagctagaagcacaaatggagagtgagtgagcacgagcgcctcgtggactcagccctcccaggcccagaaccaagcgcccatggacacccctacacgggcagcaagggctggaaccggcagcctggtggacatccgccctgcagggctctccctcgcagagactgcagaagagggtgtgcagtgctcagcgcggaaggatgttctccctgcttttaaggagccgtgactattttgctcagcgtccctggcgtgcctttctctgtacaaaaaggagacttagaggcttccccatcccattaccacagctgggcggcttcttgcatgagggcaccttgctgaactaagtcaccccaagctaccctaggctccctgtgcactgagatgctgagtcctgaggtgccttccagcaccagtgaatgggactaaagtcttctgcagtgtcgcgaccgttctgaagtgagtattctgtggtcatttgttaccctctgtgaagcccaggaagcagggattcagggctgaccagggaccactttgttctctgcccatgcatggaaggtctgcacttgggccccaaagcctgagtaaagtttcaccgtgaacttcttccagcaggataaacagtagggttcagtactgagggtctccagtttaaaccctgattccactacaaaataaatgctagactgggccacatatttaagctgtgttttccttatgcttaaaatggcagtaagattccttccagaggccatgcagggagataatgcccacagaacgctcagagtggggcttggcagagacagggctagacaggggctgttatttagtgctggcatcttttattggtggcgatgttattttattttctatgattatgtaatttcctccttataatctcacccttgttgcttatcttaagagtgatgtttcaggagcaacagcatcaatgtagtgtttgatattctggacaatctaacacaagcaatttctaattcataatccactatttgtatttgttgattatttgtttataataaagaaagcaatgctttgtcagttttccacaatctgccaccaacctcagatatgctttcatgaagctcatcttcaattaaggcccgtgtgctttatttttgtgaaaaatggagatgtgaagacattctgtgctctgctaggctgtgtcctgagaaccccccttttaaaaaggttctcagtattgtaggtgtcacttttttccattataaatcacaaaatgtagtagccagttaacaagacacaggtgttgctcccctgaaagtgcctgcagaatggtgccgaggtcctctcctcacccatagctcttggcatgatttattcctgctgcacgccttccgggaggtccaccaggctcacgtctgtgtctgtggaggtgtgtgtgaacatgtgcacgtgagggtacatccagtcttctaccagctaatacgtcagagaccacataatgttaggctggaagagaccctaaaggttatataaaccaattcccttattttagagctgagaaatttcaggtgcaaagaagggagaggctataacatggtggcactagaataagactgccgggtttgaatcctggtgcaactacttattacctgtgtgatcttgggaaagtgacttaacctttctgggtcacagtttggatacctataaacggcagatattaacagtctctatttgtgtggatattttaacaataaaattaaatcattcacgtaaagaacttaaaagactctcagataggttgtggtgagctatgattgtaccactgcaccccagcctcctgtagcctgggcaaaggagcaagattgtctct

SEQ ID NO: 1546 - DNA, 498 bp, Homo sapiens
caaaccacataaccaaatgtgccaagataatcctgagctcactcattgtcagactttcaaagtggaaaaaataaacaacatcaatgtggtaaaatacctaagaagataatggctgtaaatctttgagaactgatgagagaaagactctaaagtttcaggaaaaatatatcaggaagcctgatatatcctgcaggaacaaggaaaaataaaaagaaacctatgcttactacatcatagcagaactgcaaaatggcaaaggcaaagagaagatcttaaaagtgctcagagcaaaaaagacagatcatcagaaaggaaagaagaaaattgattgacagttgaataacagcagcagtggacaccagaagatagttcaaatactttcaaagtgcttagaaaaaacaaaagccagtccaaaattgtgtatccagcaaaagtatctttcaagaataaggatgaggaccaagatgaggttaacagggatccacctgaaaaaactaa

SEQ ID NO: 1547 - DNA, 1071 bp, Homo sapiens
aggtgatagcggagcggctgggtaggaagcaattgttctcaaacttcactagccccgtcggcgcggacgcttgtcgagaatgcagattcctgggtactgccagatacgaattgagcataccacaaaaaagttctcattttgtgtcctcccatcccattctcctcactaaccaaaggctaggaattatctgtgaatgtaggaccactggatttgcagtcttcatctgacactgtggagagtttctaggaatgaaacagatatatggccttgggtcccctttttttttcttttttttttttttaatagagacgagcatctcactatgttgcctagggtagtcttgaactcctggcctcaagcaatccccacccgactccgcctctcgaagtgatgggattacaggcataaaccaccacgcctggccagaaggtgctttaacaccaaatctgaaaattgttcagaagagaaacattgagcatgaacaccatctgtgcgagtcatttacttattgcccctcacctctaaatctaccttctgtactcttcttccctgtaatgatggggctagttgtcctcaaactgtttctcagacttctttttaagcttgcttcctgttcagttctgccaataggggtcactagagagagactgggaggcagaaggagagaatatgcttcctgttttttctgttcttgttaatgttgcttacaggaccagcaatgcttcttcacctagagacacttctcccagcagtggcagtgccacttcagcttctttcagcactactggaatcagcctcagtgattccccctgtacccgctcagagattatccacagcagccagatggttctaccttccacaaagattgtggttgcaattctgggcttctaagttctggttacttcatatttttccttttgttcctccagccctagaggtggtagctgctttctgaagttattatttctagatgacttttggtttttcagcctttgtattttgcttttcagccctctaatgcctgtataaccaatttccctgtaataaataaatttcctccattgaaatacc

SEQ ID NO: 1548 - DNA, 1553 bp, Homo sapiens
ttcaagggactctcagatcatcaaacccacccagaatctgctcaattttcaagatttgcttataaatatttataatataaacactcaattgctatctgttttttaggttctcctctctctcccagaacagtggtaacaggaactcttgggggcttctccctgttcttgcagatgtggcaggatgtgttcctggggggctcccatgccagtccacaccctctgtggtgtaagcagggattggtaattaatgagatgctaaaccctccagaagtgagcgctcatgtcccagaaacacatcttccacctcagcagccagtgggaaaactagactttgtgtctgcatatttgttcttaaacacactcttctgcagtctaactctgctgaccactttccagtttgctcatatcagaatttcttcggttctaagatgcatattttctttttgtattctgacttgttagaaattagaatatgtcttgcagtcaataaaatctatgacaacatttttttttcttaatggttcctaaaactcctgtagttgatggtgtcttgcttaggtttaatgaaagagattttaatatatggcgtggttatgtggagttgtatctctatcagtattaatgggctcgggatgatttatattcaactgaacccccaaattcaacattttgtgttgaatatttattttatcagttattctttatcctgtactcattttggatacttactaaagtattgtatgtatttgttataataaaatggcttgccgtgtttgaacacactgtgtatctgacaatgttctaagacctaatttgatcttcatgacaactgcataaaatagttactattattctcaattcacaaatgagaaagtgagacacagagatgctaaggaattgcccaaagtcacacagctactgagtggcagagccagggtctgggcccagccagtgtggctccaggtgccgcccactcttgacgtgatacttaccgtcaatgctccttaccagttagggatgagctgattctcatatttttccaagatacattttaattttagctttatttgctgtatcatcatcatcagtatcatcatcatcatcagttttcttgttttaaaatagggtttggagtctcttcaaggctttctgttttggaaaagtaaaacttaaaaatctatagccatgtgaattatacttatggagaaaaagagtcttgttttattaacatcagacatctttgttcctactaattattttggagtaatgttcagtatcgggctaatgatcgatggatatcactcatccaattatgatgcatggattagaccacggccttaaactttgtacatagtgttgaataaattcatcttatttgcagtcttattgtcatctagctttgatacacttgccctttcatatgtctcttgtcactattctgtgtaagattataatcccaaataccactatatgtatttttcttcatattctattattgaacagtattaatgcttaatgttaatatataagtaatatatacattttaaaaatta

SEQ ID NO: 1549 - DNA, 2666 bp, Homo sapiens
aacctatggcttttgggggatacagttcagtccatagcagtggggaaaggatgtgactcagtctagagagactcaaggagggaatgcttagataggagcatggagggcgtgcctggtgaagggaacagtatggcacagcttcagaggcaagggtgagccagcagcaaggggctggctatggccggtacaaaaagcatgtgctcgtgggaaataggcaccaaagaaggcccagagaggtttaacaacttcctcagaatcacacagcttccaaatggttgggttgggtttacatttaggcggtcttgctccagagccagtgctcctaacctttgcaagccacgaacctcaagaaagtggagaaggaaacgctgggaaatctggaagtcagacatgcctagtttatctcccgggagctgacttcatttctaaacgtataggggtttcttagaggagcttcagaatactaatcatcgctagtgagggcacttggacactttgcttcacctcagccagcacctcttttcccagctgtaaaatggtatgataataagcacccctaggaatctcaaggatgttacgagggaaaaatatgcaataatatacaaagcactttgagcttctctgaagacagacgcatataaatggaaggtggtattataaggtggggtaatcactggttacctcccccccttttttatttaattaggagaaaaccagtaattaggaagcatggccttgttaaagctgtggcctgggaaatagttctcttggcacctaatcagaactgtgacatggcgcaaatttttgcaaaatgtgggcagcaggggaccttccccaaggctcagactgtgagaaatttgcgtctaggggccagatcctgaggtggctgagctggctggggaggcttctaaggagatcttcactcaggtctgcaagggggctctgccctgcctcagtagccctcatctctgggggccccaaagtcattctcatctgcaggttagagcttgctgcaggcccagaaccaagcttgtccaccacgtggccttcttggacccactggggcaacttcagggttctgaaaagcacctcagatctagtctggtctctgattcagtagcagagacaaagaaatcccctgcctgttccccttaaaatgggccattgtggagtaggtgctggggccctagcttgctccccactgtgcctttgttagagcattagcctccagcggaacccactgtctctctccttgcgagtcccagtttgcccattctcccggatcctgcttaaaggccgcctctgccaggaggccttcccaggtcttcccagttaccatcactctcttcctcctctagactctgtgtttggtacagtgtggtttttgtgtttgtcctgtcttctctcacatttgactctgagccactggaagaaagggaaggaaagtaagagaaatgaagtattcccattcccaggcacctggccagttgttgcagacagaatgaccagcactgttgtattgattccccctcaatacgttgaaaaagcaaacgggaggcatctggaaaatcttgagataagcagcttcattttcaatgatgagtcttttaaaatacacagaaatggtataacaatcatgtatccaccacttagactaccaatggttacttttgtcatattcactttaaatgtctttttattatgtatttaaaagaagtgaaacttgtagatacagctagggctccccgtgtccactcactgaagtcccttcccttttgtcatattcactttaaatgtctttttattatgtatttaaaagaagtgaaacttgtagatatagctagggctccccgtgtccactcactgaagtcccttccctctcccttctagggtccaccactttccttgtcatctggtaaaggaccctgcatccatggatggacagaggggattgctaaagtgctgaatcgcgtgtgaaattctacgtgtgcctctttctcacacatgccacatccattgcagagatgctcttgactcaaccttccagcagtctccactgcaaccactctggccaaggccaccattttcttttcttttctttttctctctcgccatggttggagtgcagtggtgcgatctaggctcactgcaacctctgtctccagggttgaagcgattcttctgcctcagcctcccgagtagctgagattacaggtttttctcactgtaagaagaggacaatagcctatgatctacagtgcccattccaactcagagaatctttacatctggagatctatagcagggctatccctagtgacatgcgtgaagaagcttggaaatggtgctgggtaggagctgagtgtgcagaatgtggaaaggcattctaaaccaaaggaagaacacgagtaaagatgatgaagcagggataaggctaaaatgaaatttgtgatctgatccacatacaagcacagtgtagtacagctggaatatagagaagagcttgaagacttatgagcaactatcccggtactcttggaggctctgcaaccacagtttgagaaactccgcgttcaaagttaaaaactgtcacctgaatagttaataacatcaaagattgtgaaagcaagtataaataacacagagattaaaataatgaggcagga

SEQ ID NO: 1550 - DNA, 669 bp, Homo sapiens
cattcttcgttgtaaattgcttctaaacacttctgaattttaaattgctaccgagaaggtccagaaaccgttctcatccaatttagtcacttttattacgttccactttgcctcccccaatcactgcggcggctcccagtttcagcgtggccgcatttggaaaaggctgaaggtagaaaactctggaatggagaggctggcgactggagcaggatccaggggctttaaattttaacctgaatgcgatcgaatgcgcgactcccagaagagatagccaggcgtccgcccggccgctcaacccccgccaggactcggaatgccttgcttttggttcttttctacaaggatgtctgcgtggatatccctggacactcgataccccccggggacctgcttttcccgcagctccgcagacgcggcgggagggcgcgctggccccggcgctgctgggacagaggtgagcagcggggtggacattgaccgattcgacaacgttcgggctctaagggctcgggaagggacccggcattttaccctccagattcccaatctatttttaaaaataatgttcaaaacatatgggaaaaataagtgattgctccttttcatggtcacagattgtatttattttttcagactggttttccaacctaacgagggaatgggtag

SEQ ID NO: 1551 - DNA, 275 bp, Homo sapiens
ccgggctctgagtgctcttgcccgtccggccccagccgcggcccgggaatctacgtcacccgaaaagcgactataaacgccggcgcctccgtccccagccgcggctcgggaatccacccgaagagtggctataaacgtccgcgcctccattgcgctctcctcttcacttaggacactggtcctcccacgcctgacaccgacgtcgccaggaccgcggggttgggggaacttggctgtcccacgtctttcaaataaagctgttttgtctaactcac

SEQ ID NO: 1552 - DNA, 1760 bp, Homo sapiens
ttttttttttttttttttttttttttgagatgaagtctcgctctgttgcccaggctggagagtgcagtggtacggtctcagctcactgcaacctccacctcccaggttcaagcgattctccagcctgagcctcctgagtagctgggattacaggtgcctaccaccacgcccaggtaattttttttttttttgtatttttagtagagacggggtttcaccatgttggccaggctggtctcgaactcctgacctcatgatccgcccgtgttggcctcccaaagtgtgggattacaggcgtaagccacctcacctggcggtacaaagaatttctgcattttcttccctggcccctagtcctgcaccgatttctccttttcgaatgtattcctcctgccaccttctctgggcaacttcgtgcgactacagaaccactgtcctgaggagctagaggcctcctctctgaccatccagagcccaaatccacagcttccccaaatttcatcagctgccacttgacgacttctccccgtctctctgaggcccggaaaccacggctggaggtggggaggggatggcggctgaggtccattcctcattctcagacctcattgctcagttgcactatttggggcacagaataatcaccaaaagtgagaaaaacgagtttgggtggctggggaggactttgggactcttgatgcaaggcgcaacttgagaaaattctgggtgtgatatttgcacagacaccctcctttcaaaaacagccaccccccaagctattctcagctccacacctgcagccccagctaaggtaccaggtctcctgagcaaggcagagagaagccttgagccttctctgtgtcttctttcaagaaccccgctgtgtcttctttcaagattttttttttgagacagtttcaagatttttgttttgtttttgagatggagtctcactgtgtcacccaggctgaggtggcagtggttcaatctccgttcactgccacctccacctcccgggttcaagcgattctcctgcttcagcctctcgagtagctgggactacaggcacctgccaccatgtctggctaatttttgtatttttagtagagacagggtttcactacgttggccaggctggtctcaaactcctgacctcaagtgatccgcccgcctcggcctccccaattgctgggattacaggcgtgagccactgtgcccggccttcttctttcaagttatatagaatggagcatgggggtggcagtggctagggacatttcctggggacactctcccctaaccccccagaaggacttcacaaaaacctgtggataatggaagggatgttacggtacaaacgtatatttatgtgtgtgtgtgtgtatgtgtgtgcgcgcgcgcgtgtgcacataggcgtgatgtctgtgaccctcctctcctcgtcacatttcccccagaatgaatgctgtcctgtctgctcatgtttgtgttgaagctgccaaagtcggggagctctggtcctgcccagacccctttggaattgctggcccatcctcccactggagagctggggtgcagctcaccttggggaaggaaacctcatgcctcagagtaatttcttgtgaatgcaaagcctgggggagcgggtctttggggggcaaggagccagtcaggggcttgtttcccctcatagagctccccagacgtgcctccgcaatgcctgaaacccagacctaggctaataaacggttcaatttctg

SEQ ID NO: 1553 - DNA, 580 bp, Homo sapiens
tgtaaatggaagctcaaggaattcagtgagttgtctctggaaaagagcagagcagcagatgcatctgtgtaagaggtagtaacatccgatgttatattcctccgtgttgggagttcactggtcactcaaactgcagagaccacaattgcaggcagtgctattcagatggactaaaaatcaaatgaagacccaggagttgtgtgatgcgatggcctcatataaagggaactgatgccttgaggaatcagatgtttcatgctaatttaaatttttggcaccttcgattacatgaaatctaaaagattgctttctaaataatgacaacagatttcctgacaatgcgaacaacagatgtcaccaagtttcaggtctacagaaattgcacagagagtgcagagagtatatactataaataaggcaccagatgtgattactcaggaagagcgaagagacatgtagagcttaatttctgcccatgaggcagtattacagtgtttcctagaatcaagaaatgctgtatgtgagggaaaaccgggagggacttcccagatgaagtggctcttggactggcctttgaaaa

SEQ ID NO: 1554 - DNA, 339 bp, Homo sapiens
ccggagataagcgctagtgcggcgccgggctctgcctgggctagtggcaccgacttgggaaaaggaaacgccaagacatagaaaaccacgcttttcccgtaggaagaaccgatgatgagccctgatgaaagaaggaagaagacccgctgtctgcgaaggcctaaaggttagaaatacagcaatttttctcatgccgaaggaaaggcaaaatggtctaagaaactgcaagagtgtgatacaagttttcctcaacagcgagctgggactggcgacaatttcttaactcacagcctccgcagtcgccttagtcgacaaagagagcagcccacgcagcggccg

SEQ ID NO: 1555 - DNA, 492 bp, Homo sapiens
actcaggatggggtcatggctgagactatgagggctgctcgtgcatgaccctgcctgctggcctccatgggcccactatctgaatgtggttacccttctccccaggaccaggtgccacctcctctgggaagctttccctgcccgtccacagggtatgcctccttgttcctctcctgccatcggtttacgtgcctgtctccatcaacagaccaggagctcctgaggacagggactgagtctgcctgattcatctctgcattcctagcacttaccttggtgcttagtgaaagctcgaacctgcctgggttcccaccttgtctctgctacccccagctctgtgaactcagagccaactactaagcctgtagcagcctcccaaactgcccagtcttgttcagatgcacctccagaaacacaggggtccaaaatgccccttcccagacaccctgaggagtagaacagtgccagcaggctccagggatgagggactag

SEQ ID NO: 1556 - DNA, 627 bp, Homo sapiens
gattcatcccaggccaggcgagtggaaaagtaccagccgcgcgcgaggggcgggggcgcgccgaggggcggaaaagtacagacggcggagccgcggggagaacaaagatgatgccaccgctgtgttgcggccgtcgaggccccctactccggcagatttcaacctgctttcactcttcaaaactagccggaggtcggcgagcagctccttttcgggatgtgctttttgtacggccatggaaactggactagcggaaaggctaccttttggccagcaagccaggccccttagaaagaggccccagtggggagcccggcgctcctaaggccgtttgggagtccccagttttccactcgctgacacgttgcttctcttatcccaccaccgccgccccgggcaaaggcactgccttgtctgaatgcgggtctgaggcgctttctgcggagcctggtcctttcccttcaatggtgatgtgtgtggtcttgctgagccaggcaactagggggacccttcgctgtggaaaaattggtgctgcgggaaaggcaagactcactcccttgcaggaaacaaagaccccttaggagagagaaatgttcatggaatgaatgaataaacaagtttgaccta

SEQ ID NO: 1557 - DNA, 528 bp, Homo sapiens
tggggtctcactttgtcacccaggctgggctcaaactcttggcttcaagcgatcttctcgccttggtctcccaaagtgctgggattacaggcttgaactactgtactcgactgacttttcctatttctaatgtcagcatgaagaacacaagaagtcagcttcaaagagtctagaagagcaaacattcactttgcagcctcccttgtaccaaggagtggccatgagacaattctgcccaatgaatcagaagaggaattgtgttgaggatttctggaaagactacttcttttcccaagaaaaagtgacagacgcagtaggggctgagcaacttccgtgcctcttccagccttacggatgtgctgttggtagctgtgactgccttgctactacgaggaaaaggaaggccaagagaatagcagagacactcgctctgatgcctttgagccaatgaatcaatgccagaagcagctgacctccagagttcttgttacaggattaaaataaatctctacttatttgccattgtca

SEQ ID NO: 1558 - DNA, 509 bp, Homo sapiens
atgcagtgttggactacatagaaagtacatatccttcattagtgctggcaagacagatgaattaatgcctttcagggaacttccctatttgtttaatatctaactagccctaaggttaatattcaaaattattgataaaatgcattaggagatctgatgatagatgtcttaagaagaagatcagagtttcggaaggacattctcacacagatctcagtttacctcttattccagagggcataaatatgcaatggcactattcataaactcaaccaatggcacaatcattttaatactgacatgcttcagtacaaataaatataattcagagaaaatcttccatgaatattccttacggagctggaaaaaacgttatctgaagcaagatgttactatgggaggattatattacgtgcactgtgttttggcaatgctttgggatacagtcattaaataggttggctgaaaattcattttactggttaattaaatccaagagtttgcaagaa

SEQ ID NO: 1559 - DNA, 1364 bp, Homo sapiens
ctgagatgccgtcgaggatgtaccgaatttgtttgtcaattcgttctgaagagccccccaagcctgggattatgaagaaggtaatactaccagtcatctgagttcttctgtgttctggctctccctgtgagcggctgttgtagaactgcctggccatcctcaaatttcgtgcagttacttcaaggcgtctccaggtggagtgtgtgactcctttttgccaccgcgtggcttctgccactttcttcacctgcttcagcccacttagaggaggttggctgctgccctgccctctcccaagtgaccccttgggaatcctcccagtgaggactttgctctctgtgccagaggtttgccttgtgctgccagtgctctccccattgccactgagtctcttcaccactgtttcactggggcacctgcatgggccccaggtctcctggagccctgaaattactgaagcccacttggttcagggcagaaagggggagaatactactcacctctttgttggggatgtcaaaggaggaccttgtggcatcttgcagagtttgtgtttatcgctccctctccctgtaagtcttgatttgaaatcaaaagaagctagaaggaaactacggacgcaggcacggctctaggctctgaatctgcttccgcgtcggcacccaagaatttcttattgggtcaagctggttcagaagccctcttccctcaggatggtgtctcttgcaggaggatccttggtctcatgcaaatgggctctagactaggttgtccctccagtctccagagacccagacagctctgagatggcttcaggctgaaaccagacccttgcacaacaccaaaacacttatttaccaaacatggtgttaccttcacaatcggtttctttgctttgctaagaagagatctcttcaagatcgataaaacagtgacctctgttgggcatttactcaagttttgtttcgtgcataacatttcaggacccgcctgttggggaaagtgaggtcatccattcttcaccgattgtctaaacagagacggtggtcctctgccgcggtgggattctttggtgtgaaaatgaaaatgggggaggatggctggatggtttcatttttagtgctctcctgtcttaagcaacgtagacactcctgaaccaagttctctttcctgcatgaaacgaagccactgctcccagctccgcagccgtgcactgtgatccgtctatgtaatgtgagcttgcttttactcaactatctattttttagaaaatacaattcaataaatttcaagtacttgaactgagtgacacaatacaacacacagatttatcttttcaataaaaagtgttttttaaataggaa

SEQ ID NO: 1560 - DNA, 626 bp, Homo sapiens
gggtgaaactgcaagtcgagagcgtgggaaaccagcaagttgagagaggatccagaagtaaccccttctaaaacgggaaagatgccttccgaaagcacttggccctaaagagaaaacactaggaggatgggaaccagggacagagaagctacttgctctgcagctgtttgggccagtatgttccctaatcttgatggccatcctgggcttattttcctgagagtctctaagtgactcactgcatcacgtaaaactaagaaaaaggatgtcctgaattttcctgcttagagagcttgtttttctttcctgttgcatcaaaggggtctgttaaactttctaaaagtactaatctgacctgatatctgaagtaacagataggaatttgggctctttaaatggagcccttcccccatacctgcatctcattgaagaggctgaacttcaaaacaaaatcatgttggagaattaagtctcgttcccagatttaatttcttatttttatattgttgcataagaaatctactctataaggcatctattttcaaatttggaaaatcttattttaagttcatttatttaaagaccaacaaacaaaaacaccaaattcactagcccaggtctttatg

SEQ ID NO: 1561 - DNA, 274 bp, Homo sapiens
caagactccatctcaagaaaaaaaaaaaaattagctgggtgtggtggcacatgcctgtagtcccagctacttgggaggctgaggtgaaaggatcgcttgggcctgggaagcggtgattgcaacgctgcacatcagcctgggtgaccaagcgggactctgtctcagaacaaaacaaaacaaaaatacatattcccagatcctggaatgtcctgggaagctatatgtgtgtcatgccctcccagctgcacctgaacaatgagcatagcaaacatca

SEQ ID NO: 1562 - DNA, 736 bp, Homo sapiens
gtgcactggcgggccctcccctcgggcgttgcctcccacccacgcccggcggcaccgcaccccgaggcgcttcacgtcacggagctgctaggagacgggcggggctccggttccggacggaatctcactctgtcacccaggctggagtgcagtggcacaatctcagctcactgcaacctcgacctcccaggtacaagcaattctcctgcctcagcctcccaagtagctgggattacagatggagttttgctcttgtcgccccggctggagtgcagtggtgcgacctcagcgatctcagcgatctcagcgatctcagctcactacaacctctgcctcttggattcaagcagttctcctgcctcaaccacctgagtagctgggattacaggcgcctgccaccacgcctggctaatttttgtatttttagtagagatggggtttcaccaggttggtcagtctggtctcgaactcctgacctcaggtgatccacccacctcggcctcccaaagtgctgggattacaggcgtgagccaccatgcccagcctacacttgggcttcttaggcacaagatccagtaagccctccctcctcctccccaccccttttttctttacactagtgttttctgtaatcctgcaacagaaagagtcctaactgatatatttgtgaccatttctaaaatctccaaaatgtaaaattatacaattaagaattaaaataattttttaaaaccaa

SEQ ID NO: 1563 - DNA, 2280 bp, Homo sapiens
ttctcagaggatctctataggcagttaatagtagttgaaaaaggaactgtttttgaatttttgagttaaacagtaaaactagtttctttgtggtacttctcagagcctacaatctgctaatgtgtgtagtgaatttccatgaggatgatgtgtggactttctcacatttttaaatgtaacccctcctccttttattttttggcagagtatcttattggatttttgtttcatagaatttggtcaatgatatttacaggattagaaataagcattcttgaattttttttgaaattctatgaaatagctcttggatctgggcttctaagagtatagttaatgcttctaaaactttaatatgcctgtacatttgctgggtatcttgttaatatgcggaatttacttcagttggtctccatgggggcagtgattttgcatttctaacgtgttcccaggtgatactgatgctactggtgttttagcagtcttcgagcagtaaggctccagatgtatttaagtgctttcctaggtgaaaagtgttaaagataacctctgccacctggcctggaggtaaggtgtttagagaggcttcaccttagggcactggaagttggagctgagtaagtagttatacaagccagatgatctacttgtatattactaataatctgtttatttttcattgtatactttttcctggctatgagagatacacaaacatattttcagaataaaatagcaaatacctatatgctttgacacttgctatgtgtccaaaatatcccatggccttttgagaggtccttggtaggggagtttagatctctgttctgtaagcaataatattgaatgggaaatacacatgtggaatgcttagttagacctcatttaaccccttccctatctcaacattcatgtcctcagccgaggacaaagacttaactgactttctatgtgaaaatgtatcagtgattcagaaggggttttaattgtttaaggctgggataacaattaaggtttgccttttgtgttaactctatacatttgttcttcaatatctaaagggatgtctatagaaagattcaaggctatggtctgagcttgacgagagtgacacattagattaatgatctctctcctgggcatgggaaggaaaatatcctcacaggagctgagctgcatatttgacacccctgataaagcattaggttatgctgacaccacattgtctacagatgatctttgcaccttctgatttgcttagtatccattgtcaaacacttaaatatgggttaaggctactataaaaattatttacttaattatttacttatgccattttttttcagtactaaaactgcattttaggttgtgtgctcagagtaattgggccaagattccagtgaaatacctgaatggtgctaaaaataaattcaatgaaattcctttaagtcctttctcagtggttagattgtttactcctcaaattccttgctaacaaattcttcctaatagaggtcctgttagagtcaattagttaagatttatttataattagaaactcctatttgcacgcaattgactctttcaaagtctttcagtaggttaagtttgttttctgcagttttgattacaaatacttcatttttgttacaaagttaagctttagtttaattcttggtcatatcaaacattttaaattcattgagtctaaatcatgagttgattatattagatttgtgtaataaagcattaacaatcatgacagttaagatgattcttttatgtgttagttcattggggcagaagacagcataatacagatgcccagtgtaaagaagttagcagattcaaattatccagtggttcactcaactagaaactctaatttttaaagaatgatgtaaaatttgctgggcacttgtgtgtactcgcgtgcatatgttcttgtgttgttggtgtatattgttctgctttgttttgttgttcttcatatacattcaaataagagcttttctgacttggtagtagtaggtcaggataaagagctggggtgtgctatcccctacttgtgagttgtatataatttgttaggattcttttgtgtccacctttttttaagtttagatggctggctctgactgctataacaaggtatgtatcacagctatgtaatgtaagaatgcaaaatctactatagttgtactataaattcagcacctgttactgtataattaagatactgcatttgaagacaataaaaaagctaattcaaatacgtgt

SEQ ID NO: 1564 - DNA, 418 bp, Homo sapiens
agaatataagttagcctcgtagtgaccatgtggaagtcctgacctcgcttgcagacttgacctctggatgtgacaaggtagcttcactacagctctactatttaatcctggaaactaaaaaccaaaaaaaaaaaaaaaaaaaatctaaaagcaagaaagatgcagactatttcctaagaagtcagaagaacccaatgtattctggagggcaaagaaaaacagggtgaggttctgtgttcactgatacatccccttccttcaccgggctcatgaaaagaaatgctgaatcagcaaatagagtgaacgaacaatcaagatgagatggctgctgttgatgtgattctctaggttactacctttcttcctgctgcaaatgctgcatgacactaagcttacaggatctagaagcagactacaa

SEQ ID NO: 1565 - DNA, 698 bp, Homo sapiens
gtagaagaaagaaatgggggcttgtgctgggcttgcactcttggtcctctgcctgcaggcacttggagatcctgaagtcagaggacagcctgaaaacaggagagaagaaacaacaggggtgcagtctcagcatgggagtccctcccttctctgacccccaccttgagctgatcgccatgcaggcagccgtgttggaggggatcccacctcagccatggacggtgcctgaagcggccctccccaccccacagcagctgatgggggtccttggataccaactagatgtcttctttcttgtggcaaattctcttttgaggctgtgtgtgccaggcacacccagatcctcagagacagtccacaagtgttgagcttcagaaggtcatccctgggaatctcagttccaggttgtcttttcggctcctcaatacccaacccttttgtagagcctcctcctccagaccagtgcttttcaaactttaatgtgcggaagaaccactgaaaactgttgttagaatgcaggttctgattcagtaggtccacatgaacctgcgattctgcattttaatgaacctcaattgatgctgttgttgctgctctgaggaccatgccaacaggccccgaatgtctgccatatggaagctcagaattgtcaacactccctctgcttttcctttgtcttccctcagaacacctgctca

SEQ ID NO: 1566 - DNA, 490 bp, Homo sapiens
agagccccagaggcagagctgcccaaggctttgggagcccacctcttgcatcactgtgccctggatgtgagacgtggaatcaaggagattattttggagctttaagacgtaatggcaccctgctgggtttcagacttgagtggagcctgcagcctttctttcggccggtttctcccttttggaacgggagtatttacccaatgcctgtacccccatgacgtgcccgtgtccccttcctccaccacaagattgtaagttttctggagcctccccagaagctgagaagaagctgctatgcttcctgttcagcctgcagaaccgccacttccagcatcgatggtgtcaggtcaggtcctctgggtagaagaaatggagtcagttaggagtgctggagactgagtaagaggtggcagctgaggcttactaccccaggaaagggatgccaccagagaaggcagacaaccaagatggcgactctcaatttttgagc

SEQ ID NO: 1567 - DNA, 782 bp, Homo sapiens
tgccaccatgtaagaagtgcctttcacttcctgccatgattctgaagtccccccagccatgtggaactgataccccatggttctcctaccaccagatgctactgaggctaaactgactggactgaggaaaaatatctgtggggaaaactttctttcagaatccaactttgaaccagagaaatccattctcttgaagctgtctgctgtggagaagttggccttaccaatctgcctttgaagttcaagttatacaggatctgcgaggctacctgtgaatgaatggttggttggtcactacttgcaagtttttcaggagctcctgaaagattactgcataaataagggaagatggagaccagacctctggctactgttgctgccaccactacagataccaccttcacccttatgaaccccctatttactgaacattctctatatgccagatgcaaaattggctaccacattggaaactgatattgaatttctcaacgagtccaacagagtcagttttcctccaacactgaaacagaccttgctttcttcagttgagcaacaactaaagattatggacccagctcgtgtggaggtgccatattgcataaacagtgcatacagtgagccctcgcattcacactcagcatgatgtgattacgacagtatgtatttccatagggactaaatcatgcttaggcagagcagttttacatctttctcatgcccattcactttagggcatgtgtttgttgggtggcattgtcagcattgtttaattatttacc

SEQ ID NO: 1568 - DNA, 591 bp, Homo sapiens
gggtcttgctctgtcatccaggctggcgcgatctcggctcactttgacctctgcctcctgggttcaagcgattctcctgtcacagcctcctgagcagctgggattacaggcaggcaccaccatgctgagctaatttttgtatttttagtagagaccaggtttcgccatgttgcccaggctactctcgaactcctggcctcatgtgatccgcccacctcagcctcccaaagtgctgggattacaggcgtgagccactgcaaccagctggaacaatcttgatattagggtgaacaagtgatttcatagctttctctgaaggaggaaacactgggagcatccacccgagaatcaacactgtggatcattctggggagttaatagttttgagatgtgtcccaagataattgttagcttgaattaccacgtggatggaaccatgctgatcctaagagccaggccaagcctactgctgttagaaaacatatttagaaatcacttggttcttccttgcctgaacatcatctatttagttagcttgtgttgtttagatgtgcttcagatctcaaaaaaataaattatgttatttgaaag

SEQ ID NO: 1569 - DNA, 235 bp, Homo sapiens
ccaggactcacacgtaaaaggagctcattcggaggcaggggcacgcgcttgtccccagaactcaaaccccagagtccctccggcagatgagagtggaggttgtaaatcaccctccatgcaatggttcatcataaaggatatggagcaaaattagaggaggcacgagaaggaaagccggtgatgaacaaggctattgcttaaagactgaatgacatggaccccagagtttatgtga

SEQ ID NO: 1570 - DNA, 591 bp, Homo sapiens
tttctctatgcattcattcattatttcaacaaatatttatcgggtgtttaatatgtttatagccatgtgctaagcactgaggttatactttgtcgtgactccatggttaaactccacagggacaagatccacacaaatattctgtgtgaaggacacataaatagtttgggggtacatcatgcctatgactgatatgaagaaggtgtaaacaaatgtatattgaattaaagaataccttaaatatttgtttgtaagagatatagttttaggatttgttacaatagttagaaaagggtttcatgaatatggaatgaaagcttagactgcaactgttttacaaagcgcttttaaaagtaactactaaaataatctagtaacacttttagagtcatttagaaaagaataaaataatcttagcctagctaacaggatgttccaataaaactattgtgaagtggtaggactcttgattatggtgagaatgggtcagaatggatgaatcaacacatttgtgtaaagaataatatctagaaatgatgacaatgtatatttgaaagaaaagagtattaaaaatgtctttaaattttccaa

SEQ ID NO: 1571 - DNA, 5456 bp, Homo sapiens
tttattttttatggagaaggggtctcactatgttcccccaagctggtcttgaactcctggacttaagcaatcctcccacctcagcttcccaaagagttgggattaaaggcgtgagcccccatgtccggccaacaagacttcctcgtgactataatgtgagcataatattaatagctctgagagagagaagtgaaccagaagaccaacctcagtgtcaggaagtctgggcgtctgtcttctgcatggctgaagacatggggctttgggcaagtcatctgttctctttgaactttggcttcctcacttctgaaataggagggtcagagaagatgtttctttttgctgaaaagttttacagttctctgatctataccccttggtcacacacaaccaaaaagtagaaaacatgagtgcaatacttttccaccagtactcccagtttatacattatcttctcaaaccaataaggaacttctacaaggccctgttagtgatgtgttacaggtgccagcattagggaaactttcagactgttatatctattcgttccttcatccatgtatactattcattctgtatgcagagtaatttatatatgtacaattacatggcagtgaaagataatcagaaaaatgaagttttttttttttttttgagatagttttgagacagagtcttgctctgtttcccaggctggagtgcagtggtgtgatcttggctcactgcaacctccgcctcccgggttcaagggattctcgtgcctcatcctcccgagtagctgggactacagacatgcgccaccatacccagctaatttttgtatttttagtagagatggggttttgccatgttggccaggccattctcgaactcctggcctcaagcgatcctcctgccggcttcccaaagtaccgggattccaggcatgagccaccatgcccagtcagaaggtttttttttaaaaaacacactcctgaactaacaattacaaagagctagtgacaatttcccaaataattatgcataacaggagcccatatattgttctcaaatcataaaccataactgattttgaggaaaagacattctgtcccactgatattcttttcatgagtaagatctggatctgtctggaggcacagaattaatttttgcatgaggaatcccaaccctaccatcattccatggctgaggaattggttattactcctatgggaaattgggaatgttgttggtaccccagccttctcttaagacaaaatttaacaaatgcatacatgctaagatgcttatactcataaggctttgtgggtctcctttctaaggggaatttgaatactaacaagaacaaaggctaaataccaaaagggggctttctaatggtagaatttgggatatcaggtagccacatagagcagggctactttgggggctggagactgcagaaacccttcagtttatacgtgtgagtaaacctaatcacacttgatgtattgctagtgaagtcccagccccctgagcctttgcagaaacccaaagaatgctaaaaagggcaggttttagttcctgccaattatttcatttactacaaatgccccgagttccgaatttacttccctccccaccagaaatatgtcattttggaggcttgtgaaaattaagcattaagaaaatcccgcctccatcctaatacactgcatccacaagtcccaaacaaaatcacttccttggcctacacacataactacctgtttctgtttaggtctgtgactcagaaagtgcctggaagaagtcatgagagggagtcgatcccatcttacctgccataggaagaatagggcctgctcagtagagttcagtgtgtgtgttgaaggtggtggttcttagtccttccctgaattcactaattcgcattgcactcactcttcctgatcaatgagttattgctgagaaatcattgtagtaagtaatacaggtatccccagtaaagccatccctctcctccatacctccgctgtcccttgggttttggctccaggatccttgccccatgtcccaaagaatccctaccttgggcctccctcctcctcttttgtcaattgcacttgaccttttcaggaaaaagaaatcaattgataccttagtcctaatgtttgacccttttctatctcagaatagagaagtccctgtatttgttctttttttactcaagtttaatatagaccacctaggcacagaagctccgtgctatattctgttgcctgtaattgtccttccatctaattgggaaaaggttactctattgaaccatctgctgattcccttaccttttcactcttttgtcagtattcctttaccagtaaattcttggttatctaggtcctgaagtttcattcatgttttttttaaaagctttaatttttcttaggaaaactgtttctctcatcttaaagcagactatgatcttttctactttgttatacaatctgaacataatgaacactctaaagtcaggcatggattttatcataaaagcagatcgtattaagatttttttaaaaaagaaccaggattgaggaatctgtagctaataatttaataattcaccagcatgttttgggctcccacttcatgctggccactgggctaggcactgagggtgcagaagcaaacaaatcagcctcctggccctcagatttgcattccagtgagtccattcataaaacctaactcaaagccagcaacacccccaaaagggctgttggaagctttgtagctcatctgtacagctgtcttgattcctgtacgggatcttactttcttgggaaaatatgttctaaatcctgtttccttgggccattaaaaatccatgctgtccctaatcaatatatagttatgtgtgaccttcttagaattaaaaaaatgccgctggacagcctttgaagggaaaggcagagaaatctgttttgatggcttgaaaataagtgaaaaggtttttagggaaagctaacaagctttcaaagatttcagatctgccagcattcattcattaaggcatgggattaggccaaaagagcctcctaccaagggagagacaggaaccatgtaaggagatctgtgagaccgcagtggaagagtattgaaatagaagccagacctgtagacgtatttgttaatatgtgtgccaagccaaagtacaggaggaggcttggaggcatggagttgtggtggaagcaggttctgaaaagcagaactctgaagctggctcattctcacgaagtcatctggcccagcctcccgcctccaagcacatcctgcctgcagagggtctggctagctgccttttcagctctcgagggatagagattctacaacctccctctgtcatcagttccagagccactcccctttgcactagaagttcttgctttcaaagaatgagggtgtgagggagggaggggtcaagaaacagagtgacaggggaaacaggcagaacaagtcagggcaaaggaccccagcatgaagagttgtggaggtggaggtggggaagcagcctcacatctcacacttccttccttctcttaaatgtgagcagctgactccaagccttgtggaaactctagaaggtagaaccagccatctggggaagctggccttacagatgccccgtctggcatagtggaggttcctgtgctctgagaacgcagtgtgaatctagacatccactgcagcctgggaagagctgtgttttcttcaaaagtctttaactttcacagtcacccctctaaagaaatgttctctgattgaaggcatgcttctattcctactttattgtgtttcatgcattctgccagagtaattacttttcataccaattcttggatgcagagaaatctctggtagtctaaggggatttcgatccaagtaaagctactatctcctattccatccagacttttccgtctgcctccattctctcagtcacatacctagaagcaagccagaaagcctgtccaaccaaaatcactctccaaagcccaagcactttattgttctccctgtctgttatcgagccaaggtgtatttggcctcattttatgccattagttgtctggctttcatggctctgcaccacattacagtcagagcaggaaggccagcagtggagatagaattatggcagaaacccagagtagaggcctctgctggtgagggagcctgcagcactctccacgctggtgggtcctagcatgcccaacagacccccatcccttcccatcagccttgggccttgagtctcattccaactcatcccctcccctttcccttctttccagtcccaggtgacacttgatgcctctgactcctttgaagagggcatcaagaagtgaaagaacaaagtccttttctgttcgggatctgggcccatcctgggagaggtttttggcagaaatggctgcagtggaaccctctgactgccagggtgaaatagtgctccagcaggctgcggtagactcactgccagagtgggtcaggactggcccagaggacagggtcgtctcttgagagtcctcccagctccagggcctgattttaaagcagtaacacgaggatataggttatatacaggctcctggaaggcaggtgccgcagctcctgtgacaccccatatgcctgagcaagcttctccagcacaagagatgatgcaagtatgaatgggtacggggggagcttaaaacctgccaacactgagacttgatgccaggggccgtgcacccgctctgccacctgctaggtctgtgcaatggtcagagcagaggtgtgtgatgagttcagctcccaagcacatccacacttaggaagtgttctgtgtgtttttaaataatccttaccatgtaaagattgtattacatttgtatacaaaatttttttgcattttacttttgtaatatttggggttttatagatttttattttatggccaagtatacttttgtaaggaaatgttgaagtcttgagtatttttattcttttaaaaaactatagttagtgtcaactgtgagcactgataaatattattcatgtgtggttttccttctttttaatccagactttttaagaaactgttttggcatagagctttacttaaaatgctgcttcattttacacattgtgaatactgaagattctaaaaaataaagatgcatttaaaatctctgtgctgttccattgtagaaatggtaatgtgcattgctttgccaaagtggtaattaaatgtttaatggtttagaactcctagttcacaacagggcttctcgtcatcacttgcagcgtgtgagcttccaaataagccgccatttctttggaaaacgcacgcacttaggcatggcgatctcctgttccgttaggaaatacggttatgttgacattatggttactgtgcttgtggttttgca

SEQ ID NO: 1572 - DNA, 566 bp, Homo sapiens
aaaaccaaactcaaagaccatgaccacactaatatccgctggtgtggttattatgcaatgaaaactacaaatacatatggaccaaaagcctactaaaacttgaagaaaataataaattaaagaaattccaagctttaccataaacagctgtaacttaaatcttaaatcccttggacacactttacaggaggcccacatgtgatgaagacaggattctaaggtttggcacttcttcaaattggattagttggaggatgtttcaaagttggaaagttatgtgtgttacccttggcactggatgattgcaacagtaagtggcaactgggatatttctccagagcttctacaacaacaaattgagagtttcacaagcacctggggcccagcagacgttgggaagcctattctgggactcgcctccatctaaatgatttgaaaattcagctcctgaacacagccagattgctgtcagcaattcgaataagttttaacaacactggatccacctcaaggttatttcttcaatatcatacagaaaatattgtaaatgaaggaaatatgatgca

SEQ ID NO: 1573 - DNA, 586 bp, Homo sapiens
cacgctcctccagggcgcagagagcatcaaagcattatcaccgacccaacacacaccggcgctgcgtagtttctgcagcaggtgtggggtgaagagttgccacacagctgtctgacaccgggtgtacggcgtcacccctcacttcctggacaaggcaacattttcctaaaggtcaaaggagaaaaatcctatcatctgaggtgctgaacaaagaattcaataaattcaatcaatctgatgcactctgcagtcgttctaagttcttgtctactaaaatcctcgactactacacatccacaatcgcttctgtgaaactcttgggaccaaatggttcagaatttgtctcccatacatacataatatctatgtcaaggcctgtagtaatactgtggaatctaatacaatgatatttctgtagtgaaacatacaaatgttcactccaagatctaaagattacaaatagcatcatgtcagttcaaatcaggttttatggataaatgagtcaggaaaagtatgtttttcaaagcattttgaatgttagacttgtgcacaagggattgtgagtctgaatcatatttccgtcaac

SEQ ID NO: 1574 - DNA, 285 bp, Homo sapiens
ttacagaacagtttcccaagcagcagcctgcctgatccacccttaattcagctgtgcgtctgacaacatgttctacaggaaagataaccttgtacatcaggtgtttcctgtttccagtaccaaaagtgtcttcctttggctttggtatcaaggtaatgctggcctcataagttgtctccctttatccatgagggacatcttccaaggcccccagtggatgtctgaaaccgcagcatacttttgtccataaagcaaaatccgaagattagtgttaagaaacaggat

SEQ ID NO: 1575 - DNA, 423 bp, Homo sapiens
cgtggccctatgaagaggaagactgaaatttagacagtaatacctttactaggattggaaaagatttggttaatgacagccctgtcatttctaaaacccattatcactgtatgagagattcctttgcgctgcatcctcgacagtgcttcctaaggctctgccgacttccagttctggaacaagatggttaaactcatttttccctgctctgctcctctaaatacaactaagtaccttggaaactattcagcagacaatgataaagggctctgaaagctagaagaaaaggtgtacttgcaagaaacctcaggacttgagtaacagcaacatggcaggccagaaagcagacccagggaggatagcacatgtcttcggctacactggtgaaggcatcgtgcctgctccacagcacatttttattca

SEQ ID NO: 1576 - DNA, 1604 bp, Homo sapiens
gccgtgcctgcaggacttcccttcgcttgggcgcaagccggcgattagcctggtcccctaggacatctccagggctccggggaacctctcctgcgcaggcttggccctgcctcctccaagcgtccgagtctttttcggcttttcgtgagcctcagagagggacgtttcctgccaacgctgctgcgaaggaaagtttgggcggcgttatcccgactgccttcctcgccagcgccggcgagcagcttggggacacagccgacgcccgggcatcctccccgacgaccccccggagcgctcccagttcagactcctttccgagaagcgcgcagaagtgacagccccggagcttcgttccggtgtaggtgtggggatgcgccgcaaggcaggaggggaaggcgctccagttgaagggggcaccccggggcccgcgccgactcctcccggcgcagccttggctcgccggagtcgcgggtcggaggctggcgccgctgcccgccgaccagcaccctggcgccaggcgcccggctccacgccgcacccttggcgacgctgtgcgaggggctctagcgcccgccgcggcgcagtctcgtgaacccccgctccaattttttcctacggaggcgcagaggagggtgaattcgcgctctccttcccgacgccccggcttctgggagcgtcagagcaacggaagtacgtacaggaggaccgagagcagcagggaagtttggcggtgggctggggtcggcggcgaagattccctgccgtgcgctgccccctcgtggccgctttgcgttcccgtcgggaagggctgggttccagtccagggcccagcacaaaccaggattggttggacgctgcacagcgagttcagtcagggctaacatcagaagagtcgtggggggcctgcctatcggccagcctgtccttgtggtttgtgaagttgtatgatctttctgttattattaaggaaaaaagtagtatttgttgaggctaaaaggccaagagcgtgctatatattatttaatcctctaaacagctctgccagataattattttatttatttatatttacttccatagctttagacaggatctcgttctgtcaggcaggctagagcgcggggtgctatcacggctcactgcagcctcaaactcttgggctcaagccatcctttcacctcagcctcctgaatagttgaaactacaggtgcgccaccacgcctggctaaatttttaatttaaattttttgtagcgacagggtctccttatgttgcccaggctagtctcaaactcctgggctcaagagatcctccaacctcatcttcacaaagtgctgggagtacaggcgccagccacggtgcccaacctgtgataattattttaaactcattttacaaatgaggaaagtgatattcatacttgtaaagccattggggctgaattttcatttttgtatccacagaactaacacataaagtttacatgccattagaatgtaagctctctgtaagctacagatcttttctactgtaatatccttagtgcctagggcagtgactagcatatagtaggtgttcaataaatatttgtagaattaatgaaa

SEQ ID NO: 1577 - DNA, 692 bp, Homo sapiens
gatgctgccacctaggttacttgtaggaccctatacggcaacctcctttgccaggaactatttataaacatcctgcaggaaaatgagtcaaggaagcttttcttttgagctatttacagcttttagcaattgagtaaagtatactcctgtgaacaaaatttggaacatatttgtttctctctaactgatttctccagaatttggaactagttaaccaggaaccctctcttggggtgtggatcgagacccctttctggtaacgagagcacagcttggttttatacattttaaggagacatgagacatcaatcaacgtatataagatgaacattttgatctgaaaaggcctctttaaatatacacttctctgtagtgtatgctagaaatggagtggctggaataaaagtggctgaatcatcttcaactctagtagctgagaccaatgatgctgacctccctcaaaagctgcatttctgaatttctgaaggcaaactgtctgcctatattgtacagcaaaataatttcctgtattaaaacgtttttattgctctaaatttctagattaaactctgcttaggtattgctaagagggtagccaagtatagaaacttaaatttactgacagaaatctagagaatgcttaattttttttccagcagtgaagtagaagagacagggatatcccagaaggt

SEQ ID NO: 1578 - DNA, 446 bp, Homo sapiens
gctttgatttatacagacttgtaggtttccctgtgaatctgggagcaggatgaagtgatgctcaaaggatcaagatcaaaaggcagtggaaagaaatgaaggatgcaggagaaagatggacattgtgaataaagggaagagagagaggggtgatggggaaggtaggaagatcaggacagagcaaggaacaacaggatgagattcaaaagaaagcaacatggggaacatgcaagtggtgagggctaagaaatcttaataatgaagaaaccatggggactaagaggaagttgaagaaagctgctggagcaacctagagagacagaagagagcagagaagtgagtgaaaggaataaacctgggatgagagagaggatctgcactgtaactctgatattgaccaagaggattgataacctcccttttattaaatgccacatacatgccaa

SEQ ID NO: 1579 - DNA, 2140 bp, Homo sapiens
gtgttggagatggggcctggtgggaggtgatcggatcaggggggtggatttctcacagatgctttaggaccatcctcttggtgctgttctcatgatagttcagtgaattctcactcgatctggtcgtttgaaagtgtgtggcatctcccccctcgctctctctcttgctcctgctccagccatgtgacctgcgtgctccctgccttcacctgccgccatgattggaagctttctgaggccgccttagaagccaagtagatgccaacatcaagcctctaatacagcctgcagaaccgcttgccctctctcacctgctgccatgtaagatgtgcctgcttcaccttccgccatgattgtcagtttcctgaggcctccccagccatgtggaactctctgtcttttccagaatatcatataaatggaatcacacgataggcagccttttgagtctggcttctttgactgaacagaatgcattcaaggatgtgagaagaagaaaggaggggggagaggaggagaaaaggacgtgcatcatctgaaaatgaagggtgttctttaaagcagcaaagttagctcaacaaaacttattgtgctttatcatggggaactgacatagcagaaagtggaaccaacggtaaggggggactactgtaactatggaggaataaggacaagaattacagcagacgtctcaacagaaaccatgcaagccagagacaacggagtgagatttttaaagtgttgaaagaaaaaaactgtcaaaacagatttctacatccaggagaaatatctttcaaatgtgaaaaacaaataaatacttttgtgtaccaacataaactgaggaagttcagtaatatttcctactttactggaaatattaaaggtagttcttcaaacaaagaatttgtttggaacttagatctgcatacaggacataaatgaagggaaatatgctttatcatatttctcgctgtaaaatatactttatcatattttcttgctataacaagtaacttgactgtttaaagtaataataaccatatattatatggttatggtgtatgtaagagtaagatgagttacaatgatagtgcaaaagatgagaagaaagaattgggaaacactgttgtaagatcttacattacatgtgtggcaacactgttatttgaaggtggacttagattatttaaaattgtatattataaaacctagggcaatcactacaagtgttaacaacacaaaatgtgtaaaaatcaattgactatatttatgtaggtctagttcggggctttctcttctatttcattgatctatgtgtctatccttttgctactgtctttattactatatctttataataatcccagcactttgggagaccaaggtgggcagatcatgaggtcaagagatcgagaccatcctggccaacatggtgaaaccccatccctactaaaaatacaaaaattagctgggcatggtggcacatgcctgtagtcccagctattcaggaggctgaggcaggagaattgcttgaacccaggaggtggaggttgcagtgagccaagatcacaccactgctctccagcctggcaatagagtgagactttgtctcaaaaaaataaaaataaaaataaaaaataaaaaataaaaaaattttaaataaaaggcttgaaattgggtagtgtaaatccttccattttttaaatctctttcagaatcattttgctattctagcatgttttgctttttagaatcagtttgttgatatctacccaatgcttgctggaattttggttaggattgtactggggagaattggtaaatttgccacattgaacctttcaatccgagaatatgttatatctctatacttaattagatcttccatgatttatttgagcagtgttttgcagtttatagtatataattcctgagcacgttttgttagaatttaagtatttcaatggggcaggagatgctattataaatgatactgtctttaaattttgaaatccaattgttgattgccactatctagaaaaatggttgacttttgtaattctgcaacctcagtaatttattaattctaggagcattttggtgggtttctttgggaagataaatatgtctttttggataa

SEQ ID NO: 1580 - DNA, 669 bp, Homo sapiens
gatgtctgaggaatagtcttagtggattatcccaaacttgacacattttttgcaaaatgctatacaaaaagaagatacatgcgattatgacaagattctccacttggtgtgaccagtctcatacaacccaaggctgtgtgtccaaaggcaactgtacttctgggactggaaacaaattgggaacatttttcattgcatatttggctcagatctgccacttagttgaagtataatcttcagcaagtgactcaaaatttctgaatctcgttttcaccatcaatacatgacaatagtaatattttctcctttaagtatttgaaagtgttgagaaagccacaatagcaacacttgcaaaagtgctccattgtaaaatgcaaaggagaggtagttgtgaccctttggggaaaactatagttgccacaattgtctctgaaatgaagcatgtttcttagactgaaggaaagccctgggagagattggtctagctttaggatgactgtgggtagagcttctagggagaagaatgaaacgtattcctcttttccttttctctaggaataccggaaagcatgtatttgtttgctaaattgctctctttccaccagtgatatcaattctgaaatacttttgagatcttgacaataatcaaaaggtagccaggtgcatcgg

SEQ ID NO: 1581 - DNA, 3688 bp, Homo sapiens
gcgggggggcgcgccggccgccttcggagccccccaactcgcgtcctgcaaaggccgccgggccctgtcgagaagacccgaccgcagatggcggggaggatgctcccggcggcgtgggaaccgggtctgactcccgagccaccgccgcttccgcaggggcgccggccccgggaaagtcaagtcataaatccctgaatctaaaactccattctcagagaaaaggcctccaaggacgggcgccgtgcgcggcaactgcctgcagttttgaagccctttgactatttcataacaaagacaaggccgggcggcttggacgcttaggaaaatcctggggctttgcaaaaacaacaggttaatctagtcgtgtgggatgatcaccaaaacaagacaggaaagaagaacaccgtgtcaatgctgaaaagccagcccctgtgagccccaaagtgcacgttttccacagtcccaaggaacacgtgactgtgtgtttccacacttgagaagtcaggataagaccccttggataatggaacaggggatgggggtgggagcaagcaccctacctggtcacctgcttaacttagaaaccagcttttaaaacctgtaactgcagtatgagctacgatcaaatttgtcttaacgtattttttttaatgtttttaatacccagaacacagggcttctactccagggtttcctcgccagggaaccccaaacacacaggacctggagaagccgggtagagctggctcctggccctgcgcttgggtggtcggctgccttaagaagaactgcaccccagagacaggctcgcagctgccgaccttatccactcgccctttctgctggagcccaggcccagtgctccagcaaggaggctgagaaaatgctgaagactgatgcccacgggggacagcttgggctaaggataacgtttgcaaaacaaacctttaaaaacccatagcaacctgtttcctagagcacactcttcatctctccacccccaaactagtcccgactcggatcctccttttcctatcctctttctcttgctctcccgtctcctattcacttttcttctcctttcctcttgattattataaacaaatgctttccaagtcttaccgccatcatatgtgtacatatgcaacccttactgttaccaatttgttgaagtcaagacaggaggaggcaaagtttaaaaatcagaagtattgcaggaaatgaaaatggagtgagtgttgcctgggtatcataattttttttttttttttaacagttcctctacttggctctcctccaaaggtacgcggccacagcaggcaggggcttggcagtgtgggaggagacaccacagaagacagggaagaactaccaggccttggttcatctccacactggcgagagaggacgtgcaggaagtatcggctgccagatagggagctgagacttcaagaagctaaataaggtgtccaacaccacagagcatggagcaaaggacacgggactgcaaatcttcctaactcgtgtgctcatctggctatctcaccagggccttaaatttaatatatcccaaactgaactcatctttaccccttcccactttgcactcctcaaatgtccttgtttaaaatagttacctttatctttcctaacccagaaactcaaaacctggcatcatctttgacttctctctttaccttcacattcaacagtttccaagacttaaaggctttatttgtaggatctctaccactgatcctctacagtttcacacctacatcccattctcgttcccaaatccccataactcctctcctggcccatcccttaacactgaaatcctggcttggaaaatatggtcacattcacagcagctgtccccaagaaggaagccaaggcaacagtatgcacaatgaagtgagtcttcactgatctctccatattttgacattttacagcacttattatctctactttgtattttgaaactgaatccaaaatagttttgcatttgttgtttaacagtcatgtatgtagtttttttttttttttctttttttttggagacagagtctggctctgtcacccaggctggagtgcagtggcgtgattttggctcactgcaacctccgccttctgggttcaagcagttctcgtgcctccctgagcagctgggaatacaagcatacaccaccatgcccagctaatttatttttagtagagatgggatttcaccatgttgcccaggctgatcttgaactcctgaggtcaggcaatctgcccacctcagcctcccaaagtgctgggattacaggcatcagccaccacacccagcccctccatgtgtgtagatatttatccacatccaaaaattaggaaaagcaggacgcattgaacctttggtacccagcagcaggagcctgtgggtcttctgtctggagcacaatcacaaggaccgagcatcagcagcatccactgtcctttcagctccaaattttaaactcccgtaagagagacattattggcccagcttgggtcgtgtgtccacccctttaatcaatcagctttggccaagcagcaggtcatcctggtccaaacatcacagttgggggcctcacttgtaaatagagcttgttcccaaaaaagagggaggcacacaccattcatttgtttattcattcattcaatcagcaaatagttgagcatctatagaaatatatttaaggttctattatgtacacaaaatgtataaaacatggccctgccctcacaccatgaaagttaccacataaaaagaagtcaccagataaaaaaagcataacagtattcataagtactcatgagtgaccatcaattcagttacacatgatggaagataattcattatacctagtataagccagtgacggtaaaaatagttagcagcaatgtgtacatgatcaacaaaagctcacagcagcaccatttacacaaaaacagaaaagtacccagatgtccatcagaggtagaccagataaaatataaaatataccaccacacaatggctaacacctgtaatcccagcactttgggaggctgaggccggcagatcacttgaggtcaggagtttgagaccagcctgatcaacatggtgaaaccccgtctctactaaaaatacaaaaattaaccagttgtcatggcatgtgcctgtaatcccagctactcaggaggccgaggcaagagaatcgcttgaacctgggaggccaaggttgcagtgagccgagatcacaccactgcactccagcctgggtaaaaaagcgagattccatctcgaaaaaaaaaaagtgtatatgtatagtgtatgcatgcacagaatactttacagcaataagaatgagtgttctgcaaatatacacaatattgctgactctcccaatgttaaacaaaagcatccagacacacaacaatgtgtacagtatatgattccattgatagaaagcttaaaaacaggcaaaattaattcacccttatggagtcttaagtaaggggaacaaaaggggccatctgggcagtgataatgctgtttcttgagctgggtgctgggttcacaggtgtgttcagtttgtcacattcatcaagcttacacttctcatacatcttcttttctatatgtatgtcatccttcaataaaaagtttttaaaaaataaa

SEQ ID NO: 1582 - DNA, 423 bp, Homo sapiens
ggatctgaagaaatcttgcaagctgaagcctgacagtttggtgcaaacctccgagggctcaccacttcagtagaacatgcatggttcaggtggttttacaggaacaacactaacaaagtcctctggagaccctttcttggatcccgctccaccttctcaggaggtttatgatcacctcggagttgttcagcaatgagacacttgccttgaacaaaaaggaggctaactacagaggaccaccctgcccttgcatattccaagacagactcatctccatccttgcgcgtgactcccgtaggactcgcagatggctccgttagtgacctgcttgcataaaaccctcggtccccttccttttctttgaggaagttctcattaacgatcattctccttataatagcctgaataaaatcatatatttaa

SEQ ID NO: 1583 - DNA, 1563 bp, Homo sapiens
gttattcttcggtttgcctcctcccagtggcgtggatttgctcccgacccgcttttggggcgtgcctgcttcctcctctctgttagatctcgctctgtcacccaggctggagtgaaatggcacaatcttggctcactgtaacctccgcccccaggttcgactgattctcgtgcctcagcctcctcagtagctgggattacagaattttacacctggaactcctgggtgggaaggtataaaccgtttaaagtctccggcaacacactaataaattgcttcaaaggaaagttctcaaccgttactctcagcagtgtgtgtattagggccatcctcaccacaccctttcaggtagcgagatgagccccagagaggcgaagccacttgagctcgtgagtgacagtcagatgtcaagccctgctctttctaaagcgtgctgccttcagaaaagaagagccagaaggatggaaattacttcagaaagatgaataccagctttgaaggaataaaagctgacgaggaattgaaggagttgaggcacgagcttgaacagggttgcatgtttggcccttgattgtaaatgcccattgctgcacctgttcctgttacttggggagttgcagcagaaggaacagcggcctgggactccagagaactgggttccctctcatccctccagggccaccacttcttgtgggcccttgggcaagtcactgtactttctgagtctcagtttccccatttgcagaatggaaataactaccccggtctaccaacttagaagaattgctttgaggatctgataaggtggtgtggatgatgctgccttgggggctttacagtatggagctcaagggaccccttaagttgggcttacttagtaactccaggggtgggcagaacaggactccaatgagggtttttttctttttcccttttttttcttttcctatctcttaacttttatctttattattttacaatgcccttgtaagatgaaacaagtgatgctgaaatatctttttcttttttaacctttattttagaattggggtacatgtgcaggtttgttacataggtacagtgtgggctgctgaggtttgggagtacgaatgaattagtcaccccagtggtgagcatagtgcccgataagtggttttttcaacccttactcccatccctctccattcttgtgttccccagtgtctgctgttcccatttttatgaccatgtgtactcaatgtttagctcccacttagaagtaagaacatgcccagcactttgggaggccgaggtgggtggatcatgaggtcaagagatcgagaccatcttggctaacaaagtgaaaccctgtctctactaaaaacataaaaaattggccgggtgtggtggtgggcacctgtagtcctagctactcgggaggctgagacaggagaatcgcctgaaccggggaggtggaggttgcagtgagctgagattgtaccactgcactccagcctgggtgacagagtgagactccatctcaaaaaaataaaaataaaaaaataaaaagaatgtggtgtatga

SEQ ID NO: 1584 - DNA, 829 bp, Homo sapiens
ggaagggaggaagcgtagaaggtgccgatgcacttttcctctctccagccctcctgactgctccaagaatttcatcgaacaagactcaaagaggcccagctgctctgcgttttgattcttctccctctctcagtccacactgacctgggaggggcttctcaaacaccacatttcctagcgtgctgtgagaagaggactgtgagctaagaagggagaaaaggcactccctcctcatcaacaaacacctgacctgggtagaccctctgcttaccaagatccagtccaccttttgacatcagcattcatgctgcctctttttacgaaccaagccaaagtggtcccttcctctggaaattataggatacttaatgtacatcatatccagctgcgcgcgcggccgatgcagttgaactggacgaggatgctgctctcccactcgtagaagcactgcaggtgcatccaggtgctgcaggggcagtgctcgttgttgcacaccaccttctggtagtcgtccttctccaggtccaccggcctaccgaagctgcagatcaggggagtggcacatggggcttctgggggaggaataaagagagaacagatttcagatttttggattaggggtactcaacctgtacttgcaacagtatggtataaggtttttctaagacatgaatataatgaaaggcagttccagggttcctttaaagatgaatcactccagtgaaccagggaataatatgatgaagctacttaaccaaccagtctggtggaatctctaaaaaggaccttcaacgcccttcatcctgagctttaggttgtcctgaatacc

SEQ ID NO: 1585 - DNA, 488 bp, Homo sapiens
gactgctgataatctcaccaaccgcttcctgtacaaacaccggaagtcaactctacaaattttagataagaaaaagccatgtcagagggagatgctctcagacgtgcagagactttcaaacttcaccagtacatcagttcctgcaaaatagaccagagaaggtgcttcccgcaaaataaacaggtaagcaaaatctaaaaaggtaatgcaagattgaagaaggcaaagtgtaaataagaacagtgatatttagactagagggaagtttcatgtttttttgttaaaatgcttttgaaacgaaatgcaaatgtaaggacaatccttgccaaaaatactgtataatggaaaaataaatttttaaaggctaattattttcatctggatttaatattcttggtcatttcaatacacttaagagacatcattaaccaattccttcaaaatttaactcatatctcacctctgttccccattcttatttctaacac

SEQ ID NO: 1586 - DNA, 704 bp, Homo sapiens
agtaacactctgggagggctcaaaccacataaccaaatgtgccaagataatcctgagctcactattgtcagtcctgaagattttcctcagataatctttcatctctttgttcctgagactatatattagaggattacagagtggtgttatcacagaaaagaacaaggcttttctgatccaagatctcggattgttcaaatccatgaggtgggaccacactcaagaaaaagtccagggtaagctttccatctagaatgataccttaaccaccagtgaaagaagcaaggtcaattttcattgattcaaattatattcaaagtggatttttatctgagatctacaacttatgaagaatacaaatgatgtatattcttttctactcttcatgtatggactagaggggcttgcacagtagtaagaaaaaaatggctgagacccacaggaacaaagaaacaggacaggagttagatgcagagaagagatttcaacaaaagtttggaaaagatgctaacggtagcatatgagtcacagacagaacattggcacctttgtttaagaaactgaatgttaatgtcacatctgcctttggagattacaaatgaaatggctacctttctactggaaccctgaccagaagtctgccagttagtaagctggcttaagagatcaatctaaaatttacataaggcttttgaaaaaaagaa

SEQ ID NO: 1587 - DNA, 994 bp, Homo sapiens
ttccgggaaaacaagcccagaaggcggcggacactcgcataaagtcacgcagtagtactcggagcccggggtagaacctggacttcaaatctctgcactcccggccgggtggtgggcgcatatcctgggtagcctctaggaagcgctagacacatggaaccaaggcagattcagcctggcagctggcaagtcatggagcactgcctgtccatctgcgagctaacaacagtcgcgctggaagtcaacaagggaaatggaaagggagagacccagcctccacaggggctcacgccctgggacctgtgccagtgtgaacaaggttttccggttctagccagaggaagctgcagccaggcctggcagtctcccctgctcccttccaccagcttggttcctgtttctgctggtcctgggagcccccagcagatggactgcccttatcagccggctccaggccagaggaggaatcctccggtcacgtgtggctctctggagggagagagacctcataaatacatacagcccacgcagaggaaggggggagggtcaaggggaaagaaaccttgacattctggcgactgggccaggattaaagtccaccaggcatagtccttattggctatttctatgaggaatctcaaatccacatggcttccctggatgacaacgctgactttgactagccctgggatctggggcattcccagtgtgctgctggcttgatccaggcctaatcctttgcccaggactgacctttcacagtttacagagcactttatctcctggctcagtgaagtctcacagaaccctccagagagaagggagtttatcatcaccctcaatttacagatgaggaagctgaggctgcgattgtaactgactgactgctggctacgcagctacaagtgaccgagtccagcctgaaagccacatatattctcccacaaaatccagagctgccaaacacatcctcctccatgagtcttgctttgtg

SEQ ID NO: 1588 - DNA, 2067 bp, Homo sapiens
cacacacacatcgggatatttttcttgtttccttcttccagagggtgtaggagttgtgttccaagtttgttcctgcaaaccctccgatgaggccagctgcattcatcggggcctggatggccgcacctctctctccccgccctgtctcctgcactcagtctcatttccagatggggaaagggagacccaggctgcggtgacccactgaggcacaggatcagtgagaacccagccctggctttgcccagacctctcaagggcacttcgtgggaccattgccggccgttgtggcatctgtccctggccttgcccccatccgtctctgcacagcccaggtgggtccgagccagccccaggtctccagggtcccagcccagcctctagaagagccagcagcagggctggaagggagagcacatgctgggccttggggctgccttggacctcaggccgttgacaaggaaaagcggagagttgggaaaaaaggacaaatagctgagcgccagccgcagtctgggggacgggagcctcgtgcgactctcggagtgctggccagattggcagaggggaggagagaggaaaaacccaggctctgaggaaaaacctctccagcccagcgcgtggcctggcattaacccactgcagccccaggaagtggttccaccccaggcagccaacaaggcggtgcctgaactatgtctgtggatgacggagccacgacctgtccctcagggctcagcgctgcggctatgtccagggacccctggctgtgcccacgtcggggcttcccgttccttacctgccatgagaatgagatgtccagggacctccctgctccagctgggacctgtggggctttgtctgttgtcccgagcaccttggagatgtcatttctaacattttaacccaggaatccccccaccaagggacagagtgcaaggacatgatcgaacagaaaaagttctggtacaagatcaaccccgtggggtggtgagtgctgcagccccgggcctcacatcctgccgtccctgtgggagattggagcggtcccagtgcccaccgctgattctctggctccagcaacccctccaggtggatccgtcccacgcagcctggcctgaaacactgcccagccactgggtccagtaagacagagcctcgagtcattctgccaagaggatccagaaacacagactttttctggggtcctggaggcttctggcccatggggagcccctgggtcccagcgatccagccctgatgtgctgagggtgcagggcccagctgcagagcagaggagagtggcccccagggaccagcagcacgaaaggcacactgaggcacactggcaggcctgggctgcagagagcctgaaggtcatggggtagctggtggaagcaggaagaccccatacagcagcgaccactgaggctggtgctgcactttctcagggaattgagtgtgggctcccaccatcccggccactggcttcctccaaagcctcctcctcttacatcagcaaaccttctgttcggtgaccccctcagtgaccctctgtgcttgccttcgtggtcttcctcatggaggatttcgggtcagcgtgggggtcagaggtcatttcccataccccctcaaaggtacttcttgctgtggtccccacactctgacaccctcttctgaaatgaacacttttttgttgttgttgttgagacagagtcttgctctgtcgcccaggctggagtgcagtggcacaatcttagctcactgcaacctccacctcccaggttcaagcgattttcatgcctcagcttcccgagtagctgggattacaggcatgtgccaccaagcccagctaatttttgtatttttagtagagatgaggtttcaccatgttggccaggctggtctcgaacttctgacctcaagtgattcgcccgcctcggcctcccaaagtgctgggattacaagcatgagccactgcgcccggccacaaacacttttttttttttaaacaagtgaaaacaagtttattaacaaagttaagaaataaagaatggctattccata

SEQ ID NO: 1589 - DNA, 4130 bp, Homo sapiens
agcttgcagtcgccctgcgcgcctccccgcgaggcttgttttctagcgcctctggtgggccgcctcccgcaggcctggtgtgagcctggggtccgttctcacagctggatctggggtctgaatgccgcgccctctggagagccacagatgggtctccgctgatgcttctctcaatttcctctaagagcgagagctccgggaaaggagccgatcctggtggaagactacaggtctgagtccactggacgaaaaacgaggctccttggattagagaccatcctgaggacatccttgggagccatgtgctgaagatggccaagccacaggatgaaaggagctgcatctttgagtcaccactggagaaaggtctctctaaatggatttgcagagacgtcttctcgaatactccccttctaagttccacttgtaatccacttcttctattctcccagcaatcaatgtggtttggggaaattccagaatctcataataccttggtcatgggtaaataaggaaaggacctttacatacatgtgatgcaaagcagatcaaaacaagcagagcagcctaagagcagcaagaccccaaaggataagggaagtcctgcagaagagcagagcggtgctgcaaaggcaggcaggtaaggtaagcagacagggccatcaggatggatcctttgggcatgccagcatccaccagggactggtagagctatttagagaaactgataaaaagctctgccaactacagtcacaaaagatggagctcagaatgatgagtagatgcctaaaacatctccattttgttgatgaagaaagtaaagtttatagagcttagattatttgcttttgtacctagcacagtacttagtttatagtagatgcacaataagtatttgtttaatgagtgaatgagtcactagcctaagacctttaatataacatgcttaaacctgctaccagggattgggaactcacctatttagtagtgagtagaggggtgtggtactggtacttaagacagatgcattgtggttgggtatggtgtgtttttgtttttgttttgagacaggttctccctctgttgcccaggctgagatgcagtggcattatcatggctcactgcagccttaacctcccggggctcaagcgatcctcccacctcagcctctgagtagctgggaccacaggtacgcatcaccgtgcctggctaattttgttttttgtttgtttgttttgtagggacgggattttgccatgttgcccaggttggtctcgaactcctgggctcaagctacacccgcccgcctcggcctcccaaagttgtaggattaaggtgtgagccactgtgtccagcagatataatgtttttaaaagtttgagagttaatatgctctctggtgtgccctaggtcccactactcctattgccttaaaactcacgcagtacacatttgtcttccatgggcttcagttgtaagagaaccctttctactctttgctgttcacaagtctccttttaaacagagcttgttcccaatgctgttttgttttgccctctgccatgttcttccggccatcacctcctgtggggaaaagagagagagatcacattgttactgtgtctgtgtagaaagaagtagacataggagactccattttgttctgtactaagaaaaattcttctgccttgagatgctgttaatctaaccctagccccaaccctgtgctccctgagacatatgctgtgtcaactcagggttaaatggattaagggctgtgcaagatgtgctttgttaaagaaatgcttgaaggcagcatgctcgttaagagtcatctccactccctaatctcaagtactcagggacacaaaacactgaggaaggccacagggacctctgcctaggaaagccaggtattgtccaaggtttctccccatgtgatagtctgaaatgtggcctcgtgggaagggaaagacctgaccgtcccccagcccgacacccgtaaagggtctgtgctgaggaggattagtaaaagaggaaggaacgcctctttgcagttgagacaagaggaaggcatctgtctcctgctcgtccctgggcaatggaatgtctcagtgtaaaacccgattgtatattccatctactgagataggggaaaactgccttagggctggaggtgggacatgctggcagcaatactgctcttcaagtcattgagatgtttatgtgtatgcatatctaaagcacagcacttaattctttaccttgtttatgatgcagagacctttgttcacgtgtttacctgctgaccttctctccactattatcctttgaccctgccacatccccctctccgagaaacacccaataatgatcaataaatactaagggaactcagaggccggtgggatcctccgtatgctgaacaccggtcccctggacccctttttttctttctctatactttgtctctgtgtctctttcttttccaagtctctcattccacctaacgagaaacaaccacaggtgtggaggggcagcccaacccttcaacctacctatcttatctcttccattatctatccacatatgtcctctgtatttttttgagtaacatttataagcataagtccttaggtagctatgccacttacataatgaactagaaaaggtaaccaaacagaatagggttgtactcagatataccttctacaagtttgtgttacacatatttacacatatttaaaaatatatacatattattattgtgctgtgtggttattaggcaaactcaataagcagttcttataaagtatactcaatgtaacttttataaacttaccatattttatagttattctgtttttattagctgctataaactacctgggtgtcttgcatgagtcattttattgtaatgtttttgtatctgttgaatgaggagttagaaggcatcatctttaaggagctttacaggtacatgtccagggctcaataattttattattatttcctggacagataaaacctaagcaggtgaaggggaaagaataaaagtgcagggtggaagttgcttgaatgctaactgggtcaacgatctcccagaaaacccctgtaaaagaaacctaagaacctacatcaccaggagaccattgggaccagttcctctggaatccctgaggccagataatcagctgaagctttacattctgtccctttctggtcatgactttctccacagtctgcttggtgcctcctcctctgtgactctaaattcttaggatcaacccctcttgcatatgcacatccgcagtgcctgtgggatacggtgtggtgtggggaggaaactctcttctgccttaatattttcctgtgtgccccaggccttgacggaatcctgtctctccataatgttgcttttcgaggagactgattgattgagatggcgtctcactttgtcgcccaggctggaatgcagtggcgtgatctcggctcaccaacctccacctccaaggctcgagtgattctcccacttaagtctcttgagtagctgggactacaggtgcatgccaccacgcctgacaaatttttttattttttgtagagatgaggtttcgccatgttgaccaggctggtctcaaactcctggactcaagtgatctgcccacctcggcctcccaaagtactgggattacaggcatgagccaatgtgcccgtcctgaggagttttcttctggaattcctgctgggtttttgtagtcagtcctctccccatttcccacattggctcttgcagaccttccttttccccatttctatttgctaccatgtcagacatgacttttgccataggatctctattctactatagaggaaaccaaagccatcagtagaaatttcactaacatggaatcagatttatagaagaaagggggaggaaagttttgccttaacacctggaagggtttcgtttcttttagtagctgggagacagaaacataagaaagtagcttagtaagctttctgctgttcaactgatgatgtgtgagctgtcagtagttcaaactagtcattatctttatgaattaattatgtaataacttaaacaatgtcataaaccttcaaatcag

SEQ ID NO: 1590 - DNA, 2120 bp, Homo sapiens
aaatgcaatgatcaactatgtggaggagatatgtgagaaatgccttagcagatgatgaagaaagagatcaaaaggctccgagaagcaggaatgctacggtggatatgcagtcagctctctgtatctgtgggttcattcaacctcggactgaaaatattcagcatttgggaaaaaagtggcatcccatactcaacatgatgtgaattgtccctttgtccagtggatacacactgtcaacacttccctccagttagccacttcaccatctcggtgatcagatggactgtcgaggtatcgcagtgcttgtgttcaaggcaccctcattttacctaataatggccccaaagcacaagagtggtgatgctggtgattcaaatatgccaaagggaagccgtaaagtgcttcctttaagtgaaaagaaccaggggtcctgataattgacagtggatctccatgaagtcaagtaattacttaatatatctattaccactaccaaatgtccaacctgccagcaacagaaaccaacactgagctcttcaacaaacacagtccccagaggagactaaccagccacttgctagcaacttgatcacatcagattcctttcaatctggaaatggcagtaattgattttgactggaattgacacatattccagagatggctttacctttcctacccacagggactcaggcagcatgaccacctgtaagcttatagattatatgataaactgacatggaatcctgcataacgtgactgtggaccactggccccattttatagcaaaagaaggacaacaatggacatatgatgataggataacaccatccagaaactgcctatctactagaggtttttgacagcacagctaaagtgccagcctgcaggtgatactgtgtccggaattggtgggttcttggtctcactgacttcaagaatgaagccgcggaccctcacagtcttcaggtagctgggtaagaagcggcaaggcaaacaaagggtcctggtaattgaaaacaactgatgagtcaaacctaagcattcggcattgggagcactgtcactaaaactgcagcctcattcaacaacacatccttatcgagcacttgcaggtactccattgaatgttagaaatgcattgatgatggagacacagcaccggctcatgaggaccttccagcctaggcagcaggactggacatacgcactttggtagatttatttttagaaattggcttatgcaagtgtggggctggcaagtctaacaactgcagggcaggtcaggaggctggagacccagggaagagttgatgctgcagtctctagtctgaaggcagtgcagaggcagaattccctctttctcggaggatctcaggctttttctcctaagtccttcaaccaagtggatgaggccacccgcattagagaagggaaagctagctgatatgttatgaggacatttgagcagccccatggagaagtccacgtggaaggaactgaggcctcttgctaccgttatgtgagtgagccatcttggaagcagatcctccagcctggttgatcctttggatgactgcagccccaggtgccatcttgactacaacatcaggaaagattccaaattagactcccccatcccaggcctggcccagagaaagagatgaaagctgacacgcagctctcagaatcacccttgctatcaggtttggcttctggagctgatgggaatctgagagacgtcagggtagaagccgcctgtcttggtgagcttcccgtgctcatctggctttgggaaagactctcagcctcatttgcttatcctccatcacggaccaagcacttggtttgggaataaggggcccttggcacttactgttgtgttcttggcctttggggccttggccaagagtcaggtggaaagagttccaccctaacatcttctcctatgcttcctcccagagcaggggatgggaaagtatggggagaaaaaggctccttagggaattacttcatgttaaaaaatatttactaggcacttaacacgtacgcagaaatttaccagtggctgaagtgggtaatagggatgtatcaattaactaataaactaattaattaga

SEQ ID NO: 1591 - DNA, 3034 bp, Homo sapiens
ctgcattttatttatttcagccttctctctctttttttcttagtctagataaaggcttgtggattttgttttttaaaccagctcttcatttcattgatctttattttagtctttttttgtttatttcttctctgagctttattatttcctttttagattgccaattttgccaattttgagtttggtttgttcctgcttatctctcgcctaagtcttaaagattaagagcttgtgaacagaatattggcagaaatatggacaatgaaggcctttctgatgaggtctcagatggaaatgaggaatatcttattagaaactgaaggcttgagaaaaatgtccttaagtgtcgtaaacttgcatcaaacccacttactcatcaaaccccacttatgacttcccttagaggacaagcgacatttcagctcagttatacactgcttttctcaattcctgccatttttttctcttcctttgccccctggcctacgtctccagctcactgaaaacagcctcccctgatgagcacaccattgttatgtaatagcctaacccttacccctcgcctatcagggggtgccaagcctgcagactcactctgccttcctcaaaactgccctgaggagaaggctgaagactgaggaatcctctttctgcctcccatttgactgcattttctttggtcaaaggcttccttattcatgggacctgcctgggtccaggaccccttgacaggtgctctctggctgcctgtcctctgggcactcttgtcccaggtctattgttttcatgacccaccaggatggcgcttcacttcctcagaaattgtgatccccaggaaagtgccccacaagaggggtggagttgagatgccagaccagctctcttacagcatgcgtttccggggccaaagacacgtgattcacatgaagctcaagaagaacatgatgcccagacatttacctgtttttactgataatgaccaaggggccatgcaggagaactacccttttgtcccacgagactgttactatgactgctacctggaaggggttcctgggtctgcggccacattggacacctgccgtggaggtctgcatggcatgctgcaggtggatgacttgacttacgaaatcaaacacctggaggcttcttccaaatttgagcatgtagtatctctgcttgtgtcagaagaaagaccaggagaggctagtagatgtaagactgaaggggaagagatagatcaagaatctgaaaaggtaaaactggctgaaactcccagagcaggccacgtttatttgtggaggcatcatagaaaaaacttgaaaattcactacacggttactcgtggattattcatgcggaaccctaatgtgtcacatataatagagaatgtagtgattattaacagcatcatacataccattttcaaaccagtttatttaaatgtctatatatgtgttttgtgcatatggaatcaaaaggatgcagtactattttctgctagcaggccaggccacgttgctgtagaactgtttggtgtgtggaaatatcacaatttgtattcagaaatttcacatgatacctcagttgtttttacatcaaatcgacttggaaacagtgagtgttatgccagctttgatggaatatgcacccccaactggggagcaatgtttgtgtatataatgaggtatcacctatttaggggggcatgtgttacagcacatgcactaggtcataacatgggcttgagacatgattctgttggttgttattgttttcgacgaaccaactgtctcatgaccctgttcctgatcttaatgatatgatgagcaattgttcttatgagataattcaacgcaagtttaatcaatgggatccttgtttgagtgctccaaatgttccatacactaattttccatacgtagctcctcgttgtggagacaagatcaaaaatcagagggaagaatgtgactgtggctcccttaaagattgtgccagtgatagatgttgtgagacctcttgtaccctttctcttggcagtgtttgcaatacaggactttgctgccataagtgtaaatatgctgcccctggagtggtttgcagagacttgggtggtatatgtgatctaccggaatactgtgatgggaaaaaggaagagtgtccaaatgacatctacatccaggatggaaccccatgttcagcagtatctgtttgtataagaggaaactgcagtgaccgtgatatgcagtgtcaagccctttttggctaccaagtgaaagacggttccccagcgtgctatcgaaaattgaataggattggtaaccgatttggaaactgtggggttattctacggcgagggggaagtagaccttttccatgtgaagaagatgatgttttttgtggaatgttgcactgtagcggtgtcagccacattcccggtggaggtgagcacactacattttgtaatatattagtacacgacataaaagaagaaaaatgctttggctatgaagcacaccaggggacagacttgccagaaatggggctggtagtggatggtgcaacctgtggcccagggagctactgtcttaaacgcaattgtactttttatcaagacctgcattttgagtgtgatcttaaaacatgcaattacaaaggagtatgtaacaacaaaaaacattgtcattgtctgcatgagtggcaaccaccaacatgtgaactgagaggaaaaggaggtagtatagatagtggccctctacctgacaaacaatatcgtattgcaggcagcatacttgtaaatacaaaccgagcactagttttaatatgtattcgttacatcctttttgtggtttcgcttctctttggtggcttttcacaagcaatacaatgttagggaagagaaaggaaaagagcccacacaatggagtaaattacattgacacttactgggagatataatcaatagtcactctgacaattacatcatcttttagcaattctgatgtcatcttgaaataaaatcacttggcaattt

SEQ ID NO: 1592 - DNA, 2366 bp, Homo sapiens
atatttgagatgctgaactttttaatacttacattcttaagtttttcaaggcttttctaataagtctggcattcctgcccttggcagtgtgagatggaagatgatgtcgcaagggtggccgagaagcagctgggctgagctgctaaaagcacagagaccggggccagactcctcagcctgaaatcctgcttccactaagtaccagctgggtaacttcaggtggagcccagttgacaggaaatgtttctccagaagctgaaaagctgcctggtaaaggcctttcataaaatggtctgcgtttgggaccaggaagacagaagactcctcaagaagagaactggaaccttaacccacttcagacttcttcatgtctgaagcttatttccaccatcccattgagaaccaaagaagcgagctccttggagaatcggctcccacctggaccttctgtttatccttccaatagctgctgcattcatccttcccagctaatgacacttccagcctttcgtgtttcaaagtatcacggactttgcaaaagattccaggtttctatggagcagatagtacttttaacaatcaacatgtgcattattatttcctcctaaggcatacttagacatcaatgcatgctacagcaaggcaacttatctcaccctcaccaagatattctgcactttcagtggcaaaattttaaagaaaaggagacaaaatggaacacaaattcaatatgactattgtcatccttccctcccaggaagtgtaggaatcatccaaagtggtaaaagagcagcgcttctaaactctgacttcacatggaaaataacgcgactactaaaactgataacaatagcagtccatgccatttgacaggggtgtgtaggagaggtggtgagcaagctgaaatcccttcaggtatttgcagaacttctgagcaaaagctaaagctaaaattaacattaaatatgcaaagtatttttaacccaacataaattaacaatgttcctatttcaattctattgctcttgggatgactatgtcctttggaaaatgtttaaataacttaagatttccgtcatgagtttactatttcaaaacttatttttttaactgcaagatacctttttatgttaccaggagtgttaccagctagctgccaaaacctggttgaagttctcccactttatattgtaaatgattacatagtttattagtaattgtgtcccctgtccacccactggtccatttggatgggaaaattttcaaaataacttcataagaaaatgataagaaaaatgtggtcaccggtatcatgaggaacttccagacagctcagcacagaaaagttggttttaaagtcctcgaaaacgttactggtaatgagcttccactcctttagtcgttgtgcatagatacaccacagagtaaggttataaaaataaaagttgtttcaggaaatttcccattgctttattacatgatcaatgagagtaaagagaaatggaagttgacgggataggaatgagggacctgctggaagagtgatcacaatatccaaaggaaatttaaaatgcctgttgaaagtgacacactgactcagcattgtcactaacacagaatcaccacaataaaactgccctgccctgtggctcctggcacctcatgtctctttaggttaagcagagagaggtctgtgttgctttggaacaaggtgcagcctccccctaagctacagagaggctctgagcaaggaccagcccccagggtgcagccttgcccaccctccacaggctccagagcagatggggtggctctagagagcaaatggtcaaaacttctagcgctaaatagagctttaacatgtctcagatactagcaaaatagagaagcctcagatggctttaggtctggaagtgtgttgctaaaaatgctaaaaatttaacaaacttttataaatccttaagagatctttttcagttttctgaagtaccgttaattgcccatgtgtttcaacttgcagacaggcaagaatttggctttgtatgtttaaaaatatgtacatcttggttcataatgatgatttatttccaaaatggtgactcatactaggattacatataaaacatcatatgtgggccttatatgtaataatgtgtaagtatagtatattaattactctgacataacatgggcagagatttgtattaatttatttctatttcatctaatcaatattttacttaagtctaaaaccttatatatatattgacatgtatcatcgtatatataaacattgtatctattgaactgagcaatctgtagtttattttaaattctgatacattaaagatgtggagaactacatg

SEQ ID NO: 1593 - DNA, 831 bp, Homo sapiens
ctgtgatgtggaggccatagctccactggactcatgaggagactgaggctcagagcaatgaagtgacctgctcaaagttaaggagcttcagtttggacccaatttgttctgatcctaaggtcactatccttaatccctctccctgtggggtcttccctatcttgagcctgtggacagctgtgcagtggcaagaaaaaggccttcagagctacgcagacctggcttcaaatcccagcctccctgatgagccctggtggtcttgcatgcttgcccttgggactcagacaccatattgtgaggaagcccaagctacatgcagaggccactatagttgttctggccaacagcccaagcttcagctgccagacatataaataaaccaactcttcaaatgatttcagtttccagacttcagtgcatcccaggtaatgtccagaggagcagagatgaaccatcctctctgagccctgcccaaatgcagacttgagaacaaactaaatgtcattgtctcaagccaccaattttcagggtggcttggtacacagcaccaggtaacaggaatagcccccctcttcctctgcagctctccccaggtacaggcaagctccccaacccatgcttcatccccaccccacagacagaacctggagtcagtcctcccacccacaactgtgccttccaaactaagctcaaagcccagctctgttgctttcagatgggtgccctagggcaagtcaccaaccctatatgacaaatccctctgtgtcaaatgggaattataatagtgcccctgaggagtcttggagagatttaataaagtgcctggaacat

SEQ ID NO: 1594 - DNA, 3519 bp, Homo sapiens
aaaaaatcttagtgtctgcaaaacaggtgggtttaagatttattgatattagggaaagtgaaattaatgagctactcaagtttctgtctttggtcatcactgagagtctatttccataggaagaagtctttgcagaggaaattgaatgctgtctgatgctacaattcatatggatcctttcctggattgaagcctgacttttaaaaaaggtttcaataaattgcttatacctatgaagagatgcaaaagaaccttcaaaataaagcaaaggacttgaagaaagagaaggaagacatgaagaagaggatgtcatttaggtgaagggccatgctggataaggagctggctgcctctgtgaacatcctactcaaggcatcttcactgctgtacatccttttgaaatcccagagatcttcagtctccctgtggattaaggagatgtgcagtatttaaagtggcttcaggaaggcatggaagaggactgagtggggaaagctttttgtgcatgctgctggctacctccagcggctgcctccagcctccatcagctgcactctggggaagaggaggctgccttctacctcccagcatctctggatttcatgttcctgtcagcacagaggagctaaatggcctgtagaggctgaaggtctgaggctcctaaagctggaagaaaaggctgggccagtcaggccaagcaagaacacagtgtaacttgtctctgagtgcttcatggttaagggggctaagcaggcacaagggcatgaggatggttatatgtacagactgaggggaagaagcagtgaagatgagacttgccatcttcttgagtcagtaggcctgcctcaggtgcctaggatgtaattgctctgctgcttctcatggggaggagtggccctcatgaccttgtttacctggaagagtgtgggatgaatgcctcctcctatggggactcgcaagtgctttagcaaaaggataaattgctaattgtggcatttcgtggatcagcaggattatttctccttgctaaagaggattttgttggtcctgaattctgaggaggtgggactaggaatgggctccatgagcctgtgtatgactcagggaatattaggactttggcacagcctcatgggttgggagtaagtcttggctcttccctagcctgaatgacagacatcagatcattctggtgctttgtccatgaagatgtagattctgagcccacccaactaatcttttcacttgagcacagaaacagccccgggaatcggacagacccgtgtctttcaggtttgcttcacagagccccaggggttgacaataggtgccttggagactgcctgcatggggatttttaaaaagctttctttgttaaaggtttgtaaaccactcctctgagcctgttttcattttatagattattcagggaactgaactgcacagagatccagaaagtgggtagtgcaggctgtagtgctgataactactgtactacttggatctttgtgctcccaaataccaaatggaagaggatctctgagagtcctttgcaaagatcttgtagggactttaggctggggccttcggaaaattccagaggattccaatggagattttgagggactgactcagaagaacaaagagaatgataatggtgatgtccctgctttttacaacagatcatgttctgatatatatgcaaatctgtgtaaagtaaaccctacctaaaatgtactggggacccaagatggactgcctgtattgcttccaggataaagtccaatttctagctctggtttttataaccttgcttcagctcaccttttccgtcatcatcccctccatctcctctcccacgctgggaaatggatggctgcactatactgtgtgatgttattgctatgttcatgccatcccctctgcctggaatgcccttctgcatgaatgcctgtgaaatgttgttgctcctttgtatggcctggcttccgtggttggcaggaatctcttctttcgtggtattcctgtcatctttgtgcatcacagtcagctttgtattcctagcttgtaagctacttgaggataggggcatgtctgaatctatttaatctcttgcacctgtttggcaaattgatgttttaagtatttaaataactaaagctctctctacagtacatactcacttttgatttatgaattggcaaaattcaacttttttccttgaatattcttaaagtgagatgaattccaaaggagagtgttctgtgtgtggccttcattgagtggttttctgttaccagaaagctcttggtggccttcctcttccctggtgtcaaggttgactgttataggaaatgggaggggagagggccgtttctgccacgcattgtcctaggttcttaacattatttaatccttataatgcaatgttatcctcattttacagatgaaacctgagaccaaagaacatgtaacacataaagtacattgcagagttaggatgtgaacccaactctgattctaaacctaatgctctcactctttcattcagaggttcagtcagttctttgtaggctgtagatccagagaagctgccgtagccaacaatgaagttgttagtttttaaaacatctatgtggtaagttggtctggcacttaaaaatgtattgtttcccaggcacggtggttcacacctgtaatcccagcattttgggaggccgaggcaggcggatcattaggtcaaaagattgagaccatcctgaccaacatggtgaaaccccgtctctactaaaagtacaaaaattagctgggtgtggtggcgcatgcctctagtcccagctacctgggaggctgaggcaggagaattgcttgaacccaggaggcagaggttgcagtgagccaagatcatgctactgcactacagcctggcaacaaagcgagactctgtctaaaatatatatatatatatatattgtttactactcaccacagatctgcaggagttcactgatctctaggatctgccttaactccaacttacatgttttggtcactattacaaactgtcatcccagaatgatgctgcagaggctagggctaggacacagaccagtgtttccatgtgggaattccctcccagtatttcttaggaaatgtatgttttttgaatccataatccctagaaaaatcagttgaggaaatgagaagtattgtaattattctgtgaatagtaacacttaccattatggagacatcactagtttgaaagaatccaacttcatcaaatattaacgtaccgagttgaaggctacaagaactgagacaggagcatagcagagagaaacggtcaccatctcattagccctatttttggttgttgtgatgccattacatctgtatatctggccatatcagctgctaatggtgagttcttgcaaacaaaatgatttgataaacaacctaccatactttatacaaatcttatggtgttccgagaaataaactttggaagcaaaataa

SEQ ID NO: 1595 - DNA, 1579 bp, Homo sapiens
agcctccccgagtagctgggattacaggcgactgccgccaccacgcccggctaattttttaagtatttttagtagagacgggtttcaccgcgttagccagcatggtcttgatctcctgacctcgtgatctgccctcctcggcctcccaaagtgctgggattacaggcgtgagccaccgcgcccggccgacccctgtagggttttaaaggagagaggcagcatcccagagggcaaaaagggcttcattcatggagaaagcaactgagctgggcagagcacagacggaatttgaattggaggccagaggcaaagggaactccaagtggaagaagaaacggcatgaaaaaagggattgagaaggaaaaggacaagatggtttggagagagagcaacttcagcctggaaaagcagaaatgagatgcggccaagaaaaagactccagcccagcctgccttggttctaaccctgactgttacttaacctctttctggctcagtcaagaaacttgagcactgcaagatgatcatgtggaatacctacttcaaacggatgttaagaggagtaaaagtgttcttgtttctaagtgcttgaaatgcagctggcatataattaagctatgcaaatatttactttttttttttgaaatgctgagtttactgatcactctaatttttacatatgtgtgtcattacagaagattcaggctttagcgatgactggagggtcattcgctggaaagaatttcatcagttggaactaaatcatggtgagcaaaagaaagtctacctaagtgatatggtttggctctgtgtccacatccagatctcatctcgaattgtaattcccacaagttgtgggacggaggtgattgaatcatgggggcaggtgccccaatgctgttctggtgataatgagtgagtccccaagagaactgatgattttataaggggctcttcccccttcactttctcttctctctcctgctgccttgtgaagcaggtgcctgcttcgccttctgccatgattgtgtttcctgaggcctccccagccatgcagaacttagtgcctcactttggagtcggctgagaagatcattccagacgggagttttgacactgtacaaatgcactgtcttcacatctacgctgacacccctgcctttctacctgcaggtgtctgtggcttacaagctggtgcctcccacagaccctgtagtttggagctaatgaagagctgagaagctaccaggatctgcaactttttgcctgagggttttctcagaagacacagaaactgttctgcctataagccttgaagtgccagggaattaacacctaccttcccacagccctccccacagtgactgatagcattgataacgatacccaagcttcacccctcaggtgggataactgagctgcttgttctataccatgttctagagtttctcccatgagtttaggttctaatcatccacatgtaaattgcttgataagaaaccttcattgactccttgtctcacttcccctccccttatttgttttgtttgcacctttcaaataaactattttcattcaaa

SEQ ID NO: 1596 - DNA, 1795 bp, Homo sapiens
ccgtgactgcgtacctgtgactgtgcagcgcccgtggtgatctggggtagggggcacccctacagtgggacccctcccccattattctttctgtccagcccctccctcccactggagcagctccagagccattcctcacccccgtgacctctcccagccagggctgagaggattcgaggtggctgggagggtttccaggccccctgccccttccccacaaactgggtgatagggcggacttacctggcccagccctgcctccctcagccaacccagcccttgggctgtctgtgtcagtggtttccggtctttttttttttttttttttctggctaaaatagtttgcaaaggaccaggtaattggggaggggagagaggtgggggcaagggggaaatgcccccccatctccttggaggcagtggtgtgaatcttcttcaacagcaattaaagaggaagtgattttgtctagggggtgagctgctggtctgttcttggaggcaggtcagggcatggccttggtcaagatggggtactggggttggacagggacaggcagaggtgcctcccactggggctggtggcaggacagtacccatgggcatggaggtggttccatcatgtacaacagttctgggttcatgtagtggaggacgtgggcaggttggagtcagtggggaccctgggaacagagaaggcactgactcttaagatgatgccagtcctgggagagttgggatatggtacttagaggagaggacaggcccatggagaggggtgggaagatgggacagctttgtttaagagcaggaactttggagacagatctgattttgaaacctgcccctccactgcacagctaggggaccttggtggcatctgtttatctgtattctgaacagtatctgttcagagggcacctgaaaggcgctccagctctgaggagggctgccccgagccagcctgctcaccgtgagcactaggtaccagagtagaacatagagtaggggttcctcccctggcctcgtcagggggtgttccagagggaaggggtgggagacctcctgggaaagatttcccagctagctgcagaggtccctggtgtccacaaactcagtgtcagctgatgcaggcatttatccacctccgtgccatcaaagggaccaccaaggccacagcggcctgaagccggtgctgcctccatgagctgcagtgccactaggctcagcacatagccaatcctaccatttctcgagggcagctgaaagtgtttactcaggtagaggggctggacagggtagggttgggtcagcagccagtgcaggttgggcacagccatatgttgttatctaccttgaggagttagttggtagcaccagcatctttgggtagaattgcttctgacccttggtgcccaccagccccaagaggttcagctgcaagtgtgccactgaactgaggacacagcaccagacctgaatccagttcacatggaggctgcggctctacagggtcctaggctgtgaccacccagcacagcggcgtgacccaggaaaggtggattcaacagtgcaggtgcagtgacaagtacagaggcagctccactccttcctcgtggccaaagtttgctcccttcttcagaagtttgggagtgtgagagaatatgggaaggaaataaggaccctggagagaatgaaattgccttcaaagagcaagtgggaagttcctttcatttccagccagtgaaaaatggtcaaggtgtcagcaaacctcacaacaaatcccaacaccaagtaa

SEQ ID NO: 1597 - DNA, 541 bp, Homo sapiens
gtcgatgggtttgtgggcgcagggcgcgaggcgcgaggcggtagctgggctagtcctgttccctggcgtctgggcctttctgctctccgcaaggagctgggtcgcgacctgtcactgccagccgtgcgctcgccctctgcgccccgtctcgtggtcactgccgccctccctcccgccacacctgtgatgatcgctatggagccgcgcctcaggtggcattactataaacctaagaggagaggcgcccgttcgaataagggcaaattatttagtattttgtcttcaatgttcctggcagcttaaagtaccaactgggacacttgtcactagtttgagaagtgcagccatagtgacctcttttgaaagatgaatcaatgaattaagtcatttctgagaaaccaaggaggcctgttgaaggaggctggccctcctgtggcaggtaacccaacctccactgcccttggcaacaggacaaggctaatattttcccaagaagggccttttcatggaatgatctttccaacccgttgactacaacaag

SEQ ID NO: 1598 - DNA, 1535 bp, Homo sapiens
ccgagcacatgggcccgcgggccgggcgggctcggggcggccgggacgaggaggggcgacgacgagctgcgagcaaagatgtgccccgggacccccggcaccttccagtggatttccttgcggaaaggatgttggcggtccctgtgacctgtggagacacggccagatctgccctccagcctgatcttttggccagaaggagattaaaaagatgcccctcaagatggctgtgcctgtcagctgcatggagcttcgttcaagtattttctgagcctgatggatttacagtgatcttcagtggtctggggaataacgctggtggaaccatgcactggaatgacacacgcccggcacatttcaggatactaaaagtggttttaagggaggctgtggctgaatgcctcatggattcttacagcttggatgtccatgggggacgaaggactgcagctggctgagagggttgagatctctgtttacttagatctctgccaacttcctttgggtctccctatggaatgtaagaccccgactcttcctggtgaagcatctgatgcacgttccatccggcgctcagctgggcttgagctgaccatactccctggagccttctcccgaggtgcgcgggtgaccttggcacatacagccatcatgatggtactttaagtggaggctgaatcatctcccctttgagctgcttggcacgtggctcccttggtgttccccttttactgccaggacactgagatttggagaggtaagtggcttacctgaggccatgtgctaacagagaagatgaagagatgattgaaacaggcctaagaccagacctaagggtctgtacattttccacatactttccatatctttagaggcctgaccaaagcagatcttttcctttcttctaggtaagtccaaaggcacctgcctgctgggcccactgttttctaactttcctaactttctgatcccttggaggtgataatcaaatattctagtctgaggcattgggatacatggtgctaggttctgagactctgcgtcaggcctgaaccctgcattttgtggaggtgggtgggagaatgttcccctggggaacatgcctagacacgggggacaacagttgccctcatggggaggtacctgtttactcgctgttatgggaccgctttcacaaaaccactgcaggtgagtgagttcctgctgaatatcaggcctggtgtctctagactcattatttcccccacccaacccctatgttagttcatctcgagccacatttttattgccataatccaggcctggacaggccaagatcttttaacaattttaattactgaaaataataactgcattttttttaaagcccaacttttggtagagtcagcccaaaatacagtctttgtgttgccatctgggaactggatttggaattgttcttccatgagactgcagagcagaacggcagggccagaggtcccacgagctggtcagacccggttctgctccttgctggctgagtgaccttgggcatt

SEQ ID NO: 1599 - DNA, 2051 bp, Homo sapiens
tagtatttatgcattgttttatgaacataaaacaagcgaaactgagtatgttgaatgaaaatttagaattgaaacatcccattcctgatgaatatgaattactaaagttttagtctaaaatgactagatgatataatgatatatagcttgagaactgataatagcaagtaaatgaaagtcaatttattcagagaattgaatgggaaactaaaaccatttaagccttttctataaaaaaccatcagctttatgaatcaccaaattaaagaataaatatactaagataaaagtttccccattatattacagagaaaaccatgttctgagctatggacttttatacctggatgtctaatctgaggccatcaaaagaactcactcatagatcagtttgcctcatttcatggtctgccttggattcccccacacccactgatccaaagtctgtggaatagggaggcaccttccagcaaagaaggcagacatgaaagtgtacattgtgatctctctgttacgaagttgaagaactggccaaactgatgtatgttaataggaatcaaaacaggggctgcgtgtggaggggtggacgatgttatttgaaaagttacaggacagattttctgtgttaatggacatgagccatacattgagagggctgctggctactgaaagaaatataaaattttaaaatttctgaaatcatgcagttaacatctgcacacttcactatattttaagtttttgttaatataaaagaataagaaaacagaaaagtattactgttaaacaataatagagaaatgtatactttatttacaaatttctccctctagctgatcatacagttgaccagttcagggtgcccgctgctggttggatgccaggcggaatgtcagggtgttctctggtgtctgttgtggctgtgggatccacggttactgggcggagccctgtggtggctgtggtgccatggaggggctgcgatcttctgtggagctggaccctgagctgactccagggaagctggatgaggagatggtggggctgccaccccatgacgcgagtcctcaagtcactttccacagcctcgatgggaagacagtggtgtgtccacacttcatgggcttactgctgggtctcttacttttattgactttgtctgttaggaaccaactctgtgtaagaggtgaaaggcagcttgcagaaacactgcattcacaggtgaaggagaaatcccagctcattggcaagaaaacagattgtagagactgaggcatctttaaaagatgtcagggtacagaaaaagtctttcaacacccccggctttgtagatgcctacaagaaggtgaatagcaccaacgagatgctgatggagaaatttaccaccctcgttcaagaactgaaagaagagacatcctccagactctccaggcaacaagaggagctggtagagatgctaacaacgctggaggccctgggagaggccatgagagccaccccgtcacaaggagcttttccacacctgccatgcagctgagagccaagccctgctgctctctcccccacgagggggctgggtcttagagcagcactgttcttttcccctccacccaggcctcccgagctgccaggctctgtgctcccacactgactccatctgaggggtccttgaggccagtggatctggagtaccccgcccctggcctggagttcctcctccttctcacgctgacactgcagccagctcctcaatgggcggtgcctccaaatctaaagaatatggaggtcctggagcacaccaagaaatgagggactttttctttgcagaaagtttgaattctgtcttaatgagacagaatgccatacttgagcacctcatcttttgctcaaattgaaatgtcatcgaactgtatttctcaagtcaatggtctgtaaatatgatttatgtattaatctcctaagtgaacaatttatattttatcctctacataattatcgtattatgctttaaatatatatttagtttatcaataaagacattcagtactcaa

SEQ ID NO: 1600 - DNA, 598 bp, Homo sapiens
acccttccagctacagctccctccggtgccccagaaccgcccggcactccggggctcccaggttcatctgggcatgactccgccctcccgacagagccctctgcacaccccctccccaccctggcccatcgcagctcttcacgaagacgcttcatggaatgggtgattttcctaagcacttttctttccatgatctcatttggtcctcacagcacctggaggagggcagacaggctgttgctccattttacagattttccagaccaggctttctgagaggctgttaatgagccaaaccattctgctaaccgtcgttttcagaagggccacccggctcacggttctctttattcaggcaaagccatcaagaccccgggtcttcctctgtggcccaggctggagtgcagtagcgcaatctcggctcactgcaacctccacttcccgggttcaagcgattctcctgcctcagcctcctgagtagctgggattacaagctcctgccaccatgcccagctaatttttgtatttttagtagacatggggtttcaccatgttggccaggctggtctcaaactcctgacctcaagtgattcaccct

SEQ ID NO: 1601 - DNA, 2684 bp, Homo sapiens
agagctctcattttccccccttgctcgggatggtgccacaggaggctgtgcgggccccgctccgcttcgaatggctggtcctatagtacccctcctcaggaatgtctccccagtgcaaggacaaagactgaagagactgctatattgatggactctcaagccaactatgaagttgaaacaaagaaagtgatcacctgaagacacctcctctgctaagaaacacccccaaattgtgcagcttctgccactagaactctcagaacaagagacaatcttttcaagaaacagaaaaactcaataatgacatctagattttcatgagccaagaactttcccttcctcatgtgtattcctctgtttgtacttaaattcatgtgacattcatttttttcctagtatggatatgcttattaatgcacttgtttcaaaatcccaaattgcacaaatgtgttaatattttaagaaacaaaatgaatcctacaaggagaatgatttttagccacacatagggttggatcttgagagtgacctacagaataaaagtacttttaaaataaagtagtcagaggctattcaaagggtaaaataatcatagtaccacattggtccacttgacactaaccaatcgatcatttttttttaatcaagaaagctagattctatcagataaaatcactgcttctaaagagtttaaatctagttagaaaaagttatagaaatgtttgcaaagataagtaacagatagagtcagtagaggataagatcaaaaacaaaaccaagcaaaagatgagttcaggggagtttgccatcaagttggcaaaactgacttacttagggaagaaagttataaaacaggaaaatatgagatgaaccttgagtgatgtggaagatttagataaatggaaaggaaggagaaaatggagttctttaggtggttgtaattggaggaggaaatgaatacacacatcttgttgacttaaacccagacattcagcagctctctatacatatctggaaaagactgcacagtcacctcctgtctctcaccccaggtattacttagaattattatcatatttcccttcctttaaagtaagtaagggtgattggtgacaatatggagaactatgatttttccattaacctaataataattggtatttattgagttctgttaagcattttacatattaactcacttaagcctttcaacagccttgcaaaataggtattattatccccattttacaggcaagaaaactgaggtttaagtaacttgccgaagtgccatatacagggctcacattcagtattgcagttgcaaagctcatgatctatagtgccaagttgcaatattgtagtcaatgtcacaattattacccctttttatattccttgatatttttccatggcaaacaattagctatttcatttaataatcacctaaaacttttcagtcttctgattaaaattacgctggagtgatagaatgtattttcatgatagaaattgggaaaaaaaatggggaatgaagtttatcagcatttcagacttgttttttttttttttttttgcaagactttgatgagattgttcacttttgtctatgtaaaatcccaaatccttgagaataaaaaagggggaggtttaagtcacttgttgcaatgccctttttaatagaggcaataaatctaaaggccataaatttagagtgacttacagaagatcgaactttggagtgtggcagagtaagggatggaaaccgggccctccagttcactatcagtagcttttgcactggtctgcccttcctaaattaagtatgcacttcaatttgatgagtggaaacagtctatctgggcagtaaccagggagctttgtgcctagtagattgcttctgttctgcacttctttggtttcccacctcaatgtaaaaaatagctagcaatgaagtccagaagttgtcaatggttcatccccagaagaatgcataatgtccaaagttgtatgtgtatgatgtcttcaatggtattaagttatttcaaattcttagttcacctacataaatcatttctaacaagcatcttcttaaccaactttatgcacagtgtatgtttgtaagtgcttctgcacgaatgtttatacatgactgtttccatagtacttatgtttttaaaaatattcagtcatttcctactataatcctcatgtatccatgtaactgactcaaaaatacttcagccacagaaagctaaaactgagcaaatctcattcttcttttccatcccctttgcatgtggctggcatttagtaatgattaataatatggccagctgaataacagaggtttgagacacaattctttctcaaaggagtcagctaagctgggtctacttatggacaaacatctaaatgtgtggaagtatctgatatttgacaatggtaaatttccacttagctagctagcattgtcagacttcaatctcctcatggctctggccgtcctgttttaagcatgataattgttggccacatctcacatagttctcattgagtgagttcataaataaacagggtttttttttttttttaaagagcagccaagcacaaagtgtgactttgttgacattttatgtgactttgtcatatgttcctaacccccaataaaagcaatgttgcatcaa

SEQ ID NO: 1602 - DNA, 725 bp, Homo sapiens
gaccacataggattggtatgcaaaattgtatcagaaaattagatgaaacgcaattgttaaaacatagtgaagtctgtttcagacgtgctgtattggcacaactaaccagataggtaatagcagatgctgctgaggaaatgaaggcaactacacaactactgtgggaaacagatggggaccagggagtaaggtgacgatgtgtgcgccaagtggcctaaaaacccgtgaggaaactcacacggtgcatcaaatatgagagtgttcacagcagcactgggagcagcccagctctccatcaaaagtcatgcattccttcagtggaataaataaatgaattacagctacagaatctcaggaacaaaatggtaagctaaaaaccaagtaactgaagaaaacataatatttcacttatataaagataaaaaagttttaaaactaaacagtgtatttttaagagattcaactgtgtgtgggaaaagcataaagaaaaactagagaatgatgaacaaaaattcaagacagtggttgcctctaaggtggggaagggccattatcagttcaaactggaaaatggtgcaaagggaccttcaaaaatgatgatactctcttaaactgtatgatcagtacctaagtgttttgtgctattgatattctttgtgtcatacccatttttttcatatttattagatatttaataaaaccagttttaaaaaatacaaatccaa

SEQ ID NO: 1603 - DNA, 580 bp, Homo sapiens
acttggaccagactcagtgattcaaaacagtttcttggccacatcctttccaattgaagctgaaaatgggcagatgtgtaaacaaccctggacaaagaggaaagcaccaacctccatgtacttattcaaaccagaagccaaggataatcctttagcagtgttgatcataatcctgaaaatggggagaagtaaaagacatagagctcatttggggaacatttcaagtcaagtgagagagaattatgaccaagggacagttgaaatgaaggttgagaagaaaaacctggcccttgttcttagccactttaatgaagcatcacttgccacagagaggggaaaatagcaatttgcattctgagataatttaagactaacctttaactatatgtgcattaatgtatggctaaaaatatgtatcaagattttaaaattattaaaggaagcttacagatgataaagaagataaatatttgaaagaaaaattaatctttgaatatatagtctgctcttaacaagaagcactatgtgattttattctttgatagcaaagattgttataattattaaaacactctcactc

SEQ ID NO: 1604 - DNA, 537 bp, Homo sapiens
gtatgaaaggagggaagcagctataaattagaaaggagataggaaagtgaagatatttactagactctgcctttgcttgcagttctctggcttgattgaggaggttctcactttcatctttatgggactttggctaaaaaaataaactgtcaaaggaactggcatttgctgactggactacagcacatctcgaagaatctgcagactgaaaccttcaaggcattcatgaaatggtcttcccttagttcccctgccttttccactctttctgccatttggatttcacactggaagttcaagagatgacatcagaaaacagaaaagccagtgggaaaggcaaggtataaagaactttcagggaatactcacatcataaattcggtcagtggtgttcaaagcaaattctgctgtttcattggcttcactaacataattaacaatattttcatagacatttgatgcatccaaagccttctgtaccagcccgttcatatctgaactgtgcaacttcctgttaataaacaaacattgttattt

SEQ ID NO: 1605 - DNA, 672 bp, Homo sapiens
agagggaagaatgagaagtgactacttcatggatacaaggttttctctgggggtgatgaaaatattttgacatctgataaaggtggtggtagtacagcactgtgaatgtaccaattgccactgaattgtgcattttaaagtgattgattttatgtggaacaaatttcactttaattataaaaagtgaataaacttttagaagctaaccttggaagaaggtagagactggaagggatcacaagaaaggcttctgggatgttggttgatttctctaagaagtacatgctgaaatgaagataagagtacaaaatatttatcggagagtagtaacacagaggagacacaggatttggcagaaacactaaaccatggtgaagaccggctaaagtctctttgtccaaaggggagctctaaagtaaatatgagccattaagggagccccacactggatggaaatggccaagcctttttacaaccaccttctccttgagacactgcctgcaattcaccctgggaaagcaaaacctcaactgtttctgcctcattcattctttgtcagtgccgtaagaagattgagatttcagcttgtaactgttgaagcaaaacctaaagtggttaataatgggagtttgtcacaactatcttaacacaaatataaaatatttgcatgaa

SEQ ID NO: 1606 - DNA, 561 bp, Homo sapiens
taggtgaagaagcccattggaaaaggctggatactgtgtgattccaactccatgacattcaggaaaaggcaaaaccatgaaaacaagaaagatcagcagctgccggggctgggcagagggtgactggcaggagcacagagtgcaggaaggatactgaattccttgaaacgttgacctccaagatgctaactcaggtgggaggaattcaagacaaggaaggagcctcttttgggttctggttccggtcccgctactgaaaacccctgatacagttcaaggagtgcgacagcgctggtttcaaatccaggtttgcagcctggtctggcgtggagaggttttactcttgggaggcccaggagaggcagagggtctgggccagggagggctggtgtccacggcactcccggttccgggctccaagtgtgtggggggagggtggccactcaaaggagagagcctcagaaggagggcactggggacccaggtactgctgaacccaaagaaatgagccgttaaaaaggagagaaatgtgtgtggaagcccggagctccatgggcaggg

SEQ ID NO: 1607 - DNA, 825 bp, Homo sapiens
ggcggtgctggggtgcaccagggcagcagctacaggccctgctgaaagggttgacaatgaagactctcaggccaccgtaactcatggagaagccctgagcatctggcccgcttggtaaattctgctatgtctcctccagccctgaccaaacttcaaatatgaggaaaataaacattgtcatatatcaaccggccagttcccagcaattcctgcctgcgtgcccatgcaaggggaggtctggtgctgcctcctgtagtaactacctgtggagccagctgaactcattttcccctgaacttcagaaagtgccagaatcaccccagagcacttgagtacttgccctgtgaagacagcaaggaaatgggagaggatttgaaggatttgcttaagagcggctttgaagtcctccaacagggtgagagagccagctcagcacagacccagcctagagaaggagcatttttctagtgggctcatctttaatttgcaactatggcacaaaggaaggagcagctgtggagaccagggcattggtgaaatgaaagcatattgtttccctccatcttccccaccctggggaggccagggtttctccaaggcagacactctctaagtgaaatctatggaattttggaaacaagataaaagacatactcgactgcaatgcacatactcaccgtggagcccggcacgcagggtaaagactcgctgggtttgcattgcacattctcactgaggagcccggcacgcagggttcagactcgctggttttgggttggtggacttcattttctttcacgctgctgcttgcccagtgggtgtaga

SEQ ID NO: 1608 - DNA, 3197 bp, Homo sapiens
agctttctaaaatctctttaggggtgtgcgtaggctcctgtgtctatgcctgcttttgactgcccagttgaagcctcttcctatgccttttaaaatttcacgcactataaggaggaagagctcagggctcccaaaactttttatttagagggaagaatgctagggagatgggtatgcagagggttgaccaaattggaagaaaatatttattctgtagtttggtgttggaaaagggaattttccaatcagccacacctcagtgttgcggcaaaataattcttggctcccctggaaacgcatgggcaaggtagggcagagctgctgctgctgatactgccaccaccctgggcttcctgctgactctgggctactccctggggacaacagatttgcattgacgtccggggctgtccagaggccctcaagagccagttgtgagctgagcccagtatgggaaagatctaccttctggaagctactactacgtggtgcttggaaagaggactcaggagagtgcagcttgctctgtgagtgggtgacaacctcttggcgactcaggctcagctgaggatggtgccagtgtgccggagacagccgtcatactgccggatagagtggctcacttgcatgtatttggaacaaaaaaaggagatgcctggcagccccgctctctgcagtgctgttgagccaccaatttttgtggttttgtgaccacaagtgctgactgatgcgacatgaccccagtcttgtcagtgaatcatcaccaggctgcttactggaaactggatgcagcaaggaaataggatttaaccgctctctgcctcccaggtaagtccagtgtgggctgctccctccagccttcccccatcctccttccttcccacgaacaccattttccttattccgccggggaatcctcagacgtctccattcagaatctcccaaacgattgttctcttttttgcattcttctccttctggcttttctgtgtggggttagtaaccagcacagggttgggggcagaatgggcagctgaagtggtcgggctgtgcggacgtgtgggagatagctgggtagtgttgctgggtgtggcagttggcagagcatttgggcctcccacagtaatagaaactctctttggctccagcatccagcaggaggttctgggtttaacccctcggtaatcctgggagccttcctggtgcctggggattctctcccctgtgtagtctcagtggatggcctgtcttaactctagatacattttgccttgagggggcttagtctaggttggtggtctggagtttggactgggctgagcagtgagctttgggactctccctaattttggggtttctttgaatgagccactttcttcctctaggccttcattacctttgccttaaaaaacaaaatccctggtccagtaagccattgcaaagcatctctaggaagttgacaaagaaatgcttttcttctgcctcacttgctgccgatcacagtaatagcaatggtgattaaaaatgaaaaatgatgacggcctgcagaatcagggaggtcagtggcatcattgatacaattcacaaagcagactctcggtgcccacacatcactaggaagtctctctcctatcgagtagatgactacagcattcttggccagtaaagccagttggaattagccaacagcagattggtctgggctctaaagataaaaggaattatgttgggtaattttcggaggtacctatgggatcctacctctggccacacagtggtcgcctctctctgctcatatgtttcggtgggggtggggggttcctcttccccatgctgctcccgttgctatccagggaagattggccaattctgcttcctgttatttcttcttctcctctgtccatttgaggtgagtctctaggttggctgtgaacagcctgaggaacccagggctgtttggaagaatctgatgtctcttccttcaaggaccctgacaggtctcagccctccagcagtactgcagtgagggatggcagggggtgttggagtggagagatatcgacttgggtgcagctggggagactaaaaggagtgagccaagtccctcaagaagtgttggctagagtctggccagccctggctgtagggctggagccagacgtagctgctggctgtgcttgggagtctcagccctcatatgtgcagtgtgtccctgggcatggctcttcgtgatccccactcccacgaatagccctgtccttggttagattgggaaaaccagggtgggaagtaaaggggaggttggttttgctcgtggtcatgcagttatctctctggcctctgatgtttccagaattgggattggtgcttccctgctgattttcctatttttgtccctcatctggttcttttcctccttgctcaccagcctgggttctacacacatgacatggggcattgtgtgttcccaatgaggatagcagaacagttggtatctcctgagagaggggccagcatatctggcacttttttcttgacctttgaatttctgaggtctgggagtcaggaggcagcatggggcctctccatccgggatccagcagaggttaacagagttggtggctctggagctgaggtggtgtggcttggctgggagttgtgggggagaggccctgccaggggccctgattggtcagtaccttctctattccattgaatcctggtccggtcagctctgtgaattgtttaatgcatatcttggctctgtcccctggctcgagtgtccctaaggctgcagccacagctttagagaggatctgtaccttgtgctggtcactttttttgggcgtgttacctccctctgagatatgtaagagataccaccctttcccaccagccggctgtctgtgggaggccctcattttgctttgcttttctgagacttggagtgactgtgaggaaagcatggactgagtttgctttcttgctggttccttccacaagagctgctcatgggctgataaagccagagaacacctccagggccccatggcctgtgcggagcctggtaccatagtgtcaagcctacagggatggactggggacatgggggcagatagagccacgtggggaggtggtatgtgtggttagatcacaggagcaagtccaggagggtgtgggaggacaagtccagtgct

SEQ ID NO: 1609 - DNA, 441 bp, Homo sapiens
ccctgagtaggaatggacaacaaggtggtcaccatgctgacagctattccctgtgtgatttactttattatgaagtctaaatttgatgctgaagtgctagcctaagctcactaacctgccaacttagagaagaaggtaaccatggctaggatgactgggaatctgatggactcaattaagaatttctacagatgggaaaaccaaaactccttagtggcaagaggccaaagatggtcagcgaattgttgtttccggctgttggaagttgactgcagttgaataacagaacaaaaacggagcttcaaaatcatggcgtgcctgcttcttctgggttcttttaactgcaagcaatcagctttgaagagcacgtagggaacttctgatgtgatacaaacttttgtctttttttttttttttgtcttttaagagcattcaaaaaca

SEQ ID NO: 1610 - DNA, 570 bp, Homo sapiens
aaatctgcaaaatctgtcttaaagaaaatggtcagtctttcctttcttctaaacatctctgattttttcatcttgtttcctgactattcacagacagcaacaataacagattctggaaagaaggatttgtagtatacaccacttgcctcactgctttatccaccaacggaccctttatctgggaccaaagattctgagctgaaagggccctcagagcagccaaggcatgcatgagaagagaagggctatgaagtggaagctgagggagcgtggactgcaggcttgggagagggagcatggtgtcctgcagagccacatgctggcagaactgggtctacagacacattttattcagtccctaaaccacagaaagtgaggacttctaatatgtggtaccagagtgtgcagcaaagaaccttctgcaaagagctttggctgcagatgttcaagatttgccatggactccagaactctcaaatcacttggaaatttgtctatgcagcattatctggtgtcatgcctgagatattgaaggaaaagccccagcctttcaggggtttctgagaagaa

SEQ ID NO: 1611 - DNA, 637 bp, Homo sapiens
cagaggaaagctgaggtcaaggaagttaaataaatggtatctgagaacctacctctggtgatggtcatatcggtgtctccgagggtcgtactcgccccccacgtccaccacgatgtcacaggaagcgagtttttcgggatcccgggtccgcacaatctctgcatcctgcgagaatcctgctcttgtcaccgaggctggagtgcagtggcacgatcttggctcacagcaacctccgtctcccgggttcaagcgattctcctgcctcatcctcccgaacagctgggattacaggcatgcaccaccatgcccgggctaactttgtatttttagtagagatggggtttcaccatggtggccaggctggtcttgaactcctaacctcaggtgatccacctgccttggcctcccaaagtgctgggattacaggcgtcagccactgcgcctggcattgttaataaaactttaactcagtgatccactgtggggtcactaacacaaatttagggtctacaatgcatcggtcaatatgctaacacagctgggtgtggtgagaatgagactcttctcggaaaaaaaaaaaacctgctaaccaaagatataaaaacgaacacaatatggtattaaatgagtctgacat

SEQ ID NO: 1612 - DNA, 579 bp, Homo sapiens
ccctctgcccctccgcccctccgcctgtccgcctctctccttctcccttgttccctctctccctccctgctcccccacctccctcccgagtcgtagactcccttccccccggcgctgggagtctccttcccgccccgccgcgcaggtgcggcgacggccgcgtcactggagagtgtgtcgagtcacaggcggtcttccgcgcggagcgtccccggcggacgctgcgcagatggctgcgactgtaggattcttgccggctagtcttcgtcggttccgcctgcgtcaggttactcgtgaaaactcgaataagtgctatcgatgtgaaatccgaggaaaagagcatttgggggaaaagttatttccttccaatcccatcccaaatggaggttgcagcagggtagagtttttggacaatcttgtttactgctgcatccccagtgtcaagaaggctgcctgaacatagaaagtcttcaatatatatttgctgaaataaaagtaaaaattcagtctggtgtctccataatcacagccatggccttgtaaacaggtagtgatgcggacagagccatctgtgctgcg

SEQ ID NO: 1613 - DNA, 563 bp, Homo sapiens
attacgtcgaaatagctcgagctgtaacctagggtaaataataattccttttcgtattcatcaaggtgcttctaagtgccagtgccaggagtcttgctctgttgcccaggcttgagtgcagtggcacgatcttggctcactgcaacctccacctcccgagttcaagcgattctcctgcctcaccctcctgagtagctgggactacaggcctgcgccaccacacctggctaacttctgaatatcaagctgaaattactatcagatatcttgccaccacatagaggctttgagtgaagtctgcatggaggagaacagagctgagagatggaaagatactgaatcccagtgacgtcctttgagatgtcggatcaagctgagctgggcatgaagatagagctactcctatacttttaagataccaataacaagcaagattcagaagtccaacaagtaagacattgatttcattaagagagaactagtaagcaagctatttgggaagtacactctcataagaatattgtttcatgaagtcttgagcaacaaaggaaatagtaagtaag

SEQ ID NO: 1614 - DNA, 1093 bp, Homo sapiens
acaattatacagcaaagtctcctgggagggtttatatgttaagctctgtcagtaatttctcccctagcaagaatgaggaagatgaagagctcgggtatctgagggctggtgtgtctgcatgcgtgtgtgttttgggggccgactgaaggaagagaaggctggagagagggaacatgggtctgagggcacatcgctaaggggtcaagaggcctaaaggaggagtctaaggctctccatcgaacttggacttggtctacattagactttaacctccatgaggcttggactttcaggcttcctccctcacaccgcgggcaggtgaggcgtctgctacaggcctggtctcgcagagggggcccagcgccccccgccgccgccttctcctggagtctgtgtgacagaatgggacctgtgggaaagcagcacgtcagcacccagccccgcttgcgcgccagcagctaattaaagccaggaaggtgatggcgattttcaactcattcccgttacaaacagccgaccttcctaccgagttcaagtaccttctgcctggcctggaagaacaatatctctctgtctccctcttccactggccctcacctgccttcccctgaacatgcattttgcctgacaggagacagaggcagttgagatggagtcttgctatatggcccagctggtaatgcctagattcttgagtccctccctggctcatccctgggagcagcactgaaccccttgtctgacacctgtctggaaatggagcctgcacattgaccctagccatgtgtggtcttgttactaagtgttagccagtgagagaacatacaagaggaggcccatgttgattcagaggatgaatgagagatgcttgcagcttggtccaggaggccagcaggaccagagagaagaccacagcgacacatggggatggctgtcccacaggcagaaatgagcagccgggaggaagcccaggcagccagccacccagctccctccacatcgtggccctagaacggagtcttgaagaataagaagccacagcttgtcagggaatcaggctggaaaaatgttatgagactgagtaagaccagag

SEQ ID NO: 1615 - DNA, 975 bp, Homo sapiens
ttcactggcatctcctagggaagtttttacaaaatggattcccaggcctcacccccagatactgagattctgttggactgaggttggctcagggttcccagccaaatgattccatgtaaaatgtggaaggtccaaactctaagaatccagtcttagacagcaccaacccattgagtccctgcatattctgtcacaggtaagctctttcttgccttagggatttaagctgcagatggaaaatactaattgctgatttaccaacccatagacatactgccctccataatatttaatatgtaacttggaaaaacgaaacaattctgtagaaaacctctgatgtgaattacatcacactaacaatgaaaggggcccaggccttagcaaagcataattgcccatcctgctttcacttctcaggcccgctcccttccatgcgatgcagcttgctgctccgtaactgatctaaggctttgtgacagctcctctgttttaagcaacagtaaattcaccccacaaagtcagaaagggagcttgttgatggctgctgtcaattttattgctttaacctgtttactaggatagactctgtaacatggtgtgtttattggttttatgtattgcatgttgttgctgctctgacaagctactcctataaaaatgtgttattattgcacgatgtagctcagtgagctgaccctgcatttcaaagggtactggagcaaatagcactgaagtccataaaagctgactggcctccatcacagaggactctctgcatgagctgcaactcctacaacccaggagagaattacacctttccctgtgccagcagccactgcttagtacagcacagcccttgaacacaggcaatatctgtaaaattccaagacagaaaactgtcgtgccattcttatttgtccaactctccaatcagtgtagtttgcaattttgatgtttataaaagtatgaaacaaa

SEQ ID NO: 1616 - DNA, 92 bp, Homo sapiens
ggatcgatgatgacttccatatatacattccttggaaagctgaacaaaatgagtgaaaactctatactgtcatcctcgtcgaactgaggtcc

SEQ ID NO: 1617 - DNA, 1544 bp, Homo sapiens
atcttggactcggttcgaccaggtctggtgaccggcgacgaggggccgggctcggcgccgggggtcggggaaagaagaactaggtctggcagtagatcagaatctacctgttggggaaaaccagaaataggaagaagagttattaatggttcattcttggctgagaagaattcagtatggaataattaagaactactatcaatgccttttacaaaatgaggtcattggattgcagagttggctttcgagaagattttgtggcctttctcagctgtctaggtgctgtaggtgctgtgtttctatggctgcaaggatgaagattatgatatggatggatgatggaaggaaggatctatgaatataatatttgagtttcagttactggcctttacttcttccagaaagtcaggccaaaagaacaaagtcctagaaggtcttctggtgagtcacattctgagcagcaaaactggcattgaggcataattaacattcagattgcccccagtttctatggagatgagtctagcccctcgggggagtagtgatggatgtgtaatctccaagataagtaactgacaggctgtattctaggaactcaaaatgaaagaaaaataggatatgtttcttactttagagaccacagaaactagtctcctatattggaccttcttggtaagagccccatcccttcaaaggccacatgaatctgaaggccaatattcaagtcctatgctgttattatcaacttggatgcagcgagtcatctgacctgacctgtggacacagcctctgcatctgttgagaggattaaagaagtctaattcacagttactgcaagtataatggagctgagaggatggtgtgagcaatagcaccaatgtaagagttatcatagattaacacactactggttctgatgcagcacataaggcaagtaccatgggaatgcagaggagaaagaaattagggagatcaacaaggtttcacaaagcagctatggtgaacttggccttgagagtagggttttcctggtgaagaaaaacattctaggcagaagaaatagcatacacaaagactcagaggcaccaaagagtcctgtgtgtgtggtgaataatgaacagaaattgccatagattaggtgggaagtcattggtgttaatttataggtttgatagaagccaattcttgaagggttttgtatgccacagtaaaggacagagttttatttaaggagccactgaaaagcttcattcattctacaaataactttttcggtgagccagtatgtgccaagcatggttgtaagtacttgtaatacatcagaataataataaaaagagtattcatgtacccaccacccaatttaaaaactaagaaattgtcaatccttatgtaagtctctgtgtttcccttgtcaatggaatccttctccttgctccccaaaagtaacccaaacgctaagttttgtgtttgtcattttcttgtttttcatttcagttttactcatatgtgaggaaaggggcttaagaaatatttgctcaatt

SEQ ID NO: 1618 - DNA, 3481 bp, Homo sapiens
cttaagtacccagattttcttatgcaggaaagaaacatgaagtaagatttaagccttgaaagtatcataaatatatcattcttcaaattgattgtgatgaaaggaaataggattctttctccttagaattttcactgatctataatgggatcaaaaaagtagaaaaatcagtctgcagaatgaaaacagattaatgaaatagctagaaaggaggggagagcatttgtttagttaaatgttaaggtaacttgaaaattgtctatgaaatgctaaaactgtaccagagccttattgcacactcaacattttaagcctgggagcaggggaaggtgggaaaaggttggagtgatagaagtgtttgccttatgatctcttgactccttttacacaagaagcagattggtagagcttaagcaggtgtctgtgctgtggtgctggctctgccaaaaactctcatatgccctaggaaagttcctttaacttctctgagcccgagtttatctgtaaagtgaagactttttaaatttagtaatctgtatgtctcatctctgagaattctataatgttttcacattgttatatgtgtatatgtacatgttgctcccctctagtcactaagatgccacatatttctacttgagtgaacagattgcaagtccaaatgttcttgtttctaatactaataattgatctcagcaagacataaaaaagtaaaaaaaaaagtaatcttaccttttattttgaccttggctttaaattattatgatttatcatttcatctttgaatgctgagtgaattacctaaacagaatgtctgttccagttaatcttctctttaaatttttgtagtttaataaacatgtaacaaatcagaagcaagtatatcatgcttatcgatgaactgtagcagattgtaatggtgcatttttgtcacattaaaaagttaatgtccttttggtcccagaagcaattactataatttaaaataatattcacaaaattttgtgaatgtttttgaatacaaaggaggcctaatacagccatattgtagttcattttgctcaggagtgagaaacaaaattcagggataacccaaacatgtctgtttggcaatagtggatagttaggtaaagaagggttatagcttttgcacatcacagataagaggcgactatacctattgaaaaacagcagtatattctggttcttggttttatgatggaaagatattagaatgatactaaaatttggatgcttgggaaattgaataatacagaaatattttgtcatactgagattatttgtccagaagtttagtcttatatcccttccattcagaaaagggggcagtttttaaaggcctctgtcataaaaggaaatgtatattttgactagtggagcaattagttaaaacatttaatctgatcattttggttttatgaatctgaattttcactttaggtgtaattgagtcgcttatgtattactgtgatctttgtgagaagtgatttcgtccatttttttaaatctgatgaaacttgataaatggtgattctagcatattgtgttaatactgtatcttacaacaatttgtgaactgaccatcataaacgaatcatagtagtatctcttctggtaagttgtttctatatgtgatctcttaatgctgggtttgggggtggggatggggttaagtatttagtttactttaaactgtcaaagtgtttttcttaaatgccataaaattgtatgactataagccaaataagaatattctcttttttcacttttaagggcactgtatagaccatttttgaaactatcccacagaatggtataatttcagtttaaaagctcttacacacatacacacacacaaatataaatatatatatatacacattcaagggaaagcaaacagtgtatgtagtatttctaagtgacatgctacacgttataagaatctatttttgaaatcttatacagattatgcagaagtcagaataacaaatacaacacctcaatttttttatagagtctagcgttagtttactataagatttgcttacatcatacttgcaaagatcattcacataatttatttagcattgaaaatctttatatgaagtactaatgtcatctgaagtttagagattaaacaaccaaggtttagaaagatcaaatgactagtccaagataatatggccaataaatggctctaaacctcctatgttctttatactattcactttttgtcatgttatttttatcctgtcactgccattatctttaaaactttgacaaaaatttaattttaaaagttacattgggaattttcagattttagtgcaaagacattgttgctgttcttgtcagaccttttcagatacctccagactatagcccttccacagggtgatattcaaacattttccacctaaacatataagtttgcacaccctgaccacagacactgaattcacttgatgtcagaatgctagactaaaagttgatcttcttgactgacatttctaatctccctttttaaaaatccatcataaggactgacttctgaacagttgaataaagcagtaatcaatccaagaaactgcatccattctgattcagaggaaaaaaaaatccaacctagtgaccatttttcagcatactgtatttcatcacatttattctgtgattagtggaggacagagaagagggactggggagaaaaactgcctttattttaagaaagctcattttcctgtaactattcaaaaagaattgattatcaagtgttagataacaatattactaacatttatcatcattcaaatatttagtaaaatttctccatatatttaaaattttacttaagaattttcccagttaaaatatgactgcttagtttgaataaggaagacattcctttcaattcatgacacaatagtacatttttattcttttctcagacagcagagagacactgttactgctttcccttgtaagtcaacagtctgtgatacatgctgtacttttactgattagcaatgcaatgttactgtgaatatttaactagaacttattatattggaatttaaaattttctaacattgaatttagttctcttcatcaaataagcaagcattatttttatgaaatgaaataatcattcttaagcagtgatgataatggaattctgaatacgatgtaaaatcaaacattctattttttctgtttatcctttgacattgagttgttttaatttattacatattattaagttgaaataagctttataccatgttctctgatgttcttgtcataataattttgggtcttttgttaagtaaatatcagaaaatatctgtgagttttgattatgtgatattttcatctgattgattttttaaatttctcattggatttaaagtgttttctttgctaatgttatatacagaattcaataaaagaccaaaaaaaa

SEQ ID NO: 1619 - DNA, 773 bp, Homo sapiens
tgaggatgaggaacatggtgttgcagttcaaaccagttccagccaaaatggactctagtcacaaacaaatagtaataacaatccaaacttgtggctgaatagagttctgaagttttgagaaagaggtaaagatatgaaatagttgtctaggagcaggcaaaaaaatggcttagagaaattacaattgctacttagcactaaggggccacttgagattagaggtgatacatgaagagtgagatttgaactgagttttaaagaatgttaagaacttggatggagcaacaagggagagaactttagacaaagatgatctgtagacccaaggcctgacattctcatcattattgtttgccttagtctgtgtatcctctaaaagcccaaggcgagcatttatttggaaggggatttcagggaacacaagtgaggaagtgattcagctcaaaagttttgtttagaatctacttcctagtacccaccagcttaggctgagtttcccagaatcagatctgtgttggagatttgtgtgtatgatgtttattggggagcttccccagaaacaacacctttaagtacaggaaacaattgaacagggacaaaaatcctacagtgataaaattataacagaagtcgtaggtaatcctttggggctctctggagctaaaacagcttttccaaattgtctataaattgatgcaagaggaacacatcttcatacttcacgttaaacagtcactgggcacaggctaccctaggagaaagcttgtaaactt

SEQ ID NO: 1620 - DNA, 539 bp, Homo sapiens
accacgcctcagggcatgctcttgcttcctcctgagggagaagtcttctatgtattcctgcaggattttagacatggattcatcaatgcgcagttgcagtactgtacatgggagaagtcaggagtgatagttgagctaagagatagagacatccgtagagggattctttctgttgcaagtaatgaaaactcaactaaaaatggcttaagagaaagaaaaggaagatattgattcataatactggaaagtccagggccacagtgccttcaggggctactggaggctgtgcttcttgaatgagaggacaagccaagaaagaacatatgggacacaacaggtgcagaaggaaacaagtccagcctgaagaagtgggacaccaggactccagggagagacacactgagggcttccatcaccaccatccccactgccatcatgctaacttttaaatcaaggactcaatacccagagtctggcccagatttttcctttgtactttctttattttgaccacatgctgataaagttcctgctcattc

SEQ ID NO: 1621 - DNA, 507 bp, Homo sapiens
atgctttattttatgcttaaaataaaacatatcacatagtagcattgtaacttttattttaataatgatgatgtgagattgggtttatttccacaaatatcctgatattttcattcacctaaaaaattccaaaacatttcagttttagataaagcaatgttataagttttcatcacccagcaggtctatgtattatgaatacattgagcaatgacccaaccctcagctttgttggaatggcacttgtctcatgagtaggcattattttgaattttcccgaaaattttatttgcatgtcccttttaattttttttcttttttctttttcctgttttttgagatggagtctctctctgtcacccaggctggagtgcaatggtgtgatctcagctcactgcaacctctgcctcccgaatctcctgcctcagctggattacagcatagatgctggctcctagggtgggcagattctggtcctgcaccaaccctgactggtgaccttcttgt

SEQ ID NO: 1622 - DNA, 3827 bp, Homo sapiens
ttggcataaaagatatattagggaggaagcctgaagtagggagatgaaaataaggagccatcaaaggcagaatgaaacttaggcagatttcaagtgattttcaaaaatgttgtgatcagaggtaccagataataactattacataacactttctttgttaggagcttatttctcacactgaccaaagcttttgaagtaagtactctttacaccactatataaataaaccttacaaaggattctgctttgaggcatgagagagttaagtcatttgcccaaagtcacagagttagaaagtaatagagctaagatttgaacctaggcagtttggctccagagtctgtgctcttacgctatattaccaccaagaggtcaaataaataccaaagaatgtattttcaaatttaacaatgaggaacttaatcatacaggcagaagtaattccagagcactggagacagaagccagattgccatatgggttaaagagtgtgtaaaccactaggaagtaaagacatagaactactctcacaagtgcttttctggttattgtgacgctgaacttcatggcttgttttaattaagacatcttacaagtgtcaaaatttggaaatatttggacactgtacactctggttatttaaatatctaacaatggttcttgagcattttgagaaacctttgaaaatctgatgaaaggtatgtgccattactctagaaaaatgttcctgtgtacatgcacatcaagtatcacatactgtttcaggctgttcaaagactacaaagtctgttcatgacctaatggtccatgttccctcagttaagagctccagagataaaggatgtggaactcaaaggtaagtacccagagccttgaaaactccatttgtgacttggaagaattctacaatttgaattaactttgtggagagagatatatttttgaaaaattgtgtgtaccaaaaaaatttcatatcaaataatattttcctgtagtgcattcaaggatctggttccacagcaaaaaattgttttggtctcagttcctcaaaatcacatttaaggagcttgagatttatattttctacttaataagtcttacaaaagcaagttaagaaggaaaatggacaatcatttctgcacatatagggtttaataaaacatgtataataaaatatctcatattttaaatttccaccttattggtagctttcatgacaaagggctagggtgctgatggccatacaattaaggtttttggttagttagttagcagaactaactgactcctacctggtgggtttttcttttgtttgtttgtttggttggttggttttttctcagatggctcaggaggaaggtaaatagcagtcattgtatgtgtgacagagtttgagatagaatgagcatattgaatctcacatcctattcttattactgtcaggcagcgttgacctagcagtataaaactatctgaagcaatgtagtcactcagttctcataaagtttatttcaagtactgtaacaattcatgtttggattagaaaagtcactagaaatttgacttccatatagtaatctatacttttttctctcatttccttcattttttgagccgtaagtgtaaggcattttgctggtattattacaatggttatgaggagtttctttgcttgcccaaggtcacatagctagcaagttaaagtagattcaaatccaggcctgctagataccaaattattatttaagagtacttttcactactcctaaataatgacacagatatgtttgtcttacacatttcactttattgtcaagttattagtatgtttattttcaaaaggtattttttgcaatttctttttattattccgtactttttaaatttacttcattatcacgtcttcctttattctttttaaatagtttttgcttttgttattttgttttcccttttttactcttggtttgtaatacctctttccttatttgctcctttctcatttgatctcaatgttaatccaactgttttccacatctgattcactaaaattttagcccttaaaaaaaaaattcctgtttttcctatctccttttgcccattctcttctccttgcctcacttcttttatctttttccattttactttcattttttgtttctctagatgttgttttgacatatgagttaatgtactggtacaattttgcatctgtaaattagagcttcagaatcaactgagtgtatttattctttatttttaggcctaaatttatcttaccttttattgattttataatatactatactctttcattttagtctgcatatgttagccaaagaagatatgcccctgttttaagaaatctctgtaaaaaatgtcaagtgtgacaagaattcttcaagaaacaagctcctctagtttgtcttctatatttagagcttcaacagttacctatattactggtaactcccaaatataccttcaaacttgttttttgggcccaagttttttgcttcatatatatctgttttgaatatcccataaataattgcatctaaagcatacctccactccattgttctcaaagataaaaccaaacctgtgctgcttcttatatttctagtatttaagcgtcacctgccacccctttacctgagctacaagtcacgcattgcattagactcctctgctttcttctttcacctctaactagactattaaccaaaaatttttaaatatataactttcaaaaggtggggttttattacatcatttccatcctttatgtttgggttcaagccctcattaactttaacatggattcttggagtaccctccttactgattttgttacacgtgtccctcttttagtcagtactaccatgataataccatggataataattttttcatttttatttttagtcttgctctgtcgcccaggctagagtgcagtggcgcgatctcagctcactgcaacctccacctcccgggttcaagtgattctcctgcctcagcctactgagtagctgggattacaggcacctgccacagctcctggctaatttttgtatttttagtagagatggagtttcaccgtcttgaactcctgacctcatgatccaccctcctcggcctcccaaagtgctgggattacaggcatgggccactgcgcccggccaataatttttgtgtgtgtgtgtgctaatcatactacattttctttagaataaaagatcacatacttgtttgccattcgcagtctggccccattgtgccattctagacttacctcctgccactccccaccagctttgttttgtcttagccacacaaaataatctagcgtctctaaccagtcaaacattttaccttgtgccttggctcactctgtgccttttctccagaatatctttctgtgtacttttctcccatccttttacctttaaacctgctgctatggtttgcatgttgtttggcccctccaaaactcatgttgtagttcaattgccaatgtaatagtgttgggagatggtacttttaagaggtaattaggttgctaagatggattaacatctttctcttgacactgagactgggttctcctgggaatggttagttcccaagagagtgagttgttataaaacaatgctgcctcttctattttgcgctttttgtttgcacaaactcggtccccttctgtttctctacgatgttttgatgcagcatgaggcagtcatgagaacccaccagatacagctgcctgatcctgaatttcccagccaacagaaccaagtgctaaataaaactctttttaataagtt

SEQ ID NO: 1623 - DNA, 433 bp, Homo sapiens
ttcaataaataattgttaaaattagaacaacgtgattgcgaggtgagatgttaaattgacatcttgaaaagcagaaacttagtatgggcatccaaacactagaatcagcaccggattacgaaacttccaagaaatgtaacgactgaaagtaatggacgagcctattgttctgtgcgagaaaggcgcaaggggagaagaaaagacacacacaccatacttttaaggactgtggaggattcaccaccacaccgggaagcaacagcctgggctccagagtcggacactacactcaccagactacagaggattctcatgaagtttcctcatggtctgggaccctagctcttatcgtaacaagttgtttggcatgagacccagtcacaagggcccttcccgactggactcaaggaacacaaaaaggtcaacttgtgtt

SEQ ID NO: 1624 - DNA, 3175 bp, Homo sapiens
ctagcatggcagcttccccctcctcgatgaagcccagcacctgggtctggaagccctgcagggcggccgcagcatctgcaaacagccggctcaccctctcccgctctgctacggctgcactctgcacaggacgacagtagagggggcaatgagggcaaagaaccgtcccggactgtacccccctccttccctgaccccggcttcccaccggccctcttgaggggacagaggggccagactgagcctgtcctggatctgggccaggtcaggggacacttgtgctcagtaggtatgggcatggtttgtttggagtggattgttccatgctgagggaggggtgtttgaccttgatgagggccactgtgcgcctggactgtgcaatgccagcacccagctcgtccatgcggtcctccacggcgctcaggactttggactgctcagcctgtggacaacaccctccatgagtgtgaggtctggcagaggccacagccctacactcgggtcccaggccttgccaggggagagaagggggtgactggggagtggtatctgtgcatcaggtgggactggagtggccacgatgtcccataatatgccagaggtgcctgcagcccaggctggtgcctttcctgaacgcctggggggcgtgcaggctgactgggtgtctgcctcgggtctctgacaggaggcctagtacagggccgtccgctggtctcagtgttgctcagatgaatttgagaacttcctccggcggggaagaggcagagagtaagccagttaggttgggaggtgggcggcggaggggtgactgcacaaggaggcattaagctgtcctgaggatcactgttcccaaagagcctgcatccacagtccaggcctggaaaaaaggggattccgggcaaatcccctaggtcttatgagtcactgctccaggcaggagaaacggaaaatcccttggccagaggcgccaagaccgggctggaggccaaaggaaactgggggcgggaggtagaggccgcggctcacatgctcccaccactggcccccggaacagctggacagagaatctgtgtgcccggtcgccctctgccgccctcctgccgcctgccacacccatcgaaagctgctgcctcagcccagggcaaatctgagctgagaccggcgtgaccctccgggcgggagcagcagccacgctaccggaaccccgcgggcctaacccggctccctcccgcctacacccccatagaccccggcccggcttcaggtcccctgcccgctcttcgcgtccttgtcctgttctcacgtccctccttcctcccttcccatctccatcaccgccagcagatgaccttgtcaaggctggaagggaccgcaaagatcctcaggttagaggaggagattaagacccaacccgggaagactggggggtccaaggtcctcggcccgctcgcgcgcggtcggtcaccagccccggctcacccgagtgtgcccccggagcccacctcctgaagcgcgcgctcctgctccagcggcaccagctcgtggccgcggtgctcctgtgcggcgcaggcctcgcacagacacacgcgctccgcgcggcagtagcgctcgagcggccgtaggtggcgcgggcacaggctctcctctagccggcgcagcggcggcaccaggcggtgtccgcggagggcggggctgcgctcgtgcgggcccaggtgcgcggggcaaaaggaggcgaggcaggagaggcaggacagcgcggcgggcagggccgcgccctcggggcacgcgtcgcagcgcactggctcttcgcccgcgggccacggctcgggagcgcagggggccgacggctccgggacactgggcagcgcgctgggtgccgagggctccggggccagggcaggggccgggccggggccggacccggggcccgagccctggcggagctgcagcagctcggacagcgtgtggttcttgcggagctgaaggccgtcggggaagggctcctggcacagcgggcagcgggccgcgcctccgggtccgccggctccactcgcgccacgatgcggccagagcgcgcccaggcaggcgagacagaagttgtggccgcagggcagcgtcaccggctcccggagtggctctaggcagatggggcagctgaagggtccactgccgtccatgactccgcggccgcccagggcgccgccgattgtgctccggcctgggagggacccgggccgttcgcgccgcggcacctccccctgggacctaggccagggctccggcccccgcccgcccccagctcggcccgccccgcagcaccgcccgcctgcgggcccgcggactcccagtccccgcccagacaacgcagggaggcctccgagcccgcgcgacccccaggggagtccgcgtggtcctaaggaagggcgctgctgaaagggtgtgaaactgagtgagcgcgggcggagaacgcgagaggtacagtggaaggaatgggaaggactcagcctccatccctctggtccttctgggccaggccagcgctccgcaggggctgggcgcgtctagctgtgtcatgcctgcacctttgcgctcgacccctccctggcacccttagcaaagttcctgagctgctgactgcagagaaaaataactgctgatgtacatatgtttttgccccttagcgactctttttttttttttttttgagacagagttcctctcttgtcgcccaggctggagtgcaggggcgctatctcggctcactgcaacctccgcctcccggattcaagtgattctcctgccttagcctcccaagtagctggaattataggcgcttgccaccacaccaggcaaatttttgtatttttttgtagagacggagtttcaccttgtccaggctggtcttgaactcgtgacctcaggtgatccacctgcctcggcctcccaaagtgctgggattacaggcgtgagccacagcgcccagctcctttagcgactctttaccccaagtagggaacttggacttttctagacctgaaatgggaagttgacgtcattccctaagtcccttgtctgaggaatgtagttctggcccctggacactggggacacctgtggtggggttgggggttccccaactggaagtatttaaagctcatctaattatgcacttaaa

SEQ ID NO: 1625 - DNA, 996 bp, Homo sapiens
ggcggtgcggcggtagcgcagggccctcctgcggggccaggcaggggcgggtgggcgctccttgccacctttctgctctccctgctgtccgagaagttcgtgcggtgccagcccagctcccagctggggacagaacaggaaacgtccccggcgagcctggcgggggtggcggcaggggtgtctgtcgcctgcgctgggcaggacgcgcgtcctaccggcctcccactccgcgggcctcaccagccacctcattcccggagcccgggccgccgagagcgccgcggatggacctcagggaaggcctggcgcgccgcctccgggaagccttccggccttctccctccaccgagtactggggagtctcaggccacggtgaatgaagagcaacgggccggagagacctcggcctctgcccaggagcagcgcccagcaaccccgcccacaggggacccggtggacgccctggtggccactttgccaggctccccatctcccagcgaaccagagaggatttccgttcccctcctgcttggtgcctagcgccagggcggggcgtgggctgagcagcccctcccatggagggagcggccagtctacatattggaggtggggctctggggaaagggtgttgttaggaaggcggtttgaggcagcgggaggtggggatgcgcccggcggggaggggcaggtgtgtggggagggcctggggagcgcctccccagccgggcagcgcttccccagccaggccccgcagctggaccccggctccgtccagcctgggaaaggactccacggtttatgctgaagtggtggtggggtgggtgaacgctgcgcaatggaagggcatggccctgtgctaattgccccggggtgtggggctgtggaggcactgcgggggggatgtgctgtgtcagttgggcaatggcggccaactgtggcgtgcaggccttggagctgcccctccatggagctttaataaaggcactagccctgcaa

SEQ ID NO: 1626 - DNA, 655 bp, Homo sapiens
gcagattcttggcagacctctgttgtttttctagagttgtaggcaagtagttggacaaaaagcaagaagctgatcgatgttgctggctttggattctttgtgaacaaatgagacaaggctgcaaattcagaggatcctcccagaagataagatggagcaggtcaccaccttcttccctgcttcacaccctcaggccccgactcttgtctgctgagatcactctccaaaccaatcttcccttacaaagcccttgttgcaggctatgctttctgaggggaacccaggccaagacactaaaatgacacaccaacatgaagacatgaacacaattgcaaagggattggttggattgcatatctctgtgaatgggactcaagagaagtttgggaaatgctggaccagatgacccttgcaatcatggtgcacagaattaaaaccgtcaagttccccatccatctctgagatggatgagaatctgagtcttccacaagatgcccaagacttgttaaacccgtggaatgtctttgggtatgtgtgacatcaacaagaagcagcagacaaaacaaaatattttcacaaacattcagaaatccctaaatcttgtgagttgtcgtatcatttgtagatataattataaaatggcacatgatgctga

SEQ ID NO: 1627 - DNA, 738 bp, Homo sapiens
agcggttggagcaggggctctgctgcgacctttacggtagtgaggttagggacgatgggagagcagctttgttcctgaagtgccgtcgaggattaggatcgagtttcttcgatcgtgagggcaattattagtggcctctagccccccagatggcatcttgaggagagagaatccacgctacgagaactaacatagtggacatcgcagttgtccgtagccgatttgcgggttacggagttgttgcaagtaaagaaggggaaatccgagcgttctcgcgttggatttcctccacgtgtgaagtgggaatggtagtgatatctcgtgctatctctgtcaagggcaagaaggagaaggaatttatttgaggccctacgacgtggtaggttcaccctcagcctttgttcttatttcatcttatttgtggagaaggtcttttcgttcctattttacaggtgcggtggctcacgcctgtaatcccaacactttgggaggccgaggcaggcggatcatctgagatcgagagttcgagaccagcttgaccaacatggagaaaccccgtctctactaaaagtacaaaattagccaggcatggtggcacatgcccgtaatcccagctactcgggaggctgaggcaggagagtagcttgagcccaggaggcggaggttgtggtgagccgagatcgcgccattgcacagcctgggcaacgagcgaaactccatctcaaaaaaataaataaa

SEQ ID NO: 1628 - DNA, 302 bp, Homo sapiens
ctttcccgcgcgaccggcgagggaggaagaagcgcgaagagccgttagtcatgccggtgtggtggcggcggcggagactgcgggcccgtagctgggctctgcgagcatataggttgctgtagatgaatgttcttagctgtcatgtttaaaaatacttctgcttcgttacctcaagtgtggcatgcagcattttggaaggaaaattgaagacgtgttcaagaaaacatgaacagaagcaaatgatgaaaatgagcattttacttgatgttgataacatcacaataaattatggagaaaaatac

SEQ ID NO: 1629 - DNA, 423 bp, Homo sapiens
ctttggaaaacaaatcgggtcctaggaatgaaggaaaacaggcaataaggcaagaatcgctgtcgaaggagtctgcgccacctgctcgcacagctcacttgtgccttctgagcctgctggagcccagtgtacatatgccgtctccgcgtgattagagattgctgctgcacgtgcccaatcccgtggcggggctggaacacaaacggggtggtgttccagctgcaaccatgcagatgaagactataccctaggagatggaggaacaacagacaagaaagaaacctgggttcctgaataaccacgtggagccaagcagcttacttatctcaagccactgttgcccacctccagattgaactgtctgcaaacaaatctttacttgatgagaagtttaaatataattaaatctagaatattacatga

SEQ ID NO: 1630 - DNA, 488 bp, Homo sapiens
aggattctcctgcctcagcctcccaagtagctgggattacagtttccatcattatcttctatggagttcttcattcccacatctgtggaccttaaaatcctaccgttgagtgcctgccttggatcagcagtcagttcgttaccttggttctcagacgatgcttgcaacaacgccatgcgattcgcccactcttggagaaaataagagaagtatccctgaaggatgaaatatcctcgaatatgaaaaggtctgctctctgaagaccaactgtctcagtctgctttttgctgctgtaacagaataccacagacttgtaggcagagaagccttcagagaaggatcctgactcggtggtttgtgcagtgacatttggcagtgttttctcggcaagcgagtctttgaggctgccctcatgctgctcagtgggcacaccaagaacaagagctggccagggatgacggacgcatctaggccttctcggcctaagg

SEQ ID NO: 1631 - DNA, 387 bp, Homo sapiens
tctcaaaaggccacatgtagaatattcaaaaagtgttgaagtttcaaaaatcttctaatattttaaatgcctaatagacataaaacaaaagaccaaactctcctgcctgctcagcagtacatatggcttttgaatagccacactcaaatgacagcccctgttccccagttcaaactttctgagactgcaagcctactttgcaagaggaaaatctccacagctatgtcatctacctgcttatagggtgtaaaattcaatctatgactaacaaatcaatattgtaaattatattacttggatactcatttgtcttacatttatttatttagcctgctctgtgggtcaaataagaggagaatcttaataaacagtcttactactattgaa

SEQ ID NO: 1632 - DNA, 2050 bp, Homo sapiens
tgatgattgaagtatgtttattgtaagggcagaaatgtgttggcatttggataaaaaactgctaacattatagaacttattacctaacaaaatttcacaccacaaaaaatattttaatggcaaattcaaggtgttttattgcttacaaatcagcatctttgactctttgaacatcaatttgtgtttacattgaaatgacaaaaagacaaactaagaagaaatacagcatgcaagttggaattcagagttaaaaccatgatgttgccgctcagccagctatgtgactgttgaccctttcaagaacacacatggatttaaaagttggatgacatccattgttggggccttgggggatatggtaaagcatgaaaactaaacagccaggagcctgtgaaatctgctactgtattttccaggacttcattccactccttggctaaaaaaatcttggaagtttcacagattatgatgtggacctgtcacctgtaaattgtctcaatctactcagacaagacactaaactgtctttggatactatagatgtcagtgcttatagcagctggaatttggctagtgacaatgtttaaagatgtaatactagttagtatctattgaagcttaaactttgctggtcaggttgtagctattgtaaaagtatttattgaagaagctcacagtccttcagttgtacagactgaaaaactttcatgaaagatccaacatactaatgtaaattatatttattacaatgtatgatattaatgtgtcaaactggtgtattttacaaaatatataatgcatacataaataagagttgtatattacagtgcttttcaaatatcagtgtcttggaatatttaagtcttcacattttttggtctaaaatatgaaaatgtttcatgatacaagtgattaattttccctagtagtgcttttgcatgtttgcctttttatttaagtttttttctatatagacacaatttggtgtcagactatcataagatcgatagtgaatataaaatatcttagccaaatggggtctgtattgtctacattttatatattaaataaaagtttttgttgtcttttcaggaggtttagagtattgtcactaaatatgatcaaagcttccctttccaaatgcaaaagtcttgtcctacatttaaagttgatctgtcatgttttagcagtcaagtgggatgggcattatataaacaacgttacaatgtaaggaaaatctttaaggagatggggagagaaaaaggcagctggtataatcggttactgctgcttagttctacttaattttttgtgttgcttcttcttaaggtgagatagcataatcttaactgttttgagatggaattttaaagtaacacactaccagcgagttcaacactgctattgattttaatctgtttttttttgtttagttgataacttaaattccaagtttcatagtgataattgtatattatttggctgctgaattctgttagagttttttattctgttgtacattgtattatacacataatcacaaattaatatgaaggtgaatatatgttacatatcaaaatttgtgaatttgaattatagtatgttttagtgctattgcaaaaaatgtttatttttatattatctgtgattttaatatagatgattgaactagatttctttttgagtgatagtgccattgaatgagcagtatggaaacagtgttacttgatattttgagctttctcaggtttatctaaatcagtggtagcttaacaaaacccagactaattgtgtgtaattgtatttttaataaaaggaaagtacatttcctataatagcatagtactgtttgcatgtaagagtatgcaaaaccttgtgtgtgtgtgtgtgtgtgtgtgtgtgtgtgtgtcttagtgtgtgtaaggcatggcagccaactttgtatctgctatttttagtacgagcagagcttcataattgtggtcactagaactgtacttaccatggacagttaaaactgaaaaagactcaataaaactatgaaacatgg

SEQ ID NO: 1633 - DNA, 438 bp, Homo sapiens
tgggcctgggaggggtggtggccattttttgtctaaccctaactgagaagggcgtaggcgccgtgcttttgctccccgcgcgctgtttttctcgctgactttcagcgggcggaaaagcctcggcctgccgccttccaccgttcattctagagcaaacaaaaaatgtcagctgctggcccgttcgcccctcccggggacctgcggcgggtcgcctgcccagcccccgaaccccgcctggaggccgcggtcggcccggggcttctccggaggcacccactgccaccgcgaagagttgggctctgtcagccgcgggtctctcgggggcgagggcgaggttcaggcctttcaggccgcaggaagaggaacggagcgagtccccgcgcgcggcgcgattccctgagctgtgggacgtgcacccaggactcggctcacacatgc

SEQ ID NO: 1634 - DNA, 663 bp, Homo sapiens
gtgaaaaaaggacagaagcaaaggctacacaaaacaaagccagacctggagatcattttcaaactcttccctcctcacccaaaatacatgaaaagcccttctgtaaagcaactgatgtcttcaacttactatgaaacggagatgaataactcagcttgatgaaggaaccctcatgtccactcaattaatgattgggcacctaccctgggtcagagggcttttggaggtacagagttcctggccttgacgaaggtaaagaaagagacatgtcctatgctgaccttttggataatagagcatggcaaattggagtcttcaattaagcacacggaatacatgtgctgaattgctttctttgcaaggttcagagtcagaattcctgccctgggttctgagttgctgagtggagacgatgatggagagcagtggagacacgtgattttcagggtgctctttgcatgcatgaaatggagcaagacttatgaagggaaaatgaaagaggaggataggaagatacgtcacctcctgggtttcctccaatcatccagtcctcatctctctatatgtctttgaacactctgagcgccatcatgccaattccatggatgaaacaaatacccatgactcagcatttttctaatgaaaacacgtgcggtctgaccc

SEQ ID NO: 1635 - DNA, 478 bp, Homo sapiens
gtccacatcacatggtacaagaattgtaggtaaagagatttctcctgaagttggcagactcagaccaaccatgggaaagatctgactttgggaaagatatggaagtatgacactctgtggaaatcaggcagaatatgcctagtagccagtctccaaagtggctctgtgattcctgtctcccggtgttcacagcctggtttagaccctttccacattgtaccagaacactcatcctggaagaagccagctaccatgacttgaggacacttagccccaaggaaaagccattagcaaggaactgagacttcccgtcaacagccatgtgagtgggccttcctggaaattgatcctgcagtttcagtcaaggcttcagatgatgcaacccagatgctgaaccagaaacacccagtgaaaccacgcctagattcctgactctcagaaactgtgggagaataaatgtttgttttaagccactaaa

SEQ ID NO: 1636 - DNA, 584 bp, Homo sapiens
agactgcattttgccttgcttttccttctccctttctctctctttctttctttctttctttctttctttctttctttctttctttctttctttctttctttctttctttctttttctttctctctctctctctctttctttctttcctttcttttctttctttcctctttctctttccttctttctttttttcttctttctttccttccttccttccatctttcttttctttctttccattttttttttcctccagaagaatggaaacagtattcttttccgatcagttcagtaatacaatgtccttcagtgtccatatgagcatttcagtggagaagaaaagaaactttgctacctgggaactgaagactacttagtgaagatcccggtgttacacatccaatcgttcacctccttccaagactatgacattccaggaaaccttcactgctaagaggaactaagatctagagtatctcctcgaggaagtacaactgtctgttttcactaaggtggggagcagtatgtgtccagagctctagagggaccgaaaggccaagtgtccacggtggcaagagaatcca

SEQ ID NO: 1637 - DNA, 1710 bp, Homo sapiens
tgtggttttaaatgtcatgtgagctgagttactgacctcaacctactgccagatgaaggtgtgatcctgtgataccaatcttgagggtcccttctagttttagcagtcagtgacttctcttgtttatttttgtttgaaaaagtaaaaggctctctttttggctatagagttgcatcttgaaatttttgacaaattacatagagctgaagaaggatacaagttttgatatcttaaaatcacagggttgaagcttgaaaggacagtattggcattgcagctaagtgggagtgtgaggaagcgccttctctagggcaggtaattgcatctgttaatgtggtccttgggcccctgagttgctgccttccaatcagaattcccttagcattagccagtgacgcctgaattaatctcaggtaggacttctaacttttttccaaaattatttttgtgcagaggtttatctagatttttcttctaaatgtcctcctccccacttgttttattattactgtttttttctctctttaatttttttttttttttaatagagacatggtctcactatgttgcctgggctgatctcagactcctgggctcaagtgatcctcctgcctcagcttcccaaagtgctgggattataggcgtgagccattgcgcctggctctgttactgtttttctaacctgagttacttaggatcatattttcattcttttttaaaaagatgggagttttctgaacttttccttaactaaaaagtggaatgcatcttaatattttcctttttttacttgtgtttctccccagggagggaaaaacatatttattgtgacagaatttagcatattttaggccacattaaaatactgataaatgtattaatcagtgaaaataggttatagtgaaaaatatataccatttgattaataaaaatgttattggaaaaatgcaagaactgctgtaagaattgctaacattgtgttggaaaataaatatactaagctaagaaacaatgggaaactgtcatatgtagggccaacagcctttttttttttaaacccttccaatttattaatatctagtctaataaaccctgatttataggacctctgcaccttttttgactttttattcatccattcttaatattctacactatgacaaaatccttaaaactccattattgatgaaatgggaacagacttttgtttttgtatgttggtgttctctgagtggtgaaggcccagggagaatgttttgtttggtggtcacttagcatttgaaaacatccacttccttgtgacttagctgggtatcttttaacatctggaagccacgtccctgattgaaatctctggagacaacttacctttcaccaacttgtctgccaaattgcaccatggaccaagattgcagtggctgcatcaagtctaggcctgccctgaagtctggatttgtaagtcccccatttcaaatggggcagaaggcagaggagcagaggagccactgtgcctttcgctgtcctggagccagttggccttctggttttggtgaaccctgcttttataagaggactccctggcatcttccagtttcccgctacttgttttatgtattattttatgtctgtgtttgtcctggagtgctgtaactcctttcactgtctgctgtaagttcaacttcttcaataaaagaaatgtttcaaattgga

SEQ ID NO: 1638 - DNA, 1246 bp, Homo sapiens
ggctttatgcagtctttccacctcagcctcccaaagttctgggttacaggtgtgagccactgcgccgggccaattttggtttttcatggaggacttttagcaggtctcaaaagttttcttctaatagttttcttggtgttctatcattcataggtgttgaatttaccaaactttttctatttcaagtattacatttttactttgttcaagtaatattgtatcatattaaatgaacattgcattgtgaaaataccctgcttagtcatggtatgtaatcatccttatacctttttgtattctttttttaaatatttctgagaatttctgtgtctaaatttaaataggatgttgtttcgtaatcatcttgtgattcttttgtctcctttgggtattattggctaatagatgaattaagaaatgttacctcttctactgcttgaagtttttgtgagaaattgatgtttttcattaagtgttgatgaaatgtacaacttaagcagtttataacagctattctatctaaaaagatataatttttttgttctatggatataagtatattctattatatatataatgaaacaattcataggatgttttttcagtttacttttgtaatccatctctatcggtattttttatttcatagtatgtcatgaacaattattctaggcacttgacatggaataatttgaaaaaatagagaatgagtcccgtactacaatcaataaataactcaaaattttttccatttttaggatgaagaatatgaatatagttctgttacgtaatatttgtgtttactgtgtgagacaaatgagttactgaatgtaaaaataattagtaaaactgccctttgattttggaatgtatgaagcaggcaaatgcccctaccttctatttttatcaatatttagataaggcagacaaataaattttaataagatatacagaataatcttgtatttgaagaatgctatgaaaaaagatagtttggaggagtagttagtatttggctcatataatgtgttaggtaactattctaagccattaaacatttgtatgcttaatacctaagagtttaaagtgaagaaatcaaagattcattgaaaaagaaaaattaaattttaaaaaaattctatttttaattgaaaaataatagttgtatatatctgtctacagtgtaatattttgatatatgtttatgttgtaaaatgattaaatcaagttaatgtttataacctca

SEQ ID NO: 1639 - DNA, 613 bp, Homo sapiens
acactcacagatgacagggcttgcggtaccaaaggctctttatcttccagactacagctcctattaatgtgaaaacaggaaaagaagtaaaaattgcacaaaatggcattgaaactttggcgtgggaacctcactttagcagccagaaggttccccacgacccaccactgcctgccaagatgaatgtaaatgaagcagaagtctcacaggctgggcacagtaggaagaagcattctcatcatggccacttagcttgctcgagattacacagaaccatgcctctggtttcctggtacagtgctccggcaggtgacggatgctcctgggtgacatatcacggatctctctgaggtgagatcttcatgattctatatcataggcatctctttatcttcaagttgggcaacatcagcagggttcccatgagtatgtgcccagcgaggctatttagttcctcttatctttttttttttctacttgccctcgtttttcctgagattttatttccttcctagctggcatacctttccctgctgtggtattcagacctaaatagtgtgtgcacctattacctctgcagagtaattactgtttggtaccatggtagagtttc

SEQ ID NO: 1640 - DNA, 1375 bp, Homo sapiens
gtcctcgctcgcgtccccgctccctcctcccctctgcttctccctcccctccactcccccattggcttctacccctcccccttcttcctccgcctctcccaccattggttccctcccctactccattccttctcaccttttcccttttacccattggcgtgagtatttttcctcagcttccctctttctccgtattctgctcctcctcagtcccatcctccacgctttggaagctactgccttactgcccggagcgccgtcgtccccgaacctcccctgcttctccctttccttctgttccggtttctggtcgtaactcaagagcaaaccaccgtactgcaaaggaaccagatattgtgctcgcggttccaaaccgggcatgggcaccgaatgcttctcgataaatccccttatggtctctgagcattaaagaaagcaagggaggaaaacatgcgcccaagctcgttcgcaggaacatgttcgcgtgtctgcgcctgtgtgcgcagccagttttctggctgaggatcgctcgccaactacagacatcacccgcccaggacccggtgccacactcacccagaagacgaaactccacaggagcgagaagaggagtccatttctccgtcggctcggcacggcacggggatgcaggcccctgattcagtacgttctgtgaaagtggagcgagaagccaagacgtggatcgagaagccccgtggggcgggtctcagggtggcccaaaagacccctgttcacgccactaccagcctaactttaggaactgtcgtccacctggcttttattatactgccttaaacatattcacttttttgagactctagaaatttcacaagttttggggtagagcacactgggctttgggtgtgtttctcatgagggcactgacgctgaatggtgcagtgagaaaggacggtagaaaccactgcctttgcttttaccattgaagaaactgaggtcctgtgactttcccgaggtcatcggaatctgccttgcacaggagacttaaaatagttgccagcagataaaagaatgagcaaaaccacatctactccaatttgttaagtctgaaagaaagtaattgaggggggattcctctttggggaaatatttatttcctgcattgaaaatagtttaatgttagtaaacatataaaaagtattttaaattcaagttattctttatttcttatgttacataaggtactgaagttagccaaggttgcttttgtgttataatgatgcagctgctgccaaccagaagtacatttacggtctgtcagtaaagaaaacaaaaactgcctgttggtaaaaatctattagaaaatatttgtcagtaaatttgtcacaatattcca

SEQ ID NO: 1641 - DNA, 384 bp, Homo sapiens
tacttattaatgcatattacctgtgaataagaaaaaggtgcttgcatttcagaagtttgtgtgaatcacgtgtcctcctcatttcctaccagagttcagatacagaggaccaactatacttgtcggactctgaaacttcaacttctcagctccacttgaacctcaggcacagagatggaatctgaagcggaccaaagggtggcttcttggagatggtgaggcgtggccacaggaggaacaggatgcatgacagctgcctcccacacagatataccgcatctaagaagatgtcgccacccccatgagaaatatctactgtatgctcatgtttgaatgtgtgtatatatataggttcaatatatacataagttgcaaagaactgaa

SEQ ID NO: 1642 - DNA, 500 bp, Homo sapiens
gaaggcagggtgggctcccgcacgggaggagggccccgctcaggccattggctgtctcctcgctgaaggtggacggcagatgccccaggcctagcctttaaccctaaccgagatgctcagagcagctttaaaggtcagcctctccctggcccaggatggtactcggctcaccatacgtcaggcacgtcagcaagagcagcggcagcaggaaccagaggaacgtcttcagggacgagaagcgcctggaccacgcgggagggcaggacgggggaggcggaggtgtgaggggagctccaggcctccacgttccacccagggagtaccctgagatgttttcctgggtgctgaactagagctaaggaggatagcttgagcttctcactgtgccagggccagcctggacacgtcagagcctttcctgctgggcaggtcttagagtgatgggacaattttgactgaattttactgatgttattaaaaatagtgtggtctttgaaaaa

SEQ ID NO: 1643 - DNA, 582 bp, Homo sapiens
aaacacagatcctggtgccgaacatgaggacagggcaggccgaaggagaaagtggaaggaggggagcttctctctcagcctcatccttctgggcctggatgctggagagtcatgaggtgcttcagagtactctgggtgaggagggaaagatggtgcccaccacatggaggccagcctaggtcttgtatgaaacctgtgagctctcatgaaccagtacaggcctgcttcagcatagcactgggtccaaaggaaaagaagaaaatgctgagtgtgtgggtggaacatctaacctcttcggacgtacaaggctcctgcctatgtcatcctttcccctggcatggcagcagatgcaactctggagtgggggaagagggcgggaagagagcctgtgctgctgagcacctaccaggacttgtcagggcccaggcaccctatgaaacaccttatgttggttatcccacaccaagctcgcaaacctctgaggtaggcaactttgtcacagagagaggctgagtaacaagcccaaagtcaaacagccaagaagagacagaactgtattaaacttatctactggaccccaaa

SEQ ID NO: 1644 - DNA, 1110 bp, Homo sapiens
tgcgtctgttctctcccaaagaagctggtccttagcctgtgttaaggagcaatctttcggtggccagatggagccggggcatccttcttcaaataatggcttttaattcgcagactagaatgtttcggattacaaaagaaaccggttctcttcacatccttatccttgtgatgcagcattccgcttgcatttggaagccgtttaatatcagagagaagccatatttatgaaagtaaagaggctgctcagatgactgcaaaccagccttccttactggttttatcactggtaatgttataaagacagttgtccagtttcatgaatcttgtaggttttttttttttgatgttgtttttttttcaaaaatccgtattgtagaaaaatatgctgtcccagaagagatgattggacactctcaagcgtggtgctggactttgtcatctcttgcacagccatctccacaccttagtgcttacctcatgttagttttttatattctgcaaagacgaaaccaaaataatccaaatttgacacaaatacctgggctacatcttatttgagatgtttaacaaatgtctggatcatcttttcttatatattacgcaggaaacactgtgaagtaagcaaagttggaatgcccaagtgaaagaccatttgaatatttacaagtagatttcagacaggaatactacagggtggtcacaggataacaaattctaggcagcagatttacatgacttgaggctgtgggctgttaagacgctgaaaaaccagggtgtggaccaagctggctaaggctgagtggacccaacgtggtgctggattggatggaggttttacctaggccctcattatatgctcattaacatactaaatcacacacccgccagtgccatgacagttctgagaccagtgtttgatgtaaaaatggcaccacagttccaagaaatctccacctttacccaggaattttcgtgaacattccactccttggttaaagaaacccatcaagatgaaaccccagaacccattattctctcttgggtatgcccaagctcccctttcttgagagtgtactttttgctttgcaataaatctcttctttcacta

SEQ ID NO: 1645 - DNA, 1379 bp, Homo sapiens
tccggccactctcctgcctgggctgctgctcaacgggggctgggggtgtgtggggcgggggtggtctgtccagtgattcagccacatgtgatagatgaccaagtgactgctttcttggagtccgcacaccagtggaagactctcaaagtggttgtgaccgacttgatcaaactctaggcttcctgaactggtaactgtcactttaatataggttactgattaaactcagaaaaatgcagcttaaaatctttgccaggaacttgtgtggacttattccctgttcccccccccaccccccttgttctgatttgttttgtcacaggaatgaaatgcagataactctttagaaaacttttgtaggaaaagcgcctcgtgtgatctggaacaaagacgttttataatcagatttatcaagctgcgaagagggagttttagtgaacggaagcagcagcattctgtcaccaggaaatactcctttatccagaattggaggtataaaccagtggagtttatcattgaatagagtgcagagaaaggaccgcaagaaagctgatcacctcagcaatgaatgatttcaatacgatttcacccaaatggtctcacacaccagcctagtaaaccagagataaggtgtaatgtcatccttccttccttctccctgcctcaactgtcaaagattgacaacttacatgttgtttactttttggcttctatttctgttcataattattatcagaaggcatagcacccacaagcctaatcatactgccttacaaccttattcctcttcattttgtcttctcacttacctgcagaaacccagtttatttttgttctccctttaccacaccagccttgtaactgttatgaatgaccctcaatctcactggaatctgaatcactcaggaattcaagcaaactggatgttttaaccactgttcagctttcttatggaatgacagagaacttgtaaagataaaacaccagtttgcaggaagaaaggaagagaatggaaattgcttctggaaaatactagttttacaatatgttttgtttgtctgctctcttaaataaacttaatcctataaacattttttaagaactagccattaagactgttaagttctcaattataaaggaataaaatgttttaaggaggatttatttgcccttgcttatatgaactgcatatttttagtaggaaatcatgtaatttaaattagtattgattaacagatttaatgtagaaaatggacatataaagaatacaaggataaatgtctacatgtaataatggatggtagtgatataatgcatttttgtcatcccatgctgaattcagtaaaaataaagctaatgacttggagcttttaaaagat

SEQ ID NO: 1646 - DNA, 2065 bp, Homo sapiens
gacatggtgctagaggttgggtggtcagacactgtgatcccgggtgctgtgcccgcactacgggaaggggaagcagcgcgtgggtctcgcatcaggaggcaaggccaggacccgctgacccatgcctcctgccgcggtcagagcccaagtttgtcaagaacgacgtgggcggccagcgcagcctggtcaacaagtggacgacgttcctgaaggcgcggctggtgtgctcggtgcccggcgtcgagggcgacacccacttcgatcagctcctgccccagcaagacctttggcaccttcagttccaccaaggacttcccagacgatgtcatccagtttgcgcggaaccaccccctcatgtacaactctgtcctgcccactggggggcgccctcttttcctacaagttggagccaattacaccttcactcaaattgccgcggaccgggttgcagccgctgacggacactatgacgtcctcttcattggcacagacgttggcacggtgctgaaggtgatctcggtccccaagggcagtaggcccagcgcagaggggctgctcctggaggagctgcacgtgtttgaggactcggccgctgtcaccagcatgcaaatttcttccaagagggcggttccggcggcaagacgtaaggaatggcgaccccagcacgttgtgctccggagactcgtctcgtcccgcgctgctggaacacaaggtgttcggcgtggagggcagcagcgcctttctggagtgtgagccccgctcgctgcaggcgcgcgtggagtggactttccagcgcgcaggggtgacagcccacacccaggtgctggcagaggagcgcaccgagcgcaccgcccggggactactgctgcgcaggctgcggcgccgggactcgggcgtgtacttgtgcgccgccgtcgagcagggctttacgcaaccgctgcgtcgcctgtcgctgcacgtgttgagtgctacgcaggccgaacgactggcgcgggccgaggaggctgcgcccgccgcgccgccgggccccaaactctggtaccgggactttctgcagctggtggagccgggcggaggtggcagcgcgaactccctgcgcatgtgccgcccgcagcctgcgctgcagtcactgcccctggagtcgcggagaaagggccgtaaccggaggacccacgcccctgagcctcgcgctgagcgggggccgcgcagcgcaacgcactggtgaccagactgtccccacgccgggaaccaagcaggagacgacaggcgagagaggagccagacagaccctgaaaagaaggacgggttggggccgggcacattgggggtcaccggccgatggagacaccaaccgacaggccctggctgagggcagctgcgcgggcttatttattaacaggataacccttgaatgtagcagccccgggagggcggcacaggtcgggcgcaggattcagccggagggaagggacggggaagccgagctccagagcaacgaccagggccgaggaggtgcctggagtgcccaccctgggagacagaccccacctccttgggtagtgagcagtgagcagaaagctgtgaacaggctgggctgctggaggtggggcgaggcaggccgactgtactaaagtaacgcaataaacgcattatcagccaaagctggaatggccccagcagaaaaccccagtcctcggccttgctatgtggtcttgggcaccttactagcggtgtcagggcccgagtttctcctgtccaaggttgcctggtgaggattaaaggtggttccggccaggcgcggtggctcacgcctgtaatcccaacactttcggaggcccaggcggacggatcacgaggtcaggagatggaaaccatcccggctaacacggtgaaaccccgtctgtactaaaaatacaaaaaattagtcgggcgtggtggcgggcgcctgtaatcctagctactcaggaggctgaggcaggagaattgcttgaacctgggaggtggaggttgcaatgagcctagatctcgccgctgcactccagcctgggcgacagagcgagactcc

SEQ ID NO: 1647 - DNA, 1983 bp, Homo sapiens
agcggaaatggctccgagaggctttgacgcatgtgtacctttttagtggcggtatctcggccggggattttcgggctccagtggaggtggctatgctcaccccatctcccttgagaggcacagaaggttagagatgtgtgcgaggaacggccaggtccagcgtctcctcgttgctgccccttgagcccgggaccggcgccaatgcgcgcccgggttcttgggttctttcgtcccgcagacctgccttggtgtggcgtccctgggccgtagcttccgaaggctgcagccgacctggtcggggtcctctagcccgccttccccttcccccattgacagatggagaaactgaggcccaggccaaaaaatatctcactagagggctcaccgccatttcctggaaaaattggggctgggactcaacggacgctcgtccagcagcagcgcggagctccgaagtaaaggcgcccgtgaccgagtgctttgtccttacaagcgtggtgttcttgaatgcttccaggcgccttatgaggcccccgatgtacaatctgtgcttaactaaaccccactgtcttccagggtcaggttggccatccgcaggcgtagttgctaggaaggtttgacagatgtccgcctgttgattcagacgttcccaggatttggagcaagaagagcaaggaaggccaggcgcggtggctcacgtttgtaatcccagcactttgggaggccgaggcgggcggatcacgaggtcaggagttcgagaccagcctggccagcatggtgaaaccccgtctctactaaaaatacaaaagaaaattagccgggtgtggtggcacatgcctgtagtcccacctacttgggaggctgaggcaggagaattgtttgacctggcaggcggaggttgcagtgagccgagattgcgccactgcactccagtctgggcgacagagcgagactctgtctcagaaaaaaaaaagagcaaggaggtgttgaaaatgggtttcctggctgggcgtggtggctcacgcttgtaatcccagcactttgggaagctgaggtgggcggatcacttgaggtcaggagtttgagaccagcctggccaacatggtgaaacaccgtctccactaaaaatagaaaaattaactgggtgtggtggagggcgcctgtaatcccagctaatcaggaagctgagacaggaggatcgcttgaacccaggaggcggaggttgcagtgagccgagattgctccattgcactccagcctgggcgatagagtgagactcagcctcaaaaaaaaaaaaaaaaaaaaattcgccaggtgtggtggtgtgcgcctataatcccagctactcaggaggcagaggcacaagaatggcttgaatcacttgaacctgggaggcagaggttacaatgagccgagatggcaccactgcactccagcctgggcgacagagcgagactccgacttcccatcttaaaaaaaaaaaaaaaaaaaaaaaagaagtgtaaagatgtgattatgtggcagggggtaagggttaaaaagaaaacaagaacaagttttcctctgcttagccagcttacttcaaggacagttataacactgaaaagtcgaggccaaaggaatgggctccagacagcctcctccggagcaaagttgaaaagaaaaattcctttactgtctctccttttctgaaccattaaatatgactgtttgccaatggttgtatttagtaagatttgtagactctgtttttcttttgacacagctgcaaggccaacagctgtgcaaagccacaagttatgctaagtcagcagttatgctatagattacatgacctgtgactgtatcattaactgcttttgttttgcttctgtaagtttgcctataaaaaccacactcagtctttgttcaatggtcagcttttcagatacaaatccactgagccggtgtacatctaaataaatcctcctgtttcccgtgtca

SEQ ID NO: 1648 - DNA, 1621 bp, Homo sapiens
cccagcgcttcgcgtaccaggaaggggacggcgtcctgaaagggacatttgaaaaacggaggcaacgcgtctattaattaggtggcggcgcctggggtcgcagcactccagaggctgagagtctcgcccttttgcctagtggaggagctcggctcactgcaagctccgcgccacaacccccctgccgccccaggttcaagagattctcctgcctcagtctcccgagtagactgggattacaggcgagtgccaccatgcccggctaatttttgtatttttggtagagacggggtttcattatgttggccaggctgatctcgaactcctgacctcaagtgatccgcctgccttggcctcccaaagtgctgggattacaggcgtgagccacaacgttgggccaggtattgtatttctatgttattattattttttgtatttctatgtcatacaggcttgtatttctgttaaaaacaagtccttatctctttgagatacatactgaagtttttacaggtgaaataatttggccaggagtaatggttcatgtctctaattcccaccactttgggaggtccaggtcggggtcggggggttgcttgaggccaggagtttgagataagattggtcaactacaacacataaaaaatagccaggcatggtggtgggcacctttaatctcgatacttgggaggctgaggcaggaggatcacttgagcccaggagtttgaggctgcagtgcgctacgatcatgctacagcaccccagcctgggcaacagattctaggacaaggagactggctttcacagaggttcgggttgggttcagttttcttcagaagaacttcagaatgcactacaacaggaaaatcatattctagatggagtcaagtcaatctgtttgtataccagatacatctatgatatacatgcagctactatctgattatgtatcaattaaatagatcataaatgtggaacgatggggactttgagagatttgtaactgaagctgccttcatgcttgttagaatgctggggtggaagagttcccagttttaaaggagaagtacaagaagacctgtaattgttagcaagatatacagaacacagtgcacacagcagcgcacttctcaagtcagctccaggttcaagctcaaaggcctaaagttttgcaaacatctggtgaagaggaagatttttgagactctcccagcctattacataaaggaaacataaccgagaattttgtctaaaggttttcatttgaaacaaagcaagagcttcttttccccactccgaattaaaacacagcgcaacaggggccacatttatttggcaggacagtaccaatatgtgaacatcctcctcctcactgccgttggggtgacttgactcataagcagctgttcttacacaaaatattaacccgaactgctagtgtcacacagaaggaagtggtcttgattgtgtatgtgggccagcatgttctacaaatgctgaaaggtgggagaagcacaaatacaacccactctttaaaaaaactaaataattcaaagtaaaattttctatccccgccccctccccacccttgccttctccaataataaaaagtagaatccag

SEQ ID NO: 1649 - DNA, 543 bp, Homo sapiens
cccagacatcaaagctgagctttctttgtctccggcagcctgggccactccagaggtgttaaagctccagcacttcgagcctgcctcgtgggaaagtcttaggctgagtctgggctggaaacctaacaatttcacttcctagacaacttgctaaaagtcacctaaagacagtctggttactgccaaagatatgctttcaaataagatttggataaagaagggaggtagatgccttttttcagcagtggagtgatgtctagaccagtagatgtacgcatctaagtgaattcatcaccagcaacaatttccagaaacttcctgacctccagattgcagcttcattagtgtgagtttaaagccaactagatgccattctcagattccacgcatatggccaagggtccaggaaataagaagaaacaggttgaggggttggtgttatggggcatttacttgaattttctatgctataattgtctcatctttaaaacggtgataataataaaattgtcagttattaaataaattaacacagtgaaaaaa

SEQ ID NO: 1650 - DNA, 560 bp, Homo sapiens
ccgcggtataaggtcgtcccatcctgaatggccggtgcgcagactcaattgcgactttgaggctgtcagccgccacccggcaaccttccagtgaacaggattctgggtttctcaaagctgtaattggagggccactccagaggtgttaaagctccagcacttcgagcctgcctcgtgggaaagtcttaggctgagtctgtaggtgtctgcagttaagaagccagcggtctgcatatgattgctcaggggtggtggctgggtccaacagcattcactacaggcctgccttgaataccacctagcgcagtgctccgcatatcacaggggctggaaacctaacaatttcacttcctagacaacttgctaaaagtcacctaaagacagtctggttactgccaaagatatgctttcaaataagatttggataaagaagggaggtagatgccttttttcagcagtggagtgatgtctagaccagtagatgtacgcatctaagtgaattcatcaccagcaacaatttccagaaacttcctgacctccagattgcagcttcattagtg

SEQ ID NO: 1651 - DNA, 565 bp, Homo sapiens
gttcagccgggagcagagcgaaccgcaccggcccgagcggagcgccgcacgttcccaaccgcgaggccagacatctgactgttggtgtgagaccagtgctcctggtggtgtgccctgagccatggaggcgcctttgcagacagagatggtggagctggtgcccaatggcaaacactcagaggggctgctcccggtcatcacccccatggcaggcaaccagaggtcgaggaccctgcacggagctgtatggagggcaagagcttcctacagaaaagtcccagcaaggagccacacttcactgacttcgaggggaagacatcattcgggatgtcagtgttcaacctcagcaatgccatcatgggcagcggcatcctgggactcgcctatgccatggccaatacgggcattatccttttcctgtgagtgccctcagagaaacttctaaagataggggccctaagcaagccaccaatcatgacctcccaggacccgccagttccctgtcccagcatccaggctgcagtgggtgggcacttcttacactaacaaaccgcggctgaaaaaa

SEQ ID NO: 1652 - DNA, 772 bp, Homo sapiens
cattgggaatggagggaaataaatgactggatggtcgctgctttttaagtttcaaattgacattccagacaagcggtgcctgagcccgtgcctgtcttcagatcttcacagcacagttcctgggaaggtggagccaccagcctctccttgtcctggaggctggaagtgcaaaaggaaggtgtcggcaagatcgtttttttctgagagctctctccttggcttgcagatggcagcctgctcctggcacagtcttttctctactcatgcccaaagttacggaggacccagcaaccatctcctgcagcccctggaaacctcttgactcttctgtgatgtccccagtgatccagcagccctggccttcttttgatggcttgaacatttggtcttcattgaacagtttgtatattggaaacttgccagcctccatccacattccaacctccgtctgcatccctcgaataactgggagatgaaacaggaagctctatgacacacttgatcgaatatgacagacaccgaaaatcacgactcagccccctccagcacctctacctgttgcccgccgatcacagccggaatgcagctgaaagattccctggggcctggttccaaccgcccactgtggactctgaggcctctgcatttgcgggtggtctgcctgtgatattttggtcatgggctggtctggtcggtttcccatttgtctggccagtctctatgtgtcttaatcccttgtccttcattaaaagcaaaactaaagaaaacagaa

SEQ ID NO: 1653 - DNA, 777 bp, Homo sapiens
ttggggtttgcatccaactcaccagctggtcctgaggctgcatctgcctctccagggtcttagatacatgatggcactgttggcttcctgaagacctcttcatcctgcagaaggtgcaactccacagcatcctgagaggttggacacaagctgctgggagcacaaaggaaccctgcctgccaggcttgagtgtcagaatctgggctttcacctgcagggacctcaggcctccatcagccaggcttggaaagaatgaatggtgcctctcggtgaattactacaacctgaatcctgtgaccccacctgtgatggcccaatgttattgaaattactgactccatccacttagcaagtggtaaatactctgcaggcatagatttgactaatgtgttctgttcagcgcctatttcaacagatctcagctgcaggttgctttcacccccgaagggacacaatagaccgttatctggctaccacggggtacctcgacagttctgccaccatacacaatctttgcaggcaggatttgaactgcatctgacattctctaggagtacaggtgtaacatcaccctgaagacacccttctttcagcaaattcatttgacacactcaggacattactcacaaagaactcatagaaaaggatggggtttgtgtttccacatggtgggattaaactaaaacaaaaaagtatgggccactgccccaggcatagtacagggatccacaccaatttctggccattgtctggtcagttgagggatgctccatccct

SEQ ID NO: 1654 - DNA, 2677 bp, Homo sapiens
aaaaaacagcgcccagaatggaagttgctactctagctgtggctggccagggaagggcctagaagctctgacaccattctagttctagaacttgctatttctcttcccacagcccaagatccctccagccttggctcaccaccctggggccccacattgtccttagaatctgctaaactcccaggtcttcctcagttaatggctggcagaccctgtctcactgcatcctatggggtttttaaaaaacctttcttattcaaaattccagtagaacgaataaaataactcatatttatctatcaaccagcactgaaaaatcagtgcatgatcaattctattacattctgcagccctaccacatccctcccacactttatcttaaaacaaactccagacatcgtatcacatcatctcaaaatatttcagtatgtctctctaggtggcaagaactcttacatccagtcagtattcaataaatatcttttccccgctggatgttcaaatcagggtctaaataagtccacacttagcatttgggaaatatgtctcttcatttaaaaaaatctataatagttctttttcccctctctatctcccttgctatttatttattgaagaagctggatactttctcttggagaattgcacattttctagattttgctgactgtattccagtggtgttgtttaacatgttcctccgttccctatatttcctggttgttaaatctagaggcctgatcaaattcagggacattcaataggtatgctatatattttctgtggtgtcacatcaggaagtacataatgatttggtgaggtgtgtgtgtgtgtgtgtgtgtgtgtgtgtgtatgtggtgtttatgtataagattggtcaatgggttcagtccaatcggttcatgtgtagtctgttttttaaaaatctggaataagtttgtgtgtatcctgttaaatgtcatcttatttgctttagcccatcatcccattgtttggttcccatgtctgccaccaaatgtctccttcttagattcatatcatctgaaaatttgttaagcctgttaactttgtattcatccaaatccacataaacatgttgaacaggatagagctgaggacagagccctgtggcatgctactaaagactttcctccagactgacatggatcaagcatttttggggtatggtaactcaaccagttctgaatccacttagtatgataacacaatccacaatttctcatgttcttcatcgaaatatcattagagagagacagagatatctagttttcagttagaaagataagattatagtttaatagagagataagggctggagagaaatttggaagcaatctgtatcaggttttgtcacctggctaccacagaatcccctggggaacttcctggcttcacctggagattctgattctgtagtctggagtgggactaagaatctgtgttcttactaagttccccaggtgattcaaatgcagctggtctgatgactgatgttgggggaccacagatctgtatcactgggatagctggggcagagagaatggataagttctctgaggagagtgtttcatggggcgggaggagggctaaggataacactgaggagtgcgcatgggagaaaaggaaagagagccaaagacaaggaacccttggagaagcagtggcaggtggtgcctcaggcctggggcagaaagagggctggatgctgcgcagaggcctggccagcacctaggcagagcccacagcactggtgaccagcaagaaggcagcactgtggagttgtggaccctggagttgcatttctggtttttaaggaaatagtgggtaggagagaaagtgtcagaatcaaattataaaagtgtagcagcaaaagggagacaatggtgttcaagggaagactttctttaaggaggcaagggcaggagcttgaaaacagaggggagggagccaagtggtgaggtaaggagtgaagatacaggagagtggaggaataggaggcagcaggaactgctggaggcaggaaggagggaactgagcaatgtggaggccggggctgggcagcaatgagccttgtgaaggagatggaccccttctccccaggagagagggtacctcctggtgcataggtagatgaggagggcagatggaagacttgaagggggctcttagaactggttcagggaagcagaaaatatgagataaagggaccagacttgggatttgaggcaagataagatgatttggcaggcactgggaagcatttcaggggattaccactagatgatgaaaaggtgctaagcaaggagggtagaggcagaggcagtctaggtgagtgtgtagcgggcttggtgttgataagagttaaaaagagcatggccaggcgcagtggctcatgcctgtaatcccaggactttgggaggccaaggcaggcagatcacttgaggtcaggagttcgagactagcctggcaacatggtgaaaccctgtctctactaaaaatacaaaaattggccgggtgtgatggcaggcacctgtaatcccagctactcgggaggctgaggcaggagaattgcttgaaccccagaggcgggggttgcagtgagcagagatcgtgccattgcactccagcctgggtgacaagagcaaaactccgtctc

SEQ ID NO: 1655 - DNA, 2060 bp, Homo sapiens
gatacgcaaaaagctaccactatgtctccacgaagctgagtattttccttggagtagctttttatttggacatatggaatgaaacttacttaatattctgcagagatcttcctggtgtttccaaaatgtctcaggtatgtctttatcagcatcatgaaaacagactaatacagtaagttgataccagtacagtggggcattgccgaaaagatacctgaaaatgtggaagtgactttggaactgggtaacaggcagagattggaacagtttggagggctcagaagaagataggaagataagggagagtttgaaacttcctagagacttgttgaatggctttgctcaaaatgctgatagtgatatggacaataatgtacagactgaggtggtctcagatggagatgaggaacttgttgggacctggagcaaaggtgacttgttatgttttagcaaagagactggcagcattttgcccctgccctagagatttgtggaactttgaacttgagaaagatgatttagggtatctggcagaagaaatttctaagcagcaaagcattcaaaaggtgacttagatactgttaaaggcattcagttttataagggaagcagagctaaaagtttggaaaatttgcagcctgactatgcaaaaccaattttctggggagaaaagagaaaccaattttctggggagaaattcaagcccgctgcagaaatttgcataagtagcaaggagcctaatgttaatcctcaagaccatggggaaaatgtctccaggccatgtcagagaccttcacagcagcccctcccatcacaggtccagaggcccaggaggaaaaagtggttttgtgggccaggctcagggtactggtgctgtgtgcagcctagggacttggcgcactgtgtcctagccactccagctgtggctgaaaggggccaagacagagctcgggcagtggctttagagggtggaagccccaagccttggcagcttccatgtggtgttgagcctgcaggtgcacagaagtcaagaactgaggtttgggaacctccgcctagatttcagaaaatgtatggaaatgccttggatgcccagacaaaagtttgctgcaggagcgaggcccttatggagaacctctgctagggtagtgtggaaaggaaatgtggggttggagcccccacacagtgtacctactggggcactgcctagtggagctgtgagaagaggccaccatcctccagatcccagaatggtagacccaccgacagcttgcaccgtgagcctggaaaagccacagacacttaatgccggcctgtgaaagcagccaggagggaggctgtaccctgcaaagccacaggagtggagctgctcaagaccatgggaatccacctcttgcatcagcgtgacctgagtgtgagacctggagtcaaaggagatcattttggagctttaagatttgactgccccactgatcttggacttgtatgagccctgtaacccctttgctttgaccaatttctcccatttggaatggctgtatttacccagtacctgtacctccattgtatctgggaagtaactagtttgcttttgattttacaggctcataggcagaaggtacttgccttgtctcagacgagactttggactgtggattttgggttaatgctgaaatgagttaagactttgggggactgttgggatggcatgattggttttgaaatgtaaggacatgagatttggaggggccaggggcagaatgatatggtttggctatgtccccacataatctcaacttcaattatatctcccagaattcccacatgttgtgggagggacccagtgggaggtaattgaatcatgggggccggtctttcccatgctattgatagtgaataagtctcaccagatctgataggtttatcaggggtttccacttttgcttcttcctcatttttctcttgccgctggtgtgtaagaagtgcctttaacctcccgccgtgattctgaggcctccccatgtaaaactctaagtccaattaaaactctttttcttccc

SEQ ID NO: 1656 - DNA, 4382 bp, Homo sapiens
agcagtgccttagccagggacctgcttggccagcgacagatcctttgctgctctgtctgccggttcttgagatggagtctctcactctgttgcccaggctggagtgttgttgatggcaacagtgggccatctggaccatctggagtggccactgccaagatgctggctgcagccaggaggctctgcccatgctgtgagcttcacagagccagagggagcggggacaagcaggagcccagctccttccaagttggcgggtgggagctccccaggcatagctgcagctgcccaagtcatggctgctggctgagcctccctgtgttcttggagaccaggagcaggcaggagccctgctctcctgggtgcaactgcagccacccaagtccttgctacagaccgtgttcttggaggctgggagcaggcaggagtgccaaagcaggcaggagtgctggagcaggcatgagcccttcctgcatcccccacctcctttgtgcagctgtagccacccaggttgtggctgcggaccaacctggatatctctgcactctaggggcctgggaaggcacccccacctcagcaggcttggaggtatctgcttctgctgcctggcctctccctgctcctggtgactgctctgatctaggagcaaggttggggccgagccagggtgctgttgcagcccagccagttgtgcgcatacttgaggcagtgctgacaggccattcctctgctgcttcagccccctccagactttgggtgctgacaaacatagaagggaggctgagggaaggctgaaggcagttcagcatttgcctgcaggtgcttgtccccacgaacagcctgggcaccatagaaagcagtaggaggcgacatgctctgaggcagaaaggggcgggtccccagaaggcctgaagcctaatggccaggccaccagtccccctgactggagggggaactggtggtgctttttcttggacctgcccatggccaccaatggaccaatcagcatgcacttcttcctctctgaggcccataaaattccctggactcagccagactgggggagaagacctgccagcagagaggagctacctactccagggcctcttttctgctgagagctgcagagacaacaggaggaccaacctgcagagaggagctacccacttcagggcctcctctttgctgacagctgcagcgatgatgggacaagctgcctgcagagaggagctacccactccagggtctcctctgagctattctgttgctcagtaaagctcctccttctcagtaaagctcctcttcactttgctcagcctccacttgtctacatacctcattctatctggatgcaggacaagaacttgagacctgctgaatggtggggctgaaagagctgtaacacaaacagagctgaaacatgccccttgctcaccacattgcaggcaaagaggagagaagagctgtggcccttcaggaagcccagaccaggaagctccctgagccaggattgtgactcccgttggggccctgcatttcctggagtctccaagcttctgggcaccactgtggtgtacttagtccagtcacagccttgcagtgagccagggcccgtactggcacctggagctgcccaccctgctgcagcagccagcgtgcctgactgtgtgcagtggccagaccccacactctttcgctcacacatcccttgctacttcacgcctggctcacccttggcaggggcgagatacaggctggtagcattagccaagcacagcctgccaggctgagtgggcagaacgatcccagtgggcccaagcaaaactcaggcaaaggcaccactggccacagaggtttctgactagaaaagcaacaccccaagtatcctgtgacacagtggcatgatctcatctcattgcaacctccacctcctgggttcaagctattcttgtgcctcagcttctggtgtagctggggctacaggtgcgtgccaccacatctatctaatttttgtatttttttttttttagtagagacggggtctcaccatgttgaccaggctggtctcaaactcctgacttcaggtgatccgcctgcctcagccttccaaagtgctgggatttcaggtgtggcctaccatgcccagcctgttatgcctcttgattgactcctttttcataatgaaatgaccttctttatccctgatatatcagtcagtgttcaaccagagacacaaaacaagtaattgaatatatgtatatgtacatatggatttgttaaagagaattggcttacacaattatgagagctagttaggcactcttataatgctgttgtgtctgatgctagaatttgatgttggcagagtagtcagaaaggaagatggaagtaaagtgggagaagtcaaggtcaggctggaagtcacaagtacaaacttgaacctcatgaaaatggactgaaatccatgttagttcttgttgcctttgaccttggtggtgagggtatccttcagaagctggggctgtttgtcataaacacacatacataggccaggagttggagaagctgaaggaggatctagaggatggtagagtagttgcaggccaagctgctacaaaatgagtcaacaaagtgagtcaccagtcagcaacaacatatgtgaactacaaatggctactatttcctttccacattacacatctcccaaaaattgcctttttggcccgcccaaactgtaaacataaaataaataattctaggaaaactggtgcactttaagcaagatgacacattataaaagcatcatggtctgccccttgtcaacttagtaccatacatgtttctttaagccatactttaattctccaaattatgataacaatgaagttgtgctttcaccttacataacactactatcacataactattaacatgctaaccatttcccaaaagaggaaaatagtctttttgttggtccatgaatggcattcattctgctcccagatgataaccctccttctttcatatcctataacttaaatactgacatataaagttaactattaacacatattgtgttagatgataagatgagagaaggaagaaacataaattttcaagtagtttccaaaagaagctgggtgtatatcattgcccaccagaatgttcttcttgaattcaactagacttttagaccttcaagactactgcagatcacccttggcatcagattaacttagaaggataggacagaagccacagctgaccagtaggcagcacctacccctcttcggtggtagtggtactcacagtattttacacaagcatgcagggtttttttttttttttggccttcccattccaagttgacagctcagatgcaaggagatgagacttacattgggaacctgtgggatgcatctggattagaaacttccacaggagctaatatgtcttatagcaactccatggacatagcttctagaatttctgtaagagacatgccaattacaagagtcactatactcagggaggcccaaagttatagtatccattagcatagtcaatatttatagttcatttataattcttttggtaatcaggaaacatttttaccataaacaatattgttgggtaacataattgacctattaataagttttcaataaaacagaatgagaaaattaaccaaaggttaattctcatgtacaaaggtaaagtgttttgttaaccttttacccaaaagtgatgatatgaatgtagatttttttgggtgtttgaccaaggaagccaaaccattctttcagattatgttagatttgtagctttgtggagtgttgccagagatgttgctttctgtgtgtgagtttgatgagctaacctggagtttgtttgttggactggccaaaacaaatctgagccaactatggtccatatcagctgacactgaagaagttcctctcaatgaagtaaatggaattgaagggtttccagagagattagcagtgataatacaggcatgggaagtgatataaaattctcaagaatgaaactgataggccaccaccaatattctacctgaattctatttctcatttcacttgggggaaactaggtcaaactaacatgtgtactaatatatgtctaacttaggcatacgctctagagcagtgattctcaatctttttgagatagtaaatttatttgagaaaaggatgaaaactgcagacttcttcctcagataaatgaacataaagacctacatgtggacttttgcttatcatgtattgtattggaaattaattttctttgatacttagactgtgtaaacaattttcacaaggaagggatttcaatttaaaaatcaatttccagttctgggg

SEQ ID NO: 1657 - DNA, 800 bp, Homo sapiens
atgtgatggggtgaaatcatggcagtgtgattttcaaacaccaacttgccttggaagggaatgtggggatgtgcactgctggaagccatgtgttctgatatgagaagaacttcttcagaaggtatcttaatgcatatggggaaactgaggcccagattgcacatacatgagttgccctggaaaatcccaagtcaaagaagctgcactgcaggaaatcagtatggtgcaggccccaggcaaggcatcactgactacacttgcaagaaacaaacgcctgcaaaaatcaggacaggatgattttgaagctgtgcaaaacagttgtcatagccttctccagcatgtgttccttctgtatttcagacatggcagaggagacacagcaataactaaggggcaactattgcatccagaaaaaaaaaaaatgaagataatgacttctctgcaactaagatgaagatccactgaactttggggtttgaaatgcaacgttagaacttcagactcccggcacctaggtctccagctgctgggtggtgccagcatcagagatacactctgcaaaacatatactgtcttaggaaaaagtgaccctgttgtcctttcaggcccatattccacaagaagacaaatggagatgtaaaaggaaaactgcagctccgactgaagagagagcaagttgtctgttctgatacagccaggaaataagatgttctggttaatatgtgctaaagatgtggtgctgactttccgactcagaatatgatcacatgtttttctcattaaaactatattgaatatta

SEQ ID NO: 1658 - DNA, 878 bp, Homo sapiens
cctcgcgaccctcctgcttccctccccgccccgcgccgcctctctggtttgtgcgcccgtcgcaggtcgcaggcctctttgtcagctggagttgcgcgggctgacgcgccactatgtagcgggtttcgggcgggccacgcgtgcgggacaggaacccaaccccagccgaccttgagctccaggagttcgtctcttacgtctgcggaagtgcagctgcctcagttcttagcgcaggttgacaactacaggcacaagccattgaagctggaatgtcctgttgctggtatttcaattgacttaagccaactatcccttcagttacaataggaaagtgcctctaataaggccaaatatgcgtactaacttgtagcaaccacgtgtccgtgcagtgccacaggagctagagcagtgacaatgctggtggcaacagggcagtgtagcaggtgcttcatgttcaccttttcaaccttttcatttaattgtcacaactcggaggtggattctgttagggacaggctgccccaggaccactccgcccccgctaactcaatgcagctgacccttaccctgaatactctgcagctgcattcctgaaccgttatctaggcgctatagcaaggtcaccagacttgctacaccgaagccctctgggtggcacgggggaggtcatgagaaacgtggattacacccccttgtaaattcctattttcacaagataatatattgtaagccggtcatgagattatatgtggtaaagttaattgactaacaaccccagggtctctctcccccatataaacccctcattttgtaagctcagggctgccacctccgactggtggagaagcctggcaggttaataaacttacttggcctga

SEQ ID NO: 1659 - DNA, 2310 bp, Homo sapiens
agcgggggtgggagctgcggacggccatgtgcgcggcggagaggccgggtggccaccgaaccttcccgcctgttctgcggggcgtctgggcatggctttcccaacctagtaactgcaacttttagcatcctacatgtaggacttgggaatatgtgagacagcgccaagaatttaatccaggagaattgacaagcttaaatgaaatccatattgcccactgattttgtgcagcttcagataagtaatctttctccacttagccttttgtaacaattgatgtaataaaggtttgtagtctttgtgtaatttattaaagcattgtgcctaaaatagaaaaaaagcataggaaccataggctgtgttttcttttgatttaatattttcatttcttcagttaatagaaatttgccaaattctgatgtttttctgtagcattatttgaatgagcattgtttatttgagtgaacattcagctaattgttacagaatcgttgcccccattaatcttaggctgtagaatgtagacaagtaaataggcatcatcagtatgatgagagtgaagctacttaatactgtggaatcaaataaaggaggaaccccttactaaaccaagagggaggaataaaatggaatgggactagagaagcaattagctttaataagggtattatggaagactttctagatgagaagcagtaagtacagatgtttggaggcaaacactagagagattgttgggtaaagaagacaatgctggaggtctacttgtgaaggccttgaatgctatgtgcagaagtcagcttctgagaaccaggaagaagatattgaaagattttaagtagaagaatcataggattgaattcattttagacagatcactgttacacaaaaatttgaggcaaacagaagagtttggagtaaacagtaggctgtgagccagtaatgacttggactgagttggtagcaggtaggtgtgaagaaaataaagtggttattgggagatttggttaactgaaaatgactgagggagatagatgtcaggtgactcccaagtgagttggtggagcagctaggaggatagtaatgtcttcactgagattagaaacaaaataagagaatatatgttagggaaggaagaagtctttgttttgaccatgtaaaatttgaagtgcatgtgagccaaccagtcatatatgtgtagtgtgcaattagatattcattcaacactgttggaagagcacctactctgtgcctggtactgttctacacactgaaataggtaaagcagcagcaaaacaaatggttcctactcctgttttttagagggaaacagcatataaacaagttttaaaaataagaggagagagaatatcccataaattcgtgaagaaggctgggtgcagtggctcatgccagtaatcccagcagtttgggaggccgaggtgggtggatctcctgagttcaggagttaaagagcagcctggccaacatggcaaaaccccgtctctactgaaaaaaattagctgggcatggtggcacgctcctgtaattccagctactccggaggctgaggcaggagagtagcttgaacccaggacacggaggctgcagtgagccgagattgcgccactgcactccagcctgggcgactgaacgagactccgcctcaaaaaaaaagagtttgtgaggaaaattaaaagctgattggataaagtgttactctggggaaaagagagcaaacttttggtggttggttgatcagagatggcctcactgagaaggtattagaaaggacaagaacagtgtgagaccaaagggaatagctgggcaaaggccctaaggtgaaaaatttgttgtgtttagggaatagcaaggtcagtgtatccgaaatctagtgaccaaaagaaggaatgataggaggtgaagtcttcagcctcaataagaaggtgaagtgcactggaagccattgaaggatttaagaaatggagtatctggccgggcgcggtggctcacgcctgtaatcccagcactttgggaggccgaggtgggaggatcaagaggtcaggagatggagaccatcctggctaacatggtgaaaccccgtctctattcaaaataaaaaatttttttaaaaattagccaggcgtggtggcgggcgcctgtagtcccagctactcgggaggctgaggcaggataatggcgtgaacccaggaggcagggcttgcagtgagccgagatcgtgccactgcactccagcctgggcgacagagcgagactccgtctcaaaaaaaaaaaaaaaaaaaaaagaaa

SEQ ID NO: 1660 - DNA, 1236 bp, Homo sapiens
tggatcgatgatgacttccatatatacattccttggaaagctgaacaaaatgagtgaaaactctatactgtcatcctcgtcgaactgaggtccagcacattactccaacaggggctagacagagaaggccaacatccgtttgttgacatgggttatatcaaggcgtctgttcaggcttagaatgtggtctcttatgggtgatgggggtcacaggagagtggtggctcccatgtataggaaatttcttgtttgaaggactgtcagtgagggtgggtaacacatgcattgtctgcaggactaggtgaatgtccatgtggcctagcaagagttagctggtagcccgcctctggttgccaatttgttcttgagtccttgttctgggttctcaggtcccacggaggaaaacagatctgtgtggttgagaggtgggtacaaggccgcatctttgtcatttgttggctaactttgtccttggttgaggacattagagttttggtcaccaggcatagcctatgtgcctttgtgcccgtgttgtatcccacgtgttttgaggacatgtattttgcacgtaaaggtgagctcctgctccaagctggttctgataccaaaggagtccctggcttatcctaaactcatggtaggttaaagccttcctccttaggggttcagggccgcaaggcttttgtgagtggcattgcaggcgttgaagcagtgatgttgagagggatggtcaatgtcagtgctctttagcaggatggtgtactgcaggggcccccagccccgagacgagcatccctgcatccatgcatttctgcctccatgaacaggggaggccagagacaggcagatagtagataaattgcaggggactggatgacatggccctcgtgacctgtgcacctgtctgtctttctgaagcacgcctgtgttaactctgcacctcccaggtagcactggcatggagggcaggcacatgttggtgagggacaattgttaccttgtgtgagctgcggagataccaggaagcccctggacacaaatggcaaaggctccttcggaagttgttggatcccttctgaatgtaagcacttctttcccagagcactctgagtttcctcatttgcagggacaaatactgtgcgtggatcgatgatgacttccacatatacattccttggaaagctgaacaaaatgagtgaaaactctataccgtcatcctcgtcgaactgaggtcca

SEQ ID NO: 1661 - DNA, 577 bp, Homo sapiens
gaaccaccagacaatggaataagaaagcagaacacagtgtaattctcaagcacgaatatagtttaggtttggcaagagaactaggggagacccggagtgaatgccacacccaggatggccatgggaatggaaagccaaacacctctccagggtacactgatgatgacatgccacgatgttacttgcattctgaggccctggactcccactgggacactgactgggagattcttagagcactgaacgattggccctccaccttcccagcggctctttgggaaaagatgcccattgcatgaagcggggcctctcaaggaggagccccaggtcacctgttgcaacagaatcgcctgggagctccaaggcccagccccaacccatacccaatgagtctgaatctccaggaggtgcccagacatctgcacatccagcaggttcccagcttcacattgtaaggctccacctctttccacccccaggatcttcaggggcacagtaaagtgtccaccatgagctgccttcaccccagcccttgggaccatgtggggaccgggtgggaactctgggctcctgtgac

SEQ ID NO: 1662 - DNA, 581 bp, Homo sapiens
gtcagcagcttaattctttctctgggcacgagcagcctgagctgtgtcctggctcccctctgttcatctgcaaagacggacagctctgtctctctctttctctgggttccagcacgcctgtacagtgtcagcaaggcaattatgtctttacagacaatagtggcttagagccaagtgataagccttcccgtgttatggctacatggctgtgataacaggtggagttatacgcctgcactgtaaactcgctgagtcactctggatgtatacctcggcctgtgcttgaccaaagcacagccatgttccttgcagcaattcagctccgcgtactgtgccgtcactgtattccagtacctgtaacctaaacagctttctgtgccctgctattcaacgaggtgtcttcaggggaaggtgtcatgatgaatgtccagtgctctgggcatctccgagttcagccagatgttgatacaggtggccagagagatcgtttgcccaaggtcacacagtacgaggtagaagttggtattttcatctagccaacctatctgattacaaagggatcccctcgcagtacctgggca

SEQ ID NO: 1663 - DNA, 131 bp, Homo sapiens
aaaaagggcttctgtcgtgagtggcacacgtagggcaactcgattgctctgcgtgcggaatcgacatcaagagatttcggaagcataattttttggtatttgggcagctggtgatcgttggtcccggcgcc

SEQ ID NO: 1664 - DNA, 667 bp, Homo sapiens
aaaacaaatgcaaaacctgcagcatttttcgggaattgattctctgtacataaaaatgagattagtcaatccttttggtgtctgtttagcatacaatgagtacatccagatagttaagacccttggaatcaagattaagagaaccatcaattaaggaggcagtgcgcacctctccagggaaatttactccagtgcttcatcctacctcattggacacagccgaccgtgttggtcctggttccctcttcaaatgctggctcctggaaatagcatcaaagcaagcagctgataagacaaaactgggttgttgcttatgctaaggggaagcaccaccttgaaagagtcattgtagagtggaggtcgggagggcaaagttgagatactgaggttttggggtttggtttaaggcaggtcctttgatgtcggacttaatcagggctgggtaaggatcatgttataatagtttaggattgttggtcacagttttgtattggtggtcacagtgaagtgagggcttcaaagactcttggagctttctttgatgctccctgttgaagagctgtgtggttttattaatggattttcctgaactcaaggagtaaggttatttgcaacttttgtgtttctgggcaagcatttcctggaataataaagtcacaataataga

SEQ ID NO: 1665 - DNA, 455 bp, Homo sapiens
tttgtgttaggctggcactgggttgggtgacaatcctcaggaattgtggagcctgactcccttggaagttctctgccagctcgctgaccccagtcctcgtaaacacagttctttgccaagccctttccttgctccaccgctcactgtgatacgagccccactccaaaccccagactcccgaactgatctcatgtaaacttcaggaccatccttttggggtcctgctcttgcggttgcgaaattagtttgaggaggccatgtgagtgaatttctacagcataaaagaaatcactgatcatctgaccaggcccagaagactcctggcttccacacatacccatgaatcacctgattaaggcccactctcaggattattcccctatcaatgcactgaatctactttcaaccaaggtaccaaaaacttcattgctcaatctaataaactcctttcaatg

SEQ ID NO: 1666 - DNA, 710 bp, Homo sapiens
cgcaggctcggcgttggcctccgcggcccgtgcgagtgcgcccttctcgggtcccctaggtcgcggggcagccggggcggaaggggcttgttcattattttgagagtttgttgtgaacgtcataacctttcgtccttaaatattgccgatacttgacctacgcaagagacaatgtcatgtgattcagcctaatatctcagaggatgcagcattcaaggttctatcttggaagcagagactgtgccctcaccagatgctgaacctgctgagcaccctgatcttccacttcaccttcatcagaactggtgctaagaattctgaatttattgaggaaataaatgtctgattgcaacaaaagaaaacttgtctggctttgggaaggaagaggcttaggaaaaaaattaaaggcgtctttactagaagttcaagactggggctgtggctgagatgtcacatggcagataggatcacaaatttctgttgtatctggatggagatcagcaggaggatctatgggtgagaagaagcacagttacagatggattctagagcctgcttgctgacacaggcttgcaactgcggactttataagcttagtttttaatctgctatcagctagcataataccataaatgcataagaaactaagtattcagtcttacgagaaatgctatcttgacctgaccctttctccaaataaattgacaaaa

SEQ ID NO: 1667 - DNA, 750 bp, Homo sapiens
actggaagcaatcgtttgttagtgaactgctagggataatagtgagaagatcctgtcctatttccaccccttgatccccgtacgcatgagttctggctaaggaagaaacagaaatatatgttggatgctgatctagagcatactttgcatcctaaaagaccatacatgagtctccaaaaggacattccaccattctatcaagccagctgcttcagggtgacggggaacacgagaagactgatgtcaacttttgtctcgtaatacacgaatctatgagtttctctcagaaaatggttgtctgccaacgctaactggccagctctgacaggaggtgcgtggcccaggaggagccatcaggccagttctctgggatactgctgtgtctccagctctgcagtttgctcttcgtcactcagcggcagacggagaggcagacacgagccccttgtgagccctcctccttaccgtcatctcacaatgctctgaaataaggaggcaaatggctgaggtcccctcagttgtagatgtgattgagttctatctaccagaagcatatgcctcctggaagcctggttctaacacctcccacaaaatccttcaagcacttttttctgttccaaggtttgcttatgggggacccagtgaagtgcttcagagccctagagatttgctgagtcatatgaggggtcagcaaacttttcctgtaaagggtcagataataaacattttaagctttgtagactgtataaa

SEQ ID NO: 1668 - DNA, 478 bp, Homo sapiens
actcacacatctgcaattgtctggctattgcctgcagctggctgctttgtgttggccttgcctgtatgactggaacaactggggttcctcttcttccaggtttaattcatgaaatcctgccgtaccttcaataccaagatttatccagtctagcacagtactccaattgtgcaatgcacctttatatgtggataacatctggacccctccatctacctgtgccaaagaaagaatcacaggagaatggagaccctccacgctaatacaaatatattccacttctattagaccacccaggccatggcattaactccatgacatgaagaaaatgcaggaggatgatactcaatacaacaggacttctaaagactggcgaaatgcttcatgatatcatcaaagaatgagatgtaattaaatcaagaatctcaagatgaaatcattctggattatccaagtgtgtcctatatccaaagaaaaa

SEQ ID NO: 1669 - DNA, 553 bp, Homo sapiens
aatgtaagcagtaagagagtattatgcaaaaatatcctaaggtaatttcagtataaattataggaccacatttattaataatatacgttatgagaacaatcatttgcagtctcactgtgaaggcaaaaaaaaaaaaaacaaaaaccaaaacccaaaggataaacagaaatagcacagtccaccgaatacactgcatggtgtttataactgtataaccaaactaagtaatctttcccctctctttaacttttatgcaccacctgccattctagatactatcaatcacactaaataataataaaaaccaaccaccttcaatctgatcattctgggcaggaaactgaatacagttttgaccagatcttcgagaaagattcatatacacgaaattaactagttctgttaaaaggctgctataaaaataccatcattacgagctatacagaactttagaatccagctaagagtgcagaaatactgaatttcttaatttatgtggagggggctgtaaacccaaaggtaagtccgctcccggccgccgctcctttgtttt

SEQ ID NO: 1670 - DNA, 1349 bp, Homo sapiens
cctcgcaggggccggagcccggggtctgcggggccaggaggcgagggcggccgcgccgagggctgctagatccggacggggcgggaggggcaggccggcggtccccgggccacggtgcaggcgtcccccggctggctggccgggcgcgggctgcggggcgcgggcgggccgactccggggcgctgcgtgcgcgcaggggcagtcattcagatgaaattccagtccccggccagagacaccagcccgcctctgccttcctcctcccttcacaaatagaaacggaagggggagggagagaagtggaaaaaaaggcaaccggcgagggagggagggagaagccccggcggcgctccggcctgacccccgggcggctacttctgcgctcccccgaggcccggcgcccccgccgcggagagaccccgcgcgcccgtctccgcgctgggcgggcgcccgggctctgccgaggaaaacaaggattgatcaaactagaaaggaatttttctcaactgctaatgaacaggaggctcggctcccggccctcccctcccctcccccggccctcccccttcgcccccccggccccctcctccccactttcttttcttctcggcctctgctggggcctggaaggctcggggctgcggtcggagccagcctgcggcggcggggccaggccgagccgccaccctcagcgcccagccatcttgggctccgcggcggcggccggggtctgggcgcgctcgctgagggccccgcggcgtcctctcgctcctgattcttttttttttttttttggtgggatttttttttttccaaggggagggctggcggcctccaacaaattaggagagagagagggagaaaatgccaagtcccgatttctctccacctctgctccacccaccccggtcctgtccaaaaaataaaagaagatgagaattggaagaagtcggcagaaaggcgagagcccgcggtccccggctgctgcccaggcgacgcgtccggggcgggcccgcacccgttgctcggtccgaggtccgtctgtctgcccgcggcttctcaagggaggggagggcgcttcgggcagggtctccgcagccgctgtcgcctcagagctttatcctcagatcaaaaaagaaaaaacaggaagaaaaaaatcccaaccccaacactctcatcacagccaccttcagccatcttgcgcgtattattatttcaggaataatctgtttaataaaaatacctgcgtatccagcccctcccccgcgtcctggggtccccgcccccttttaataataatctcgataataaaaacgatcggcgggccgggcagtccgtggcggcccttt

SEQ ID NO: 1671 - DNA, 518 bp, Homo sapiens
cagacactgatttggatactcgaggtcctctgactgagtttcctaaacaagaaatgatacttcacatgcctgaaaatgaataatctagaatatttcattaacattcagctgaccagttttaaataagagcagttgggattgcattcaattaaactggagtctataaggaacaacagttaaaaatgggaacagaggtatcccaagagaactcttactgctatagtatttgtgaggtcatgacagtattatcaacatctcgggacctattaatagttttgtcaagaagaaaagaaaatgaatagcctagttcagtaattcccctcatttggaaaggaatcaagaacccctttgtgattctgttgacagctatggtccctctcccaagaaaatgtctactttgcattcaatttcaataaatttccagaagccttgatgtgcatccacaggttctatgtgagaaaaccctcttcttggatgatttctaagtctacagtgttgtatacttcacaggaataaaa

SEQ ID NO: 1672 - DNA, 1223 bp, Homo sapiens
aggagcgtctctgcccggccgcccatcgtctgagatgtggggagctcctctgccccgccgccctgtctgggatgtgaggagcgcctctgcccggccgcgaccccgtctgggaactgatgagtgtctctgcccgatcgccaccccatctgggagaggaaaggccatgtaaggacagagcaaacaggcaactgtctgcaaaccaggaagagaggcctcaccagatatcaaccttcatggcaccttgatcttgatctttccagactgtgagaaaattaacttctgttgttgtttaagctgccctccaactccgtctgtagtattttgttacggcagcccaaacagactaatacatcaagtaaccacacaaatgcatgtacaattaaaactgacctaactgttaagaagaggagatagggcaagagtatatttatcgagggtattctatctggtcagagatgagagagaaagatttttctgggtaaagttaacaaggtatatagggtggggtgaatatggagtggggaatggtcccagatagggccaattgcttgtgcaaaggccctggggtgagacagagcacagtttattagagaaaccaagtggcagctgtgtgattggggtgctaagagtgaagaggaaggtgatacaggtgagggtggagaagagggtgaggcctaacttcccaggaccatgcaggattttcactgctaacttgggccacttgcacaccagactggagctggaaatggtgggtatgggagacagagatcaaaataacctctagatgtccacttgcatagctggtaggtcacgggaccattcatgatagggaagcccaggagagaaccagatttcaaagagaaagtcatgaatttgcacgtgtcaagcttgttgtgcttttgagtcacttagaaagagacatttgtttgcggacctatctacaagtctagactcagacagagacctgagtcatgtcattacactgacaaggtgggagaggtgattcgggacagtcattctcagactttgagtttcaagacccctttacactcttaaaaaccatcaaggacctcaaagagcttctgtttatgtgggttatatctgtccatatttactgtattagaaatgtaaactgaaatattaatattaatttataataaacctgttttaccttaacataaaaaaaagaaataaaacatgcaaaaatattttactacagatta

SEQ ID NO: 1673 - DNA, 648 bp, Homo sapiens
cacgcttgcttgtgtactgctcttagatgatataaaaacaaatcaaattcccaaaccaaaaagctgcactcttttgtctgggtaaatacagctatgacatgtctatttccatggtttagaatatcaccagtgggaatctactgtggaaaattgagtacaacactatcatcatatgatttgttttgctcatatttggctgtgccattggctgcggagccaggcagcgaactccacacaatgaggagcctgtgaaaacgcagagaaggcaagaaaggatgcaaacatttaggcagcatctgatggtagctggcttgtggtttacctggcctttggttagataactgtgcctgatccctatggccaggaaggaagacagtgctaatgaaaatgaagatctgtacaacaaaagtacaggcctacctcagagatattggagtgttcagttccagaccacgcaataaagtgaatatcacaatgaagagctgaagaattcacatttgggctgatgggcctggggtagggatgaccaacagaccacatgcttcttgtctcttctactccctgatcctctgatagacagggctaagtgatcatccactccttccaccctccagcctccgagtgggccacttttcaagcatggaattc

SEQ ID NO: 1674 - DNA, 2418 bp, Homo sapiens
agacgcatcgactgctctccttgtgcccctgctgacattcccaagagatcaatatcctgtaaaagcctgaagattgcttcctttaaatgagtcttattcggaaaaacttaagatttgatcatagatctattttaagaagtgccaagttaactgacatcgatgccatcgtatctggagtccctaggaaatccagggggggacaatgaaccgtaggaagactcggactcgggtctgcctgtagcactcggagcctgcaaggcaacacagttattgagttctattaaaattacttggtgtggctataaaccaaaccacacccctgtagccaatgcgaagagcttcccgtaaaagccgtgcggtgggaaggcctctcgctgtctcctctgcgcggcaggcagacatggacgacaccgaggcgtgaattcagcctgcacctcctaaagatgagctgttgagggcgatggccacagcaagtccgcaccaagtgctctttaaacatgagtgtttctttaaacaaagaaccttcccggcattgaggtctgattaatgatgccccggcacctcctccctcactcagggatcacttccctgcggcgcgttcccagacgcaggcttccctcacggaggcgggaagatttcaggcgctgtctgttcttgtcttttgtcagcacggacaaggatggagaccccactggtcaggcgagccccgcggtccctgttcctcacttcaccacctggggaagcctgatccccatcgattcgcaaaggaacaaggaaagaacacgttttacctggatggatggtccccctcacggtggccttggaacccgcttcagcgggagaggcagcgcctcactcacggctccccctggccgctgctttaccagggagcgccaccccgtgccccgccagaggaagtgcaggcgccagcacagcacgggccgaaagccacactgtgggacccgcagcgcagctccaagaaatccaaagtccattcacaagaggagcttctccgccaaatcgttgaaaaataaaacgagaaatgagtcgccaccggtatccgctttagtcagccgtacgaaaacgcaacccggtcagctgcacttctgctgccagccctcctccagtcaagcaccggcctcgagaagggcaaagggcaggtaggagttccgacgcatgcggccacggggcggagtcacagttcagaggcctcagctgaacctgaagttatcctaagctcgagccccagagtgaggactcggggtcaggcatccgattccccatcagctcctttactaaagctgtgcagagaatccgaggctatgagtgggggtgggggaaagatgtacaggatgctttggtttcactcctgagatacgagaacgtcctctgaacacacatgcagatagctggacttctagacagaggaaatccaaatcgtttctttcctcccagcataagggaacggtccggtaagagctggtgtttatcgatgctacgtgccagaatggggctgagcacggcgcctcactgtatcctaacgtctaatgaggcagggaatgtcactgtcacactctgcagacgaggaagccatgctgtcagcaggtacacatcttgccacaaaaccagtaacctgtggcactgagatcgcacaccggtcgtccactgccaagtccgtggcctccttctctggggtttgcctgcctcttgatggcggccatgcctctgtcctctcgcaggggctggctcttccagtggtcactactttttggttgcaagcagcagagattccctggagggcttgttgaaagcactcacatcaacggagcctcagaaagggagctgaggccatgcacggccctgcagtttctcctcaggctttggtttgcatccctggcctgactttccctcaacaagtcctgctatctccacaaggcggccagcccagccctgtcctcaccttccagccccagctgagcagcccctccccacatcatcttcagctgctgcccaggctccgcagagcaggtgtccaccgcccatccagccattgtgtttagagggcagagcgacctgccgggaccttgacaacacctggccccacccacacgtcctgcaatattcactgaggaatgcacagcagcacatatgtgcctcatgtgtcctgctgtgatgcagcgagtggcacacagcattattgtgtcaatcatgtgtcttgatgtgatgcactggttcagacagtatcatggatgcagtgtttctttaaaactgtcaaatttgaggaaacaatctaacaaaagccaattgatgaacattctgtaaaggtgacataaatacttcaaaaatgtctctgacacagaaagaaaaaaaacaaaaagggagctattccagattttaaaaataaaagatatagtaact

SEQ ID NO: 1675 - DNA, 359 bp, Homo sapiens
cacgcgaaaccagaattccttccggagagcaaatccgtacagaaggtcgtggggggaggaccaggggaggagggattgatcaataaataaaataataaattaatcaataaataaaatagaaacagctcccccgccccctgttcccctagaaccacccccagttgggcacggcctgtggagccccatccctgcagggcaaggccggtttttgtgtccacccccctcccgacatgttccttgggccttatttacagattcacagttggggggcacggaaggggggtggaggggggtcccctccctccccggccccgtggggtcagggcagaggggtcccgttggtggccaggagcttcttg

SEQ ID NO: 1676 - DNA, 133 bp, Homo sapiens
gcgctgtctttgagcccccgccgagcttcctcgtggcgccgggggtcaatctgcagcgctagagcatgtgcttgcgcataactggggccgcctggcctcccgcgggcggcctttttaaccgcgagcgacaaga

SEQ ID NO: 1677 - DNA, 679 bp, Homo sapiens
ccgagccctcagtgggaacttgttccggtgctattccagtttgtggaagcttcgttcttttgctctttgcaagaaatcttgctactgctcactctttgggtccatgctgcctttatgagctgtaacactcaccgtggaggtctgcaccttcactcctgagccagcgggaccacgaacccaccagaaggaagaaactcccaacatcaaaacgaacaaactctggacaggccacctttaagaaccgtaacactcaggcgaggttttgcagtctcattcttggagtcagtgaaaccaagaacccaccaattccggacacgagtgcagagttgatgtgagaagaagctaatatggtatgaaatgcacccatctcggtttttgacctatagtattaaatgcacccatctcagtttttgacatatggcaccaggattacaaagcttaacaagtcatgatttagattcagaagttacaaagagtggaaaaggtcatattctttcttatgaggagacaagaactcaggttgctgcagatccatatggaggatatgcctctggttacatattttggtgccatgtgagcatgtcctactccggtggatttttttttttcatctctgagcttgacctgagattgaccatctgacctgagctataattttgacataaattttgactaaaag

SEQ ID NO: 1678 - DNA, 8217 bp, Homo sapiens
aggatgggttaggattgctgagatgggctggagccggggcagggggcctccagctaagagaggcctcctgagcttacctcatttggtctcagggctattctcattttccagatgagcagtgatgtgaacaatattggaaagcatcaaagaaatggatgtaaagtgtctggcacagagtgagtgctcagtgactgtgggtgccctctcgtccagctcctctctgctctgaacatgcctttctcacggcacttatgagaatgtgccatcgctgtttactccctgtttgtccccctctacatgctaaattctttaggcccagggactgtgttacactcatctccatagccccaggcctagcaaagtgcctcctgcctagtaggtcctcagtatttgctgaatgaatggatgatgatttcatggaagaatcactccctaaagtttccagcaacaggctgaggaaactcaggatgaaaacatcatgtctcttgcccagtcttcaccatgctttttagtggtggtcactgcactgcatgttttctttaagaagggtgagctcatgccaaggacgagggcatggggtctgtgccgggcacttcccagttccacgttctgggtgtagggaagagggaggatgcccacagagagggagggaaccaaatgcaggaaaggagggcaggaggggcagtgttggctcctggcgggcctggcatatggctgtgctccgagttacttctggtcctgtgtgtggggctgaagcttcagctgccaccagacatccctgccatgtccctcttgagagtcctaacctcactctcaagactcaccccgatgctctccatgaaaataaaacgcaccttccatgaagtgtccccagaaagctccacgggggaggaagtgccacttagaaatgagaaccaatcccaggtgaaagtcatgagctgaaaggcccatatcaggctgtcgtggatgaccttggatgcccctgaggtgtccttaaaggaggcagcattcgctttctcccagtgtgtgtgtggcagaccacatgcaagcttttgggctgacccagttgtgactatcactgtgtcctcgggtttcatcttggggaagggagttgtaccagttcttactcctggaggctgatttcctaaagtgcaaaattgggccagtctgttgaggcccaagtgttctggaaaagatctctgacagatacatggaaactgaatttagttgctggttaagagctttcatgggagcaaagctcttggctgtgggtttcttgattgtcaggtatacattagggcagtggtccctaaactttttgaccgtggagactggttttgtggaagacagtttttcatagattggtttcaggattaaactgttccacctcagatcatcaggcattagattctcataaggagcgtgcaacccggatccctcccatgcacagttcacaatagggttccagctccgatgagaatctaatgccaccgctgatctgacaggagttcaggtggtaatgtttgtccactgctcacctcctgctctgtggcctggttcctaacaggcaatggactggtaccggtcttcggcccaggggttggggacccctgcatcaggggacagaacaacattttgcagaagggaaaaactggtcttcctccttctccttttttctgtactcggccttctctcacttgtggacacttcgtggacatagaagaggggtgcaacactgcatctggttcctccaagtgtggtctaagacccgcaacctctgcatctcctgggagcttgtcagaaaggctgaggctcaggcctcagcccagacccacaggatcagaatctgtatcttgacaagactcccctggtgacctgaatgcacgttcaagtttgagaacattgatctaatcatggagataggtgttttgtgacccaacagccctcatttggattctagacccaaatccgtaacacactaactgtgtaactggggcaggttactctgaggctgttcgagtctccgaatcctcatttgtagaatggcacagaagtgcccactctattatagagttgttaatgggattaaattagtgaatgtaaagctcttggcacccagtgctgggaagggcagctatggagatgataatcattcccctttgccccccttcccaatcctggcacccaggaccaaggccagtgctctcagcaggagggaagcaagagcactggcttgacccattggtgctcaggacgggtagcactaaacagtccttccaatcaacttcacgtttcaagtgcctcaccgaggatgttgatagcaatgggtacagttgagtaacagtttactcgtattatttcattagatatttttattagtgccgttatttccatgcttttgaaggaattcatgagttttcaacttgtaaatgcaacacagtttaaaatagcagtctttaaaagttatggttgtaagttttaggccctctgaattaatgtcctgccctatgtgtctgggcatgaggccacagatgccacacagactgtacctagtgctgagtggagcctatgtggaagggctgcagggttcagctagaagtatccactggggcaaagctagtgttggaaagatcctggtctggcagcagaatgggcatcaacgttgtaagactgcatgtagcagggggtggctggatcacctggagcccagggacaagccttggcacatctatcccttctgattgattttacatattgaagtctgctctcatgggtctccttgccttgaagataattttctctcttttctgctaaggtcctgaacgtttctggcacattacttggacctgatggtaaacccattgctttgtcacaaggcactgggaggttatcagcactgagatgctttccaatgtgcagtctcaacccagtgccctcggcacacccacttcacttagacagtgggacctcaataaaaatgtgtctgaaaggacactgtgccatcattatcggtttaacggccagggccaatggggagaagggagcaatagttgagaagtgtaaatgtgagggatatctcacaaagcacgtaggaagccaagaaatgtaggtgaaatggacaggaaagatttcttttttccataagcctcttcatgtttatcttggaagtgaagaattctgagactactccatgaattgtcattgtggtagctactcagttattcttagataaaaccagcggtcccaaatctcagataactgtcaggaataatgttagaaaagtcaagatgaaatctttctgtgcttttgagcatcacacttggttttgatgcaggtggccaaaccacactgtcctgcaggatggccactctgtcagttggtgacttcttgctccagggagccctgggagctgataactcttggttggggaatgttcctctagctttttaccaattcagtctttcactgactggttattcttgcttttgtgggcggccatacaaatcatgtgctgtggggaagtcatgtcaatcatttcactgtctacaggattccctggaagcttgaagcaatttttcagataattaagtccacagaatacttttttttcctcaatgattgggatatctcaagtgagtcaaaactttattgcgattgcctcaattctccattttcctggtcatatatcaaaaaagactttctgcttcctatatgtggggcttagcatccacattgtaattcaccagagactctctggagagcttggcttggtcccatgtatcctagtacaagcttgccactggtctaagttagaaaatatacagatttggggcccacagaaatgtccaattttatactttttttttttaaatggagaggagtctctgagtgagagaggatttggaaaaatggccagcagataacaataacaatagtgactaacatttattgagtacataccatgtgttaactgtgtgaaataattttcatgtaaaccttttggcaacctaaggttggcagcatggaagctttgagagtgtaagtttcttgtccagaattttataactagaaagtgacagagcctggattccaacctatacccatggacaccagagtgtctatatgtgtctttccagtgagcgatggttcacactcattggaaacatgagtgccattggaacatactagtcaatatgatgccgaaaacagtaacagaaagagtgcaggtgttgaatacgtgttccttttcacactggaaagaaagatggtgagaagttggcatgtcttccacgcaattccatcccatcagctggtctccaaattcccactcctcttggttcccacttctctttgtctctttccagaaggaaacaaactccctgatgaccctcactgaaaattcacaaactttacaaatttcaatagattagctgtggcttctttttaaaatactcataggtagctgggtcctggagagctctaaagccctctaattttgcttgcagacggaagaagggaaactcgagtcactggagacaaaggggcaaaggcatgggtttggcggcagagggaaagaaatggtctgtgaccagggcttaagctgcctgtgttggctctgagtgacagtatgctcttgctccaaggaccttaattggctgatagagtgattgctttggccaaaggtccaattaatactcaagatttgaggactggttttccaaccccagttggatgactttcctggcaagcaaaggttaccgctgtaaattcaacttgcttccttaactgggcacccactctataatgtgaggctatcattctgtctggttaattccagacaagactttgtgagcagatggggaatttggattttcaaattcgaaaaaaaaaaaaaaaagcataagtgagtgtgagttttatgtagttacctcgatgctccaccttgtggaaaatgtgctaaatcccaatgtaggaggaggcaggattgcaaatgtgaagcagagtggttggcccaggggtttatgctcactgagaatgttctcatcaatagcttgctgtgattggctatggacctattgaaatcaccattaaactagaaaacaaagttactcagccctcgtgtggaaagtgtctaagacagtaatgcagaggccgtagtctgaaggtggcacctcgcactacagaacaatggtaggagctccaggttcggatcatggttctgaatttactagttgtgtgcacttaagttgcttagtctaattaataaagcagggatgataattcctctttacagctttgttgcaaggattgcattaaagaaaacatgtaaaagcataagggcattcaattaatgttacaagagcccttccctcaaccccaagggcggctgcagctgttcagcctgacactttatgtgtgttggtcacagtgctgtcttggagaatcacatacgggatagtgcttacctccccatagcagccacgtcatagcaaatagctcattagcatgcagtttcttccctccctgttcagcagcccagcagacaagctgtctcagagcctggatttcagcatgttgcactcaccgcaaatatcctgcaggctgcccactccattctgctgcccttcgcaaggcttcactttgccctccaaccctttttttctcttgtttaccagatggaacgaagtctgtttgtggaaacacccttcccctctgtttacttggacctgattttgaaagtaacaagtcactttatttgggctggaggaaaaagcactaaaccagatgttgaggtgaccgggattcctggaagacattcttctctccaacgagacacatgatgcatgaagtaggagcccctggcaaggagcccaggctgccatggcctcgctcgctcctgcttcccggcatggccccgaggctagctgcctctgtactgcctgagcatcgtcccctggcgtgtcaccagactacccactacctgtgcttgcacctgcaggtgggcagttcagtcgttgcaggctgaagctccctgtcacaggagtccatcagcactggagtttaccaaatggcccagtccaggtctgtgtcatattgttttgcaaaagcaagaaaactcattcagagcttgttacttttatccctgacttcctaagtgagcagtgtagccagagaactacatcccctgacatcctttaagagccatgaccactcctgcccttgctttgtgacaggcactcctggatgctgaagtgctgttgctgtgcaccactatgcatcctgtgtgaggatgagcactccagtccttgctccctcttcccgtggctggctcattagccagagcaaactgtggccttgaaggagcagaaggagcatttgactcttcccagctctcagtctttggaaaattgagcaaagtggaatgaaagccatttattcatttaactggcagttatttattgagcatctattatgtggcaggcaccgtggtgacactgaaaagagaagggtgaacaaggacagtcctgagctcaagcaggctgctggcaggtggtagtgggggcagacaagcaaaggggcacccatgccatggcctgcaatgcaccacctccaggacaaggtttgggacccatccctgggtcttgggggacattctaaaaggaagcagtggctcagcatagacctgaaggacaagaaggcaccagtcatgtgtggagtgggttggtggagatgcgcagagtgcaaggaggtctggaggtgagacctccaggcagaatggagggaggtgtgtcccatagcatgtggactctaaggggctgggagatcttaggggtccctggaggctgactgaaggctggccagggagcctgcctggtaagggcctccaaggtcaggtttgggtgtaagagtagccatttctagcactggttgaggtgcacttccctgtcagtgccccaaaatccttcagcagtgtctgatacgatgttctagactggcattgtttccagtgcaggccctgtctcattcttcaggaagcatgctcatggcaatacccggagtctccactgcaagaccagagtgacggaggcagcagagctcctcagcaggccaggagtctccagaggcactgccgaatgtctaagaagcaacctcattgtattcccaagacctgggaatccaggtctcgcagatacgatgatacaatctatagccaggacatctcttcatgtgtagttttcaatgaatactaggataagcaactatcccagtcttcccaggattgaggggcttctccagatgctgcacttctggtgctaaaaatgagaaactgaaatgaattagtcacccaaggaatgctgaccctgtgctatatgatcacatttactctttaaagcaatgctttgagaacaattgagctgcatagtccctgcaatcttataaaggcatttggcctggaagatgctctgcagccatgtgccaagaataacggctatagggacaatgtttcattaaccccaaagcagcaacctgaacctcttactgtacaatatctgctccgttcagaattagctcgacttgagtcacaggatgaagcttaccaaaaggaatttccacgtccaaggaaggaaccaagatcactgagaggttatagtatgaaaagtgaagagaaaaaacctattctaaacattttattaattgtcaataattattttaaaatatttaatatagtctcctacctggtccactggcatcaagctgccaaatttacacggtcactttgggaagccagctggcaggcaaacatggaaagtgctggctcctagcgtagtgagaagaccacagatagatggtaattttcttctttgttttatttttctttttcttctctccctctttttcttccctcttgcctttccctcccattgcccactttctttttttggctgccgaagatttattgcctttcagtacttatagatgatgttttcataagttctaatgaggtcccagcagtttttaacaataacaggacattactgttcctaagatatattatgtgttttccctcatctttctcccttgaatgaaatgcttagaagtaggctaacccccaattcccttccctttactatgataaatggctccattacttaatagggctaaatactctgctgtgacttttatactgctgatttgaataaaatcttacgaaaagct

SEQ ID NO: 1679 - DNA, 398 bp, Homo sapiens
aggtgatggaaattagagtcctgcttaaaaaatacagatgttctggaatatcaagcaacaatttcaagctttcacacttctggattgaaacacagtttaaagagggaataaaaacctgaagaaagagccacaggactggactgagctaaggcatgttaatagccatgttctagagaaacgatctatgaactcctctgctgaggtccccacacctgtccttgttctctttcttcccgaggctgagtgtctttcctgctgttctgtgatgcttttgcaacactaatgaataaatctctctccaggaattgttttctttttcatgaaacacctctctcctcccttatctcaccacaaaaaagtaaaaaaataaaagaatatttaatgttcagaatccacaa

SEQ ID NO: 1680 - DNA, 950 bp, Homo sapiens
gccagccagcgccggcacttcggagggaggaaggaagcacctaaggcgctgggggcggaaacgctgaggaggaggggtgcgcctcaggcgagagctggccggcgccgacccggcctggggcagcggccgcagctccccgcccgggaccgcgcaaaaaggcccaaggtcccgggccgcactcaccgaagtccaggaactgcttcatggagagcggggacggcgagaagcgcgcgtagaagtccacctggcccggaacgccgcgctcggacgccgggctggagcccgagtccgagctgaagctgcggctgaagccggcggcgcgcagccccgggcccgggccggccaaggcggctccgcgaagcagccgcgccagcctcatgccgagtcccgctagagaagccacagccagtacgccaggtttccccgcgcctctgccgagtgggttgaaggcaaatacttgaagttgcaatcgaaggtcaagaaaatggaatcaagaggtcacaatccttctctgatgatggcttagaaagctggaagacactcaacattgaatcctggggctctgtgccatgcttgctaggagaaacagccaccatgagtccatctttcagatctcaagtgaacagtcattctccagctgggattgagaacaaggggaagctggccatagagccaggtgaccaaagatggaagacaaagggtgggctgtgattcccagagctccaagccttgttctgtcttgtcacaccaactgttactgatgaacagaaaagattttcttggaattcctatgcccctggccttgactctggagccaggggtcaggtgactcacagctgaagaagtgtggctgctattaaaacatgccagaggagagcttacgacggccactattgttaagagtatcattaacggtgtcaaaattcttgtcaaaaatcctgtgttgcccc

SEQ ID NO: 1681 - DNA, 1889 bp, Homo sapiens
caccccagaagggtcagctctaagcagaaagtcattgttgacaggaagaggggtcagactttcccttttccggccagcttcctgggtaccaaaatagcaacgcggcacaacaaagagttggggcggtggaggcctcccaaatgggctggaggacacaccgaccccaccccatgctgcccacccgcctgtgggatccaccatgccacatgacagccagcctgacagcaccagtcgctggtgagtctggtagccctggaaaccctctcacagccagccgagatgtgagggacacagagagaggaggtgccatttcagacccctatgcctggcacgttggggtgagaaggacacaccagtcagagctggttctgaggctcgcatccggagggagatcctggaaccagggctgaggctcgcatcctgagggacatgctggaaccagggggcatccgagttggggacacagtctgggaaggtgtctaaaggaagtgagaattgaaggagggacagagcgctacccagaagggcataactagaggctgggaccaggtcaggaaacatgtccctcaggtgtagaagctgcaagtgagaaaccaacgtggtaggaacctcagcaggctggctccagctccagaagctgttggagttgaggatttgttctctgtagaggagcaacatcacctgtgtagtctggttcctaggctaggccatcctctagaattctgtgtgagccagaatgttcaactaataagagaaggctgcacattgtgggtggagagcgggaaagagagggggcttgcagcatctgcaggggccagaaactacatgcacagagaagctttctcaatcggaaaagagcttaggaaacattgaactggagaacaacggaagcaaacctgtgtccgggagtggctccagtgaaacccacctctttctctgtgtatggaattccaaacacccgttgtacaggaggaagcagctacagatcgtcctactcaccagctgggtggcaccaccggctttaagtaatgggtaaactggctcaagcaagcctgggactcagagacagatgtgcgaagcagagatgttgccatgcctaggctgagggctttcagccaatcggtgaggggaatggaggagaaaggagagaggggtgttgggttgagggccgggatgttaagaaaaggattgtatcctgggagatgggctaaggatcaagaggatgaggagaaacaccccctcccacagcctctgcagcacccagagttgcaagatccaaagagatgttcctttctgtcctctctttgctgtccccctcccctcctggccctcccagcattgcagacccttgcctctggtttgcagctgggctaagggcaaaagcagaagcaagagcctgagctgctttttcctgcctggatttctgttcttgcagttgccacagagctggctccttctcatcatgctagtcttggcttaaacgttacatcctccaagaggcctttgctggccaccgcagtgacgtattccaccctgacatcactatcacagtccctgctttagttttaagacagcacttaccacgaactggtattttctctcgtttccttgtttatttttgtctctgccatctagaatggaagctccccgagagcaggaaccttgtctgtgttgttcatggctatatccccagcactcagaacagggcctggcacagagtaggtgctcaaatatttagttgattcatgatgaataataattgctaacattggttgagtgttactacatgacaagtacttatttcacatattaactcatgggccagtgagctataggcctctgggcaaatccagctccctgcttgtttttataaatacattttattggaa

SEQ ID NO: 1682 - DNA, 1005 bp, Homo sapiens
tgagccggctcagtgaggcggagcggccaagccttcagtccactcccactccccgatgaaaaacccaagaccgggtagcgcagcccctccgcgcacgcgtaacacgaggagacaccgcccacacgccagacgcgctgtgattggccccagctaccctcggaccgagattcctattggtcccaggtgtcgagcatgcgcactttggtcgtgggcgcgtgtgtggaatgggaggaggtcgcgctgtccatgggcgtccttggcctgcgccacccagagatgataaatagccaaagacgtcaatggcacccatggacatagtaagcatagtaggagctgaaaaactagaagcaatgacaatgtcaactattttgagcaaaaagaagcagtgtcttcggaacatttgatcataaaaccagaaattaaaggatgagaaaaacatttttctgaagcttatactttcacatttcctagagagcatatttgtgtggatgggggtgggtaaacactcaacaaaagtttctttaaaaagaagaaaccatcctggtttgatgtaatcaatggttgcccactgctcccttcctgtgcctgtgacccttcccaaactgccctgttgcttgcaggctcgcctgagctgaaaggcagccctcacatcccgtcggcacctccctggggccttctttacaccctggagaacttcacagggaatctgtgtctgtaacacaaaggcttcctggtccagatgtagatactaaggctgactggttatttaagtcctgcggacttactctgccaaaattatttaatcatgtaaaaataatttataattcttataaagtatccccttcataatataatgaatgttggtgctattacatttaagtgcacatgtacagtatacaagattattaataataatgttttcaaatagttattgtcaaagctatttttcttatgtttatgaaagtgcttataaaattcatgttttatgaggctggagatgtatat

SEQ ID NO: 1683 - DNA, 480 bp, Homo sapiens
aactcacttctttccaagcaggattcctgcagcaggaggtgctggctttcactttctgtggtcttggctgccagtgtccccagcaggacaggggtgtgccctgtcctgccatgggtggggagcagggggagttctggtgggtgtgcagctttagtctctgtcagcctgcacttgtctctcttgtcctcattcttgactaaatttcagttgaatttcttcttttttttttttctttgagacggagtaagacagaaaaaaaaaacagggaaaggcaatgcatgtgaaggtgctcacaacagcttacttacaataagggaaaagctgacagcgggggaagtgtctgagctaagcacattacagcccacctcttccacaggttattgtacagccactataaagagtcatgatgaaggtaatgcaaagtgatgaaagcctgtgagcaagaaaaagacgtgttcaggctgtggtcagaactcttgg

SEQ ID NO: 1684 - DNA, 774 bp, Homo sapiens
agaagtgcttatttccccttcgctttccaccacgaatatttttcctgaggcctcccagtcatgcttcctgttttgcctgcagaactgcatttatgaagtagggacctggaattgaagagactcctaaaggagagacagaagtttgaaagagcaagaagagtggatgtggatccagacagaaaaagagaacagcaaatatttgaaagagcttaagacgtactcctcaaggggtttctccttttgcgtctttctcatttcttttgctgccaccgtgtaagaagtgccttttgcctcctgccatgattctgaggcctccccagtcatgtggaactgtaccacagatagaagccttgagaagcttactttggtcagaaattttgcctttgtctgcaggcttctaccagttcgattccatctgtgggtcttaggtttcagttacctgaagtcaaatgtggtccaatacacagactggaataagagacattggagactccaaaagaatattttctggtagactgatatatttctcctaaaaaatttggaaaaattttgtgatgaagaagctacctgggcctgaagatatcttttctggacaaagtaaatgaatgattgaagacctgcaaactgtgtttgtaacgactttctaagattgatagcctccgtgtttcaatgctcatggagcagatggatatgactgacactgcccttaatactacagcatgatccaaagcatcaccaaagtcttcaaagagaaagtaaaaaaaaaaaaatgcc

SEQ ID NO: 1685 - DNA, 130 bp, Homo sapiens
cctggacctgttggcaccacagacagttgctctgctgtgcctgtggcctcggggcaaagagaaagtggcgatttctacactcagtgctcgggaaccagtgggcactgagaatggtttatggcctgacatt

SEQ ID NO: 1686 - DNA, 748 bp, Homo sapiens
ccgcctcggcctcccaaagtgctgggattacagatgtgagccactgcgcccagccttctttttatatttttaaatgtgtcttccccaaatataaatggttggtaagcatgccaaatatattcaataacccccctcctttatttttttttgttgaagtgaggctctccctatgttgcctaagctggtcttgaactcctggtctcaagcaatcctcctacctcagcctcctgctgtgttcatctacaaattgataagagtgaaagtcataatcctacaggaggattaccctatttatttcacaaaccctatttctaccggattttcatacaaggaatacaggcatgtgtttcacctcattaatttattttttcacttagttttgatgatattcacatatattatcaagtgtgcaaacattaaattcttgtgtacaaaactcaaatggtcttccaaataattccccattcttttttcttataaactttcacagctttacccttgacagactttactcaaggaaatctaagttggtcatatgtggctctttcactgattgctatttacttcattgtccagtagcttatgtatgaaaatataattataaaatgtaagggtcctacttccagtgaaactgaagggacttaggcccacttttatcctttactgagagcttatctctacttgataaaatttctactgtattcttggcttaactcaggtcctgtgattaaaaaaaaaatgcaaagta

SEQ ID NO: 1687 - DNA, 564 bp, Homo sapiens
aaattatcagaaaatgagaagcaccatttatagttcacaagaaatgcaacatggactccaatagaagtagatatcaataactgatacttcctctgtttatgaccccaaacatgctaaaatgctaaagtaatgcttgcaaagaatatgaatgacaaatgttatccagcagctttttggtttaaaatgattgccaatgactagcagcttcaatggtaacagtagggaggaagaacccttcagtacctaacaacgctgctgtctgctcctaagtggctttagttagagtcccatgttttaatggtaatactgcattgattttaaaggcatatgcagcaaaatgcggggggagggagagaaactggaagaaacataaaagttatatggttagtgtctttaaagtctaaaaatttaaactattgtttaaaaaaccttacatagttcacagctatcggcccacacagtaagcaaatatctgtgtgtaggatgggagccttcactttggagtggtttttgtaactctgtttacattaaaaaggacagaagagtgttttgttgcattgacaa

SEQ ID NO: 1688 - DNA, 4684 bp, Homo sapiens
ggcctccctgcctaggttacatgcagtggtcatcccggtcgctcccacacccgtgtgggctctgggatcccctcttccagccagcccaggggacatctggctgtctcaggacccagccatctgtaaaaattaggcaggtcccttcagtatgctcctggtcaacaaagaaaaacttcaattttgagaatggcatctgtattccgaagtgttctctcagatgtttgagttccactaagtaggggaagaagatgctgcatacaggatggaatatccaggggaagacgtctaaggagagatgcccagctgggagtcctatgcaaggggaagaagatgctgcatacaggatgggatatccaggggaagatttctaagaagagatgcccagctgggagtcctatgcaaggggaagaagatgctgcatacaggatgggatatccaggggaagatttctaaggagagacacccggctggaagtcaagatatgtcagttgtttccattataataaaaccactcatgttagatgagctgaactttcccttttccccagttcttacgatcaaaaagtggctgtcctaaatttcatcactcaatatccttgctagagtcttcctttgtcagccaggctggagtgcaatgtgcaatggcacaatcttggctcactgcaacctctgtctcctgggctcaagcaattcttctgcctcagcctcctgagtagctgggattacagttccaggtactgaatagaagctttacaaaagatcccggtaccggtaatagccctggggcgcccacttcacggggcctgcaggaagtcctgggaagggactgtttccacaagtggaacaagtgggccccccactgccctcgctgcctgcccctctctcctcattaaaccttcagagaacacaaaggagccgagagccccttttctctccatcttccaaagaagacttttcagtataaaaggtgccctaaatcctttgtgatgccgcccacaagcagcgtgcgctgacacaaagcaacgccgccggccactgctgcctgcagacaagaggccgactcttgtcctcgtctcgggtcccaagaacgggagtaagtttgtggactggcacgcagacttgtgtgcggggcagcccctggagacacaggcagctgcgatgtgagtgtgtcaggcagaggttcagctttacgtcagtgttaaagaaaaaaacctgtgaagaaactattcaagacatgcaaaaggaagtgtttcccacgcacccagggcaggatgctcggtgaggggtggtggagccgtagagcaaacatccttcgagagccaaatgtgcgtgacctttgacctttccccttcaggagtgtacagtgagggaatactcgggtaagcacagaaacacctgcaaaaacaactcacacattcgccagcagggagtcggtcaaaccaaccaggcccaggctgtggaatgttaggcggcggttaaaagtcacgagatacgcaccttcagatgggaaagatggacaccacctgtctcagcgggagaaagacagctgcagaagcttcacacaatttagcccgattcccacgaataaacagaagaaagggcagacaagtttgtaccgacggaggaaggcactgggaccccgcttcagtcgggcacgagtttcccccagagaggggaggaggcaggcagaggacttcactttctatgtaatctttgcctacagagtttgacgttttgtaactgtcctgtataatttgtcatctgaaagcctgaaaaaaatagccaattaaaaagctgccattggtgatgagaaagaacgaagctattgccacgggtggaggaggggcttctgcagatcggcccccggccctgcaccttctgcctcccatcagggctgagtctcctcaggcggctgaatatttcccacctcaggcaaatggacactaagctcctgagtcagacaaaacagtgactccctggagggctgtgtgcccagccccttctcccccttcccacctgctttgctcttaggaaagtcaccaaaggctggttggtgtggctcattctaggtttgactccttaggaatgtggcttttaccagcgtgctgtatccctcctgacaacacagccatctggtggagcgtggagttcattggaaatgcattttatttgcttgtagcatacatgtggctaaggctcagcacacacggagattcgcatatgtgtgcacacgccccacgcacacacccacacacgcatgtgcatcacatgaacgcgcgtgcacacacacactcctgcactcagtcctgctctattaacaggttcttgggctctgcagagctgacagaggccgtgttgggtgcggcaggacaaggctgggcgtgcaggcgcctcctccacagggcactgctcatgcgtcacagctgccagacggaggctccccaatggcgacgctctgacaggggtccgtgactctcctcagggagaggtggctgtttccaatgtcctccctggtgccctgtggctggcaggaccctgcccaccctctccctccccgtccaagctctgttttcatctgaatgcagcagccacgactaacacgccaagtgtgtcctccatgctccagagcctcagatctggtcagagcaagttcttactcagcatgcagatgtgaagtcaggctttattgaagtatttacacagctcattcccgccacgtggaggagtctgcgacattccacacacaatgacagttaaagacacctgctgaccactgggtcctgcttcccctgctcaccaggcatctgtcaggaaacagccggcccctctaccaggagaaaccagtcagctccgctgaacagtggcacatgtgcggttgaggggagattgtcccctgagcacacctgatgactgatgactgcccacacccaaccaccgaccatcaacaaccagtgcctggtaaccacctgacacgtccactcacgcccacttcctcagcgtcccctctgggtcacagctcagtgtcggcacctggccactgacccaacaccttcagttaccacaaatctttgtttcctcaaaaacctgagagtaggtgggggatgctcccttttgtcctttgaaagctgggcaaggctgggggtgggtctgtccaaaccctacaggggaggaacagccgaggggccgcactgaacctggggtctgcagcgtccacctgcctccctctcgctccacatgctcagccgtcctttcctgggcacctggcctgggccgtttactccccagtatccgtctgtgatggatcctctgcggcccccagaaatggtgggttgttctgtagatccgaccgcctcacctgtctccccaaaccaacctcgggttcattctcccagaagtccagggatgagcttgttgcagcagaggggtgtggccggcgtggcccagggtgtgcaggacagggtgcggacctttggggattgaggggtctctggacactgctgctttgctgtcctaacagcccctctgtccggcctcattttaccggggatatgggttttgcaaaccaaggtgacactgacaggatgtgtgagcttccctgtggctgcctcccggcacagctgtcccgacctttgacatcgcgccccagctggggtctgtgatgccaccaatgcacaggaacaagacattcatttttaagggaaaagtggagtcaaatgtgctcagaacaactgagtcccacagtcggggcacctgggccagggctgggcagcttgctgaggtccatcgagcgctgtgggggccagggcttggcacacacatggagactgtgccctgatatccccacccttctgcagctggctcagcaacgtccccagacaccctccccacatctgcaaaccacccttcgcctgaaggagcagccgctagggctgctgagcgccagctctggggaggagggcttgaaacagttttatatgttgttaaaataattcttatcctaagattatttttgttaaaaagagaataggtttccggttcccactcagctgtatcccgcaccccacgtaaccccatcaccaggggcccgcaggcctggccgcagctggcctggggctgagcgtcaggctctgcggctcccacagggcggcaggtgacctcctgaggcagagccagagctgctgagggtcccacggaacacctgtgtggagaggtcccctccttcatgaccttgctctcctgatctggttgtctcctcagcccgccttccgtggggaggcaaaacagccctgtggagttgggtggggcagggctcagccgggccgggtgggcgccccaagagagaggacgggctgccctcctgttgatttctcctggtcctaacgtcaggggggccctgactggcttccctctgtcctgcagatgagggggctacccttatgggacctgggaggccgccctgatgtgggacggatgtcacccggtggtcgcccaggctcgtgctgggccacacaactgcgtttccacatttcctccttggctcccctattctcttgggccgggcgcagtggctcacgccttaatcccagcactttgggaggccgaggcgggcccatcacgaggtcaggagatcgagaccatcctggctaacatggtgaaaccctgtctctactaaaaatacaaaaaa

SEQ ID NO: 1689 - DNA, 651 bp, Homo sapiens
gtggttccccaatgcccccacccttccgtggccccagccagtggggctcagctctggccaccctgacatgaaggggaaggtccagcagccaaaccccaggggctctgaaggaatcggcctgtgggtaggagatgccgggtacctgcttttgtttctttttaaatttcccccaggtggttctgttgtgctaccaggatgccaaatcccccaggccccttaacctttgtaggagcacacgctcaaaagcaatcgctgcagtcagcctgcacacggctcccccacagaggcccaaacacacctggccacacactgcacacgtgctcacagcaccccacactcacacccacgccgggacctggctccctgaggacctggatgcacaaggagggacatgcgcgtgaccttcaagctgagggtgggatcgcactgctcgaacatgaagtcccagatatccagggttccgtccatcctggtggtaaagaaaacggtcggcctcacggggctccaggcagcatcagtgaggaggaggacaagggagacccaggttctacgacacaggtccaccaagtccctctaggaaccagccctgcgaaaggcctatgggtgctgtgctcgacaccctgctcctttcacacagccctggcagcctgc

SEQ ID NO: 1690 - DNA, 1571 bp, Homo sapiens
tgctcatagggccggagcaggagaccctaacttcctggctcccgcactccccaggcgcaccacatttcagcacgacggacagcgcagcactggggcgcgactggggaggcggggaccaataccacgctgtttcagcccggctttttcaaatctctcgggtctccgccctcatttccgtgcattttcgaaacgactgtcacagcaaccgaagccacaaaaacacattcacagaaaacggggaagctccagggttcgcttaccgtctgacaagtcaatcagtccgaggcaatttctccaaaggtttaaccagtccctaatcttctgctagctgagtgtaaccatcactggcaacatctcatggcatattctctcggcagctcagagaaaacgtgtgtcagtgtagaccatttgaaagacatacagaaagagccccattgctttagatcgcagatagatggagagatgaaagatgctttttcaaagggacaacaatttgtcttcacttcccagtgaaaaacccaacaagctggtctggaacatatgtggtccctgctttgacacagtgaaatgtccctggaaactgtaccaccaggaaagctatggaaatcagcaaggcagttgctaaacctttgtcagcttgaaatcagccatggtagggtgttgacaccacagaaatgctacacatcagtgtttcttcaccctccccactgtctctgaattaccaggatgccacgctaccattccagatcccatctgcccagaagaaaacctgagaaattcacctgcccagaggtttttctgacttactgtgtttcctctcctctggggccctagcaagtgtaataattaacccactgggcttaatgggattttaggcattcacatatccagatatgcggaactaaattagaagcaggaagacttccatgtttctggaaagaatgatgcaagaaggcagagtagtggttcccactgtctgctttgctgttactgtgtaaagacttacattcttccaagaattctgacttcacagacagctccccttctggattgtctcctaaccttgaactttaggagcaactgtgtctcaggaccctttgacatttcagtaccagaaatcaaatgtcgcttcagaagcccggccctccaaagatgtcacaatccaacctcccacacgcacaggagaacagcgcgtttggagggatgaagtaactcaccaaggtcacgcagtcctgcagagccaggatcccaacccaggaagtcctcagagccggccctcgccaccgactccctggaggtatgtccatttcactcaaatacccaacagattgagggtttaaatgtaatatgcccattttttgagacgtccgttctgttcagagtttgatatcttattttataaagtggaggtgatcgtggagccagtctcagggctgggtgttgtgggggcgtggatgaggtgaggcgggtgaacacggtatttgcgctcagtaattgctgggctgcctgtaactctaagcagagtcgaatgtcattctggaggggaaattaaagatgatctaagcagaagg

SEQ ID NO: 1691 - DNA, 4271 bp, Homo sapiens
gagtccgtcatcccaagcagtggcaccttccacgtgaagctgcccaagaagcgcagcgtggagctgggcatcaccatcagctcggccagcaggaaacgaggggagcccttgatcatctccgacatcaagaaaggcagcgtggcacacaggacgggcaccctggagccaggcgacaagctactggccattgacaatatccgcctggacaactgccccatggaggacgccgtgcaaatcctgcggcagtgcgaggacctggtgaagctgaagatccggaaggacgaggacaactctgatgagctggagaccacaggtgccgtcagttacacagtggagctgaagcgctacgggggtcccctgggcatcaccatttcgggcacggaggaaccttttgaccccattgtcatctcaggcctcaccaagcgtggcctggctgagaggactggtgccatccacgtgggggaccgcattctggccatcaacaacgttagcctcaagggccggccgctgagcgaggccatccacctcctgcaggtggctggagagaccgtcacactgaagatcaagaagcaactagaccgtcccctcctaccccgcaagtcgggcagcctcagtgagaccagtgatgctgatgaggacccagcagatgccctgaaaggaggcctgccagcagcccgcttctcgccggctgtgcccagtgtggacagtgctgtggagtcttgggacagctcggccaccgagggtggctttgggggcccagggtcctatacaccacaggcagcagcccggggcacgaccccccaggagcggaggcctggctggctgaggggcagccccccacccaccgagccccggaggacgagctataccccaaccccagctgacgagagctttccagaggaggaggaggaggatgattgggagccgccaacgaggcatcctgtgtcaccgctctccaccccgtctcatctgcccctgttctaactggccaccgacagtcctggtcgcccctaactgcgtctttcccctattccgtgtcaccaaccactgccccggggccccagaactgccaccgaggacgcccgcctgcctgcccgcccacccaccctatggcccctcgagcccaacgctgggccctggggccccgaagactcctcaggccccagcccgcccacccgcctgccaggagttgacgctctctggttcctacgttacagcccagcccctggccctgcccgagaggagggcttctggcgcatgtttggagaagctctcgaagacctggagtcatgtggtcagtcagagctgctgagggaactggaggcatccatcatgacgggcaccgtgcagagggtggccctcgagggcaggcctggccaccggccttggcagaggggccgggaggtacgagcctctcctgcagaaatggaggagctgttgctgcctacacccttggagatgcacaaggtgaccctgcacaaggaccccatgcggcatgactttggtttcagcgtctcagatggcctcctggaaaaaggtgtctatgtccacactgtgcgccctgatgggccagcccaccgtggaggcctccagcccttcgacagggtcctgcaggtcaaccacgtccgtacacgggacttcgactgctgcctggcggtgccactcctggccgaggcgggtgatgtcttggagctgatcatcagccgcaagccgcacacggcacacagcagccgggccccccgatcgccaggccccagcagtccccggatgctctgaagtcagcatgtgggccgaactcctaaggggccacccaggcagatcctggctcccagacacgtagctgggctggagaagcggccacccactcattcatctgttggtctggcagactctgagcctgggatgatgcttggtctctgttccccaggtctgtggtgactggggtgccaggcagggaggtcctgccctagttggagtgacagctggggtctctcgccaagttgggtctccaagatgcccagaggagcctcccttaagaagggttggcacaggctgctcagccgagaggagagaggcctgggggctgtcccaggtctctgtggggcctccttggagaggtcgaagatgtagggagcacttcctcccagcaaagccatggagctggaatgagctgcaaggaggagtgagttctcggtcacaggaggtgagcaggcaggagctggataccccagcgcagtcatgcattggggtatgaggcattcccatgatgcgtgcacacgcgcttgggggttggcttcctgatggggagccacttcatctagagactcggccaccaggaaggatgctgcttcggatgggagcccagctccttcgcttctccagaataggggtttggggcttgctagtcctgagattctgagattcccagaatctggtccccacttatgagactcttaagttggggcgtctgggatcccaggaagtgctggccctttgattctgaaagtgggtgattctttgatttcagcatctcagtctgaagcttctgggacttgagactgtggttctgggcccattgggcaggctctatgggccttgggctctcagccctcctgcttcttctgtaggccgtgtggccactgacccatctgcacgtccgctcagcccaagcccctccatgtgggaggggtcattttggggcaaaagaccctggagcttccattcacctgccatccagtgaaaattgaaaagcgatggacgcaggacctgtgaggcggtagcgctcctctttacagccagatcagtggaggaagaggagaaagagggagggagatgggagagaaatgggccagagaaaaagatgggacactcttgcccagtggagggtgtccaaagtgcttattcaaagaagtctattcccacttgaaatctggaagcaccagcatcccttaaaatcattgtcctcagtgtccacaaatcagagaccctcttcattttgagaagggtgtgggcctcccctggtggtctagtgagtggtgcctgggatggagtgggcgggcaggtgtagccagggctggggatgtgctttgcctggcccagttctcacaggggtctcaggaaaacggggcacccactcccacctccatctgtctccaacctggggtccctggaggccagaaaagtgctcttccatttgagggaacagatgaggagtcaagaggtctgttcttttcaccctgggtctgttacctgtttgctgtgtgaccctgtctgggttggacccccagcccctctggacgatcacgggtggacagtctgagcagacacaggcctcctggtcagggccggaaccatctctgccgacccaccaaggcccccttggggacctgcccacgctgtctcctggaggcctgcctcccttacccctcccctccacttcgctgggctctgccccttggtgccctccctgagggccctgcatgcttgtgcctggggtgctcagcgcctctgctatcttggattcccgtgtactcagcccagagtgaaagggcactgtctacctgtcacagggcaccaagtgaaagccaagagccctcacttttgagggtgagggacagcacagcagaggtgtggcttctggatgcaagcagccatagctgtgtgaccttggacaggtggctcagcctctctggacctctgctaagcaacagggctggacaggacacactctcagggcctctcggcttgggaaaactgcattgactccaggactccaggcgagggaagatgcacccgactctaactaatacccccctccctcctcgggctgaggcctctgccattctcccaaaagtatgcaatcaggcccgcggtgggcctcccagccatgccggcctcctcatatgcaatatttcttctggcttctcatggggatggttcatccccgacttgaaatttcctgacacctttccccagtgagcgccctgcctgcctatgcattttgggaacagcccctgtgacatgtccccttccacctgccctctcccccaaagctgtatttttctctggctgagattagaacacattccttgtaaagtatttttctacatcgggttttcttagggctctcgggaagcacaaggggctgtattgcaaaggccgcttatggtctgtttggggccctcgtctaagtctttgtcccaccaggggttgcagtggcttgggggtaggtgccatggggatgattttttaaaataaaattatttaaatcc

SEQ ID NO: 1692 - DNA, 338 bp, Homo sapiens
cccagggaaaaagggacatgtggccaacagccctgattctccaacctcgtctccaactgggcagggcgtgcttacctgtgggccagggcctggagctgggcagggcccccagggcagttcagacggcaatgggtataggtggtcgccagcagctccagccagtggtgtgggtgcagctccaggtagcacagcaaagtctcgatggctgggggcagagcagggctcagcggacgcggggacagcccctccacacccctgtggcttaccccaggttcggaggagcgcagcgatccgctctgtgtcctcgcgccggttgcagtaaatgataatggaatcga

SEQ ID NO: 1693 - DNA, 2045 bp, Homo sapiens
aatagtttgttgcttttataagcacttttctcaacctctcttttctccgctggcatgagaatgggagggcctgacgagtcttatggtagcaagcgtccaggggaacccgcaatcctagtttttgggctcccatcaagagttgccaagaaagctgttgtgagctacttggaagtcaggacagctgggcctccagcctgcagtgacaatgaggctcagactgtgaatcagggaagaggggagtgtctcgggaaaggatggctagagcagactctcccccacccccaaagggactcagggatgaaaccaggagtctggcgctctttgtatcccgctggaagtctactcgagtgggaaacgattgtctcctgcggagagatggggaatattaaaaagaagcctttggctcttttagctatatagaaacagtcctcgtcctttctaaattttctcttcagctgaaattagcaaaacaaactccacttacaccttcaatattagattcttaattttgcaaaattcctaactataacctgggccgaatatagttagaaggagtaggtattctctaaagtgagggcttctcccagaccctccccaccccactcaccatcagcaattctgtccccacccccaccttggttgatattcactacactgtcctctctgtagaatgctttctttcactttttactgagtctcccagactagtaaattctcaacttctgtgctcaaatacattaagtgttcaaagaaatagttctttaacattgtttgggatccagtggctaatgggagagtgtggagtgtgaatgggggtggtggcagaacatgggtaatcagggagaggaaagaggaacaggtcataaaaataggcagacctacttcaatgaggacagtgcatcccgctgtcatttcttaatctgaacttctgcaaactctttgaaaaaaaatgcgcctgccttccacgtttccaacctctaaattagcgaaaccagattgtcctaataagaccttttgttggaaacacatgtagtcataaaaaggtagacggaaagtcaattagacacgcgcgcacacacgcacacattcacaagccggtgctaagtgtgcacccggcgcagctggctcccgggccgcggcgggatgcaaatacaaaacagcgacgcgggaaatcgatttgtcacaaagggagaggtgtaaacgcagcgcaaaggaattgcttgcccaatctaccagccacactctctcgggaccttgccccgccaacttctcttcgccagagaaacgcccaggagagcgggaacattttctagggcgctcccaagttggaattctcatcacagtaatatcagcttctagagtctcagcttttgcaacaaccctggcgccagaaattttcttatgcagcaccatcctgggactctggggcccactggcagtctaaatttgagcttcaattatctcgttgaagaggggagccaatgaaatataaagctttaagggtagcttggaaacttttctctttagaggaggtgaaatacaggattaagtgcctcactgagtccccagagctgaatgtcaaggccagccaagaggtggtgatttcggtttattttacatgcagaagtaggggcccgggttacctccttctcttagaattttggggaaattgatagtccagtgactcctacccacttttgggtgaaggacgatttggaatttgaagtgtggggagacaggcctgtgaagtccgaaggactcactgggtctccagatcccccaactctggaatgcagtgaatacccacccccatgtttcagagcatctctcccatgtgttagacgtcgtgcagtcctgcattttggctgagacacctaaccccggtgcactcaggtcagagcgccagggcttcaggcagacagcaatgggtcacacgggtccttatagttccttcctcttcccaggagtgtcattttagattttacaacacgagcgaataaatcatctccaaaccaacaagatgtcaccttcaggctccccactgc

SEQ ID NO: 1694 - DNA, 562 bp, Homo sapiens
agtaaagattaaatgtgcttctcaaaggcagccacttcatgctgctatgtcgaaagggccattattattattatattttaatggtaaaagagaaaaggagagaggttgagcgagcgagagagaagctaggtgtgatgatgacagactagcttttctgagaggaaaaggaaaagggaagggagagaaaaaggagagcctctgagctcaacggaggattgtgcctgagaagaacccacagagtgtcctcctggctgtggctgctttgtcattctctttgactagccagccatctaccttgctcaggcctggaataaaagaagaacaagaagaagaaagaaatgaaatgaaaaacagaaagaaaaaggagaagaaacatttgtaaaagggtcatcttcccatctgcctcccctccttttcctttcatttttggtggcggcacaggaaagccccacttccagtctgatgaggaaagcgacaatctatcaggtacagaaccaggggctgtctgcgaagatggaggggaattatgcttcggattcctctgaaatattggccaaaggct

SEQ ID NO: 1695 - DNA, 530 bp, Homo sapiens
ccatgagtcacagcagctggctcaaggctgggaggggaagtaaaacactaaatctaaggaccactctattcaccctacagtgactgctctttttccctcctgccacagtccagggtaggagatacttctccaggctctcacttatgggggctttcctgctggctacatcactgaaatggaatctcctagtggcccttctccctctacagctctggtgttacactgaaaaactagaagtttcaaaacagacaagggaaaaagagaaacatcagaaagtctgattaaagtagaagcatcatatttctatcaacgtatccactgtgcttggacacaattgcaggcccttgacatcttttgcctggattattgcaacagcctccaaaaggactcgtctgtctccatgatacccctccatcctcctctgcatcatcaccaagggaatctttgtaaagcaaaggcatgatcatgcttatcacctggtggaaacccttcagagactctccactccccagagcaggcaccacatcgtt

SEQ ID NO: 1696 - DNA, 3452 bp, Homo sapiens
cattgaggacatccaaaactcactcaagatcaccaagtggtaggaaagtactaactcctgggcatagccctaggggagtgactacaatgtgaatactcatggaatgcctagccaggtgaagaagtgaatgcatgttggcatcccagagggaccccccttaagagggcatagtttggggttcagatttgactccagcatactgttgaaattgggcacagggggctagtgattagtcaggatcaatcagtggagaggagattaaaactcacatctgggagtccggaatcagaacttgtagttcttttttttgaaatggagtctcgctctgtcgcccaggctggagtgcagtggcgtgatctcggctcactgcaacctctgccttccgggttcaagcaattctcccacctcagcctcctgagtagctgggattacaggcgcccaccaccacagccggctactttttgtatttttaggagagacggggtttcaccatgttggtcaggctggtcttgaactcctgacctcatgatccacctgccttagcctcccaaagtgctgggattacaggcgtgagccaccatgcccagccctatagtagttcttcttttgccccttaatatcttcacccacatgtcctgtaccctgcctgaaccctcctcctctttttgttctgatctttgagctccctagagcccataattctttagagcaggtatgtcccgagtctgaaacatgcccttatttgtcccaagctctggacatttctcaccccaaggcggatcaatcatgattaaatcactccaattaaactttaggctccagtcagaccttcagccaaatggaaaaaaaaactaggggataagggaggtagttggagcaagaaaatgttattagttgaaaccttacgggaccttcctcccttagtgagtctgttggctaaaggttctctggcttcgtgaattagaatcggatactgtttccaagttagcaaaaccaactctaccccagcaccccacgaggaagaatgtggaaggatctcccattggccggttggggcaaaagcctgaggcaatctttcatccccttttgccaaggcgagactttcccagtgacggtgatgtagttggccactctgactatgggtggactcgggtgtagacctctgaagctgagatcacacgaaaacctggcctccccgccatgtagctgttggagagtagaaaaatagagcacgcctgatgtttctaaatgagaagactttcaatagtaatgaagaatccatggcactctcctcaccctcaaacacatggcagtcattcacatacaggccccaaagccactgttagtgctgcagtagctcctgtggacattggaaagcccggagagggcgtggaagaaatcagctggcccccggcaggttctctggggttttgtgcccaaggctcctggagccctaaaaactttcaaaagttaactccccacgtccccatcctgcttgggtttctggacttttctgaggcaccggcagaggggtctcgttgctcccttgagtgtaggggcagccctttaacctggctccttgagtccctgctttttctgcttctgttgccttcttcctcgtcttcctctctctcaatatctccctctctttgtccctccccagttcctgacctggccatcccggggtgcccttgaccagccccgtgtctcctcagggtgtcccagcaccagcctggcacagagtggggctcagttagagtatgtgggatgttggtttcgccaggtgagtgaatgaaaggactcgaccaccacagctgagccactagctgggccatgcgaagagttctaggtgcaaaggctggagggtggaattcatttttgagaggtgtgtgagcagcttccgacccctgccccatttgaacgggggccttgctggtcgcgtccctgcattcacccgcgcggccatcccgtcatccaacagttgatcctaactgagcacgcccacggccctggtctggcctgggcaccggccaccgtagcccatcccttgatggcctctgtgtccccaggagggcgggccggggggttgcccaggggctggagcagtggactgtggctccatagaggtaggccggagggtgtgagggcagattcaagctatccccagggctctgctctggtcggagccagccccttctccctctctgccttccccgccccattcctgatgctgaactgttctggacccctggccctgagtctctcaggaccaaagtgggcacgggaacagctgtagtgtgtgcccccccgggctttggccacaggtctccctctcgaggtgtggttgtgactgcgacccttcccttgccgtgatgccttcctcccccggggcttggtccagctccttcactctctagcagctgctggggcccacctcccatgccgaggaccagcaggggaaacctccagggagcatctgcaggctctgcttctgcccggctgctggcttgctctccctggtggctctccagcggccagcttcctcacccacccggcactccgctttgctctgtctcctgaggtgggcctgaccaacctccccttctctgcctcagtccctgggctccagggctcagctccacagccctctgcctagcaggctggttctccctgccaagcccatacctgtggtcacctggccctcctgtggtctgagtaccactcccctgccccaggagccactcccactccagctgcctgtttccagcaggttcccagtgcccccgacaagcccctgctggtgtctccatctcctgccaagcatcctccagtgcctcctcctgtgggcctggcctcagggctatggacagactcctgtcccatcccagagacccctcgtgatcgtgccctggcacgtgggccgtggcccggctgggtcggctgaagaactgcggatggaagctgcggaagaggccctgatggggcccaccatcccggacccaagtcttcttcctggcgggcctctcgtctccttcctggtttgggcggaagccatcacctggatgcctacgtgggaagggacctcgaatgtgggaccccagcccctctccagctcgaaatccctccacagccacggggacaccctgcacctattcccacgggacaggctggacccagagactctggacccggggcctccccttgagtagagacccgccctctgactgatggacgccgctgacctggggtcagacccgtgggctggacccctgcccaccccgcaggaaccctgaggcctaggggagctgttgagccttcagtgtctgcatgtgggaagtgggctccttcacctacctcacagggctgttgtgaggggcgctgtgatgcggttccaaagcacagggcttggcgcaccccactgtgctctcaataaatgtgtttcctgtcttaac

SEQ ID NO: 1697 - DNA, 545 bp, Homo sapiens
ctctactgtgctagctaatgcaaagctacctttgcatatgtaaggtctagcaggggagaaccaggaggtaggcagcagaagatcctttataaaagaccaagcctgaaatctgaaaatccctgaaattccttagaaattgatcatcttaactctttctttgccaagcccgcatttcctgatttatatccttgttacagctgaaagaagctcatcatgtaaaggtttatagcaccaccattttcctcagaggattttacatatgcaacctatggatggatttttataagaactataccttggacttcttgcatgaagttaggaaggttatcttcagaggctccaagttttaatgcattccagtgttgtcaaatccaaaagcaattaaatactgttgtgtggttttgaattatagcctgcttgttaaaatagctactgtttcccctaaggacagcctgcatttttacctgatgtcatctgactctgggtctcaagagagtggggaacctaatagaacaactgaataaatgtagttctaagacagtgaa

SEQ ID NO: 1698 - DNA, 1205 bp, Homo sapiens
gattccctctgctccacaggagatgcagcgagcaccaaagagccttcctccaggattaagcctgatgcagaagtggttacactgactacggcaagctgagccctgccggctgttgtgcgctccgtggaaagggagaagcacggtctccagcggctgcgtcaggagtggtgccttgtgcacacctcacagggagagaagtctccaacggactgagcggaggaaaaaagaaaaaaggagaaaaggaaaaagagctgcatacctggcaggcctactgtgtgcaaagcccttgagtgacacaccctatgacccacagcactgtggcaatcccagacacatgcttggtcactgggctgtggaacatacaggagccccgtgctccggaacacggaccacccgacaggagcacggacacagcagtcggggcgacgtgggtgcctcacagaagagggaaaaagccaggagggcggcacgtgggcgcaaagttctcagcttcgttagtcatcaagaaaatgcaaactaaaaccaaggtaagtgtgagggttactactgagtttcaacttgactggactaaaggatgtgtaactgttcctgggagcatcttgaggaagctgccaaaggagattcacattgagtcagtggacggggagaggccgacgaaccctccatctgggggggcatgatctcatcagctgccagcacggcagatctgcggaagcactggactggctgagtcttccagcctccatctttcttccatgctggatacttcctgccctcgaacatcagactccaagtgcttcagcttttgggttcttggacctacaccagtggtttgccaggggttcttgggccttcggccacagactgaaagctgcgctgttggcttcccgacttttgaggtttggggactcggactggcttcctggctcctcagcttgccaacagcctattgtgggacttcacctcatgactgtgtgagtcaatactcccaataaactcccctccatatatacatttatcctattagtgctgtccctctagagaaccctgactcgtacacacaagtactggtgaaggggtggagcaaaggaaactagtccactctcatcagggccaactcacgcacctggcaatctctactcatactgaacacaagtatgccctatagcccagcaatgccattctggacatacacgtccaaaaga

SEQ ID NO: 1699 - DNA, 320 bp, Homo sapiens
aaagtcatcagcagcaagatgggcattgtcagtctgcagaacgcattgtccacaatatttgtgaagatctgagccctcaggtcctcaatggtcttgaaataatggctccagtctctgacctggggtccctgcttctccaggtgctcccggattttgctctctagcctccggttctcggtctccaggctcctcactctgtccagttttcctgactctgattctgcgtgggacaaccagtgaaaattgcaggtgaagagaagaaatgcgtatttattcctccactgggaaaaaaaataccatccaaagctacatgacttgag

SEQ ID NO: 1700 - DNA, 576 bp, Homo sapiens
ttcttgtttttgtgtctttaactaggacttctatttggaactgagtccgacagctcaggactggctgctcaaactccacaatttaatgaaaaatctcagatgatgactcagaaaacctctaatgatctgaggaatatattaagggattccagagtcaaaggctgatcatggagggcattgatgagggaagacttcaggtggctggagaccagaagaaaggaacactggaagaatgaaaacggttgtgatgcactgcagtgtgaaaatatgcccttgagccttaaagaaaggggcttaaggccgggcgcggtggctcacgcctgtactcccagcacacagatcacgaggtcaagagatttgagaccatcctggccaacacggtgaaaccccgtctctactaaaaatacaaaaaattatgtgggagtggtggcgcacgcctgtagtcccagctactcgggaggctgaggcaggagaatcgctggaacccaggaggcggaggaggttacagtgagccgagatcgcgccactgtactccagcctggcgacagagcgagactccgtctcaaaaaaaaaaaa

SEQ ID NO: 1701 - DNA, 503 bp, Homo sapiens
gacggccacccagccttcccagtttacatgatcatggggagagcctgtcaaaagcaactgcacagagcctgtgcttaagatggcaggatcgcaagacagagcaactggagcaagtcctcattaagaagagccgcccgatgcatttggactgcgatgtgttacgcccatgagatttcagggttaatttgttacctggccgtggcctatcctcttccagcagatacagaggctactgcagtttgcaactttgcagataccagcagaggaagaaaaacctgggagactgctgctaacctaatgtggagacttgacttaaacttcagccagacaaaggcggaatcttaatatggaggggcctggctctgcagggaggtcacctgggctggctggatttcaatccagttacacagcaaaaaagttacaacccaagctttggcgatgctgagccttctactctcagggattccaaagcatttgataaactctttctttgttccattgtt

SEQ ID NO: 1702 - DNA, 1387 bp, Homo sapiens
gacgtcagcatggccgcggcccctgactacccagctcccttctatccctcgagcggcaggaatccgtccccacgcccttttcctttaaagggcaacgggccgaaggtggggcgggcggcgcggctcccgcgatccattcaggtcaaaagggagagtgatcaaacaggagagccgaggggacctatattcagagacttaaccggacacctggacagaccattacaacttgggacttttcaggagaatgagggaaatgtagttattgcacctgagcctcactccagctctgaggtcctcttcacttctctttggaagaaaattggatatcttttcctagttgaaagagtagagatctgatttctccaaggatcatcgctttttgacacgggattattagaagcattcattcatctatcaaggagttttgggatacttgccataagccaagccctctgataggtgctggaaacatcaagctctgtgcccaggaagttcatccttggactgcacgcatgaacgagtttgctgtcttcccattggattcagccagtccgcggtcctggaagaagaaatactttcccagacaaataaaagctgaggaatatcatcaacatcagacctgtcttacaaaaaatgctaaagggagttcttcaatccaaaagaaaaagatgttaatgagcaaaaataaatcatctgaaggtgcaaaacttgctggtaattgtaagtacaaagaaaacacagaatattataacactgtaacttacatgctgtggtgtgtaaactactcatatgttaagtaaaaagactaaaatataaatcaattaaaataataattgcaacaacttttcaagacatagacagtacaataagatacaaataggaacaacaaaatgttaaaaagcaggttgacacagttaaggtgtaaaggttttattagttttccctttgcttctttgtttatgcaatcagtgtttagttgtcaacagtttaaaataatggttataagatattgtttgcaaatctcatggtgacctcaaatcaaaaacatacaacagatacatgaaaaataaaaaggaagaaattaaaacataccactggagaaaatcacctttactaacagaaagacaggaaggaaggaaagaaggaagagaagaccacaaaacaaccagaaaactcacaataaaatggcaggattaagtctttatttatcaacaataacattgaatgtaagtggattaaactctctgatcaaaagacatagagtggctaaatgtataacaaaacaagactcaataatctgtggcctacaagaaacacacttcacctataaaaacacatatagattaaaaataaagggatagagaaagatattccatggaaacagaaa

SEQ ID NO: 1703 - DNA, 883 bp, Homo sapiens
tttgccacactccttcagagatgcgcagtgctgcccctttctatgggcagggccgaaggtccgcgtgtaaaagtacccagtccctggtaacctgacacttcccttttaaaagccaccttttgtctatctctggcctgccacgattcttcctgtgctccataggaggacccattggacccccgggctggctgcagggcccacacctgggttagacctcgcacagggacgctgctgccactgtaataaagcgtgcctacacgcttctgaaactggtgtaggaacaacctcagttctgtgaaaggcggacgcagcaggacagaatctccgtggacatctgtctggaggagcaattttactgcgacattttaaagaaacaaatttaattgatttccaagggtgtccatcgcgcttccttcactgccttgatcatgtcggggtcaccacctgcgggggtttgtcctgcagaccctgactcaacgacggatgaataatgtacactgacacagatcttatgcttgtcagtcctgctgagcatccaggccacttacagactccaagaagagtcctgtcagccacggctctgacttgttggccctcccggcatttatttagcacacatttaatgacagaagtctcaggctggaaacactctttttgtagaacatacaaatggacatttctaagcacattgaggcctataatgaaaaatcaaatatcccacaatgaaaactagaaggaagctatctgtgataatgctttgtggtgtatggattcatctcactgactgaaacctgagttttgattcaccaggttggaaacacttttactgtattatctatgaagaaacgtttttgaggccattaagtcctacactgaaaaactg

SEQ ID NO: 1704 - DNA, 565 bp, Homo sapiens
actttctggattttgctacagaagagaacaccatgtgtagggaacctgaattttttgtaataggccgtaagcatgcctgccctttggcctggaaagagacactatatcttccagggctgtttgctgtgtaaacatccttgaaaagacagccttgaacaaagggcagtcaatagttctactcaaaagacatggagaaatgcaaaagacccatggagatttgtcttctaatcggcagcatcttgcaaggagaacaagaagatttatactagccatgcaaggaatctttggaagtctaacagacctgacttgaagagaaggctttaaacaagaaattcttcattctggaacagtgattcttaaagtgcggttcagagaccctgggagacactgacattctttcagagtgtgagtgaggatttcctctttgcaactacaatctgtaaccctttgtatcctgagaaaccgaattaatctgcaccctctctgtcaaagcttcctgatcatcacagctggaaacaatctctaacttttgaaaatctgtaacaactactgagatgtaatatgg

SEQ ID NO: 1705 - DNA, 5113 bp, Homo sapiens
gagataaatatatttggaagtcatcagtgtgtaatcttattttaagtcaggacatggatgaaaccacttagagagtaagtgtagccagaggatagaacttaattgaagacatatgatcgatgaaattcaaggccaacttttgtgatttttcaaatagaaataaaatgttaacattttctaccacacatatacaaaccattactttctatagtgttgtagaagcactaagatttaaaaagcaagattgataatagttgccaaatatgtaaacaaatggcaaattaaattgaggagggagtgtcactttattcttggaataaagtttttgttttgaagtaatacagttttttatattaagaataacaacatctggagtgctagtttctttttctcattgttggaaattgctattccaattcaatttgacagttttagcactagagggcaggcttgcttctagattgtgaagagttctacatgaattaatatagccaaacagcgcaggttgaacatccttaacttgaaaatctgaaattcaaaatgcttcaaaatccaaaactttttgagtgttgacatgatgccacaagtggaaaattccacacctgacctcatatgatgggtcacagtcaaaatgcaggtgtacaacagtttactctgttcccaagagaaaaataaaattagctgcaggctatgtgtaaaaagtgtatatgaaacataaatgaatttcatgtttagacttgggtcccatccccaaggtatcttattatgaatatgcaaatattcaaagatcaaaaaaaagaaatctaaaacacttccggtcccaagcattttggataagagatattcaacctgcacctacattcaatctcaattaatgaatgcagttgtttcttatgtgacaggtttgccatctactatgtttttttctagtgctaggaaagcataaaataaggctaattgattttagtacatctaggactggcagttgacgctaatatacatttgaatataaatgtatatttatattccaaggagtttccaaggaaactcaagtgtagcttaattatactcagatttgatatagagggtcttccaccacatatatgaatattaaagccagtcagaagaaatcctggacatgaaaacattttttcaggaaataattaactatgtgctgggtattattatatgagcgtggctacaaagatgaataaaatatagtccctgcctaaataagctttgttgtagcatcttacagcacttaatatcttgtgctgtatctatttaaatgtctttttcccttcaataatagaaatcctgactcacttatttttggtgcctccaagtgcccatcacacaattcagtttacagtgtttgaacatgtgaataatgagagagagaaaaataagaaaacggtcagggaattggggcctttgaaaaaacttattttcacatttttacccttagagagatgcttttcctattaacacgtctaaagattatggagacaattctaaccttctatctttgctcccactacttcttcaagcagactttaaccccattcctcaagagcagttattggcagccatagagagtgggaggtcaagccttttttagtcattggagtaaacaggagacatagatgtggaaattgggaggttctctctatctggcttacgtcagtttgagaagtttgacatgaaatggaaccttctggaatgaggttctttttcctgcttttcacctggaaagttttcccatacatggtcctcttgcacccctagtccttttagggtacctatttctgtgtgctagttctttcatttccttgtctgtaacatgaggataataatagtccttatctaatagcattattttgaggatgaaatgaaatacaggcagtaaatattagttactctttgctatctggaaaaacatcaattgaacctcataggatggacttgtgttcaataagtgttatatatagtagagtcaaatggaaaaattgaaccactcagatacatttttttcattgatacataatagatgtatttatttggggggtacatgtgataatatgatatattcatataattaaaattcattgatacatgatgtatttatttgggggtacatgtgatagtatgatatattcatataattaaaattcattgatacataatgtatttatttggggggtacatgtgatagtatgatatattcatataattaaatgaagataattgggatatccatcaccttaaatatttatgttttctttacactaggaacattcgaattctctttagctattttgaaatgtacaatagtttagtgttaatagatcagtcatcctactgatatatcgaacaccaggtcttatttcttctgtctacatagacatatttagaaatgcaaatctcttaggaaattaatctgtaatgtcaatgatgcacactgatttgtattacttgctttctttgtaggcagtatagtgaaatggttcattaaatggatgctaaatatgactaaatgatcaatttacagtgtagttggcaccaagtaataaatgctcagtaacatagctactatggctgtctttaaaagtggattggtttgacttcataggaaggactctatttttaaaaaagagaaatattaaaaaataaaaagccaaaattctatgatgtcttattacattgagtctcttaaatcagtttttttttaattaagtagcaggaccctattgcaaaataagttttacctagaagcacagtatttaaaacagaaagctaaaatactctggttaagtgggaagctccctgtcttcctcgctgctagtattatttctgaaaaacctcaaaggaactccttgctctctgaatagcaggttttaaaaaccactacttgcacatttgcaccttgacatcaaacatgtgaacaaagtaatagagtgagaaaactgaatttctatttaggaatttctattttattctctctataaaaagccaagaagtggttggtgtttggaataacatgaaaaatattccaagtatctttggaaatacttacactagaactataaggtttatgataattctatcttagattcattatctagagctggtctaaaaaaggatgatatgtaagaactaccaagagagacttggagtagatacaagaatgaaggaatgaatcaatatccaataaatatccataggcccaggctttgctatgccctcttattacacaggataaaacagtgtagttgttagtttctacctttgaagattatgatccttaaaaaggaaacagctctgtgaacagagaccatgttattcataggtgttcctcacttgtttccaccacataataggtatttaatgaatgaaaaaattcacgtctctctttgatcctagactgcaagttacttaaaagaaatggaccgtattttacttatctctcatggcctgcaaattgagtttgcttactgaattaatgaatgaatgaccaattgtacacatatgtctgtaaaacgtttacatatccacattcccattagactgagattcttgagggcagaaaccatgtcttcagctctcagcatggtgcctgactcatggtaggttgtcaaaagcatttgcagaactgaataaaacttacgtttaagtagtactggagcagtctcacataaccgggcacagtgtcttctaaatagacactaaaattatttcataattaaagacagatctcactaagcattttctgagttagtgccagttgaataatatgacaataagctataggagttcagaggagagtgagttctgtggactgaaatagtcaaagtggattttcagagcagatgagacgcgatgaaggctggggctactttggtgttttaagaacattaattaggcagcaggaaaatctgaggacagggagactagtaaggaaggctggaaagagccctgggtttggagttcagagatctgtgttcagagtcctttgcttcttagtgactatgtgaccttgagaagataacttgagctccctttttcctcttctgtgaggtagaggtaagattgatgtgcatattgatattgtacttaaaagtgtttgtaaaatgctaagtaaaacctaatgctatgctttgaatgtagtgggttccaaatatttgtttaatgacaaagaataaatgatattgactaatgaaaataatggagccactggaatgtcacctcctgcatctgccagtaaacctgttaacacaggggtggcgggggggggggggaagtaaatatgtgaagccaccaaatctcatgatcaggagaaaaactttggaactcccatgagactccaaagttatgtcacaggtgaataagtcatgaacttttcatgctgatatcatttctaaggttgctgccttgtcagaagaagcaaaccacaagataaaccatgcagaaaatctttttttaaaaaagtttcctgaaggatggatggttcatttgttctgcttgtcactttacttactaatgagtcatttttttccttaaccagtaatttgttttaaatttggtcataagatggtatgttgactagtccaatgttacaaaataattggaaaaaagatgacagaccaccaactgaataagggaaatctggttcttgaacttccaatgtatgaattggtgatggtaagcttagtctttatgatgtaagattggatttattggaacttctttatgtccagaagttgcagcacctttctttgtctctggaatgcccaagatctctactgcatcctgtagacatggagggtttccccccttattctgggtctgattatttttaaagaaacaccctttccttacccatcatggagacactactaaccttgtatatacttttattagagtgctgataacaccatattacagtagcatacttacatatctgttttcttaactgtgagctccttgagagcagggactgtgtgtttttgcttttatttcaccagtactcagaactatccacagtatagaaaagcactcaataaatggaataaatgaaaatgaatagataaataaatgatttcacttgtataag

SEQ ID NO: 1706 - DNA, 8398 bp, Homo sapiens
tggccagggagccgcaggcaagggactaaggggaggggggctcagtgccagctgcttaaaaatgcccctgtggcagcgaggggcaccagaggctgggtctaattagttgagaagcagtgacacccccaaccactccccaaacaggctggctcccgtctccaggccccaaggagccacacctggaccagaccccaggaaagacatgtggtggaaaccctacggccctggagcccaaggagagcaacggctgtaacaagtgcacaggtttgagtgcgctgagacaggggaaccgtgggcaaagaggtccctccagaaagagctgggtgtgagcatgggttcgtgagcttgcctggagccctggcctcagccctctctcactgaggtgccatctggctcgcagatgtggcccattcccagcccctcgtgtttcttggaaatgagaaagtccaggaaagggcacaggggctttcgcaacgaccgtggcgatgatagctttgacgtgtggtcatccagccggccactgcccacacccaagagaaagctggattgagcatcaggagcctgggttcaagtctgcctctcaagctgttccacaggtgaccctgggcaaatcgcacaggctcctggaacttcagaaaggggaagaattattcctgcctctggcgacatcagcgaatgtgccttgagttacgggagtgttttgaaggctgaaagctttgtgtacacggaaggggtcaaagacagccacaagcctgtccctttggtcttggtcatcatgttaaccccaggtttcgatttaatcctacatgctcctttcttatgtgtgaggctgaggtgggggcattggtcagaggagcctctgggaaatttcctttcaggacagttcttttgttaaggggcctgggtgtgctgagaagggaaggtggctcctcctgctcttggagcttggagtttctcacaagctctcccttaaaagccaggcaggccaagaagggataatggctgctcagggcccaaggggcaggatctctgaggcccggaagatctcagtaggtttagcccaagagtatccagaagtggcccaggcccattctccatccctcagagcctggcagcctggtcaggaccctcaaaggccatgaccgtacccgtagggcaccctggtgtccttctgacaggtgggatctttgtttcttacaggcaagggcgctagctggtgggagccaccccgccatgctgatgtcagagaagcaagaactctggagaagcagcctcctgggaccagaggagggccagcagcaggcagcccggagacagaactgtgagcccaccccacctccacccttccggcacccacatccgctccccaccccagcccacctgcaggtggctcctggagtatcctgggtccctcaggataaactccccaccctaacctcagaatgaccaagaaactgggcctgaggatgacaagaagcagaatgggccttggtaaaggaagaccccccactgattggtggcagtgcgggcagttcagggctgtcagcgtctgggttgtaggtaaaaagaaatggaacccaagaagggaaatccaactaggagccaagaatccggtctaccccatcctccttacgaaatagcaatgcaaagcccgtgtgatttggacataaagcctctgttactcaacttgattcggtgaataacagacttgaaagaaatgtggaaaataatagtaatcttccctagaaaggagtaaacagggttgagctcccaaagcaggaagacctggggctgtgtgatcttggacgagtcactcaacctctctgagcctagtgataaagagccagctcatagggctttgagaggatttgtgaggttgggctggtgtccccaggcacagcccttggcacatagtgaaactcaagaaaacagagcagtttttaccattcatcacattattcccacacttgccaattttttaagttcatgcacatggtggaacaggtagggtgaggtgccagctccataagatgagtggagaaactgaggcctggagaggtgaaagcattcactcagagttgcatgtagagtcagttgcaaaggagaattctggcaccagttctcatgtggatggaaaaagtgcaggaagatttggaggtgagcagaggagaagggaggaggaggccgggttccaggaaaggagctgacatccagggatgtgggacaaggcccaggcctgtcttacataacatggtccacctgttcacccctgcaggccccacaaatgtgtgcaaacgtgcaccccggcacagcgcacacccagtcctccctcactggcaaataagccacagagactgggtttaaacaaattggattaggagggctacaggcgcctcctccccccgactgtccggctccgacactaaacagacctgcagaactgccagctgtggtctctcggacacactgacagtcggtccttggctccctcaccccacccgtgggcctcaggaagggggttggggtctgagaggatgccacagtgatggatggggtgagggaggttccagggctagctcaacagcgcacaggatgttagtgcttttgcgaggcacatttccgagctgttcccagacccgcccccacttcccccctcaccctcccctccggcagcctctcccatggccactgctgcgggctgtgagcagagccccgtccttgagcagattgacctcatctttcagtcctgcagctgggctgagcggggagtcagctcagaagacactggcctggggatgagactcggggcatgcttcagagggaagaaagagcttctgaacagacaatgctgtcttaaaggtggcatcttggtgctttctcatgccttgttttctttcatcctcagaatgtgtctgggggtgagaggacgggtgtgactgctgaaacttcctttcttggtgattccacatcactcctttctgatccctgagcctgtgccacgccctgtgtgatgtgccggggacaccagggtgaatacttacaggccctgttccccttccttcatgaaacagcctccttcgggctgggtcactgggcactggggcctccctggtcttccaggattgcaacttcacagaatcccttttccataaggcacatgaaagtgactgtgacccgcaacgggagccttgacaaccagccaattcagaacacagaccttgacatcggaaggccccgagttcaaatcctgccttgctccctttcagctggaaagctgtggtcaaattacttagcctctccaagccagttttcccttctgcaaaatgaggttacacaagctgccacctcacagaatgagtgtgagaattaattcttattttccacaccctcatttgacagggggagaaacagaagcccagagagggaaagggcttggttaggatcacaccatgagttgggggttaagtcaggatggggtaggtcccctctttctctgggtgttcctctcccccatcccttatctcaacataaatcctccccagttgcccaggttgtccaggcgattcctggcacacgtcctggggcctgccctccacctttagccctgctctggcttctgcagcagcagagtcctgggtgaccagcagtggcccctggccctctgagtggtggtggagggtgggggtgcactgcagcaagctcccagcccagagcagcctggccatataagggaaggagctcagggaggcctcctggctcaggcctggcgagaaaacccagacagccactgtttattttctcctccccagctcacccacgcctctccaagcctcccaacagaagacagaggtcccccacagccagagacatttcctgaagacatggggaacacagaggcagaaacagcccatccacccaggagctgtcccccacactgccgggagccggcacccagagccgccaggtaaaactgaggccacctggttcaacatcacctttcacagaaggggaagcagccacagaaagaagggcctcgttaagaagtggaacctgggacccccaagcggtgtctctcatcctgactggggatccagagtaggagggagcctttggtggggtaagtggaatggggcggggtggggggtggccatagacccctcttctcagtaaggccctcatgtgaaggaggcaggggttgggacaagtgctaagtatgcaagactcaagggaagagctgctggagccaggagaagcacctccctcccggcccctctgcccctcctcatagcccagctgcactgactcctcctccaggaagccttctcagcttccccaggggtgggaacctttttgtcctccaggtgtgcttggctgtcctttcttgggctctctctctctctctctcctcatcccacttgagtctgccccctattcaccttgtgaggggaattttccttctactcaatctgaccgaggtcctccaggtcaaggacagcgaggctctcagtcccacttccccttggcacatagaagaggcagtgcgctgaagggacaggtgaaatgattagaccctgcccccaaaccaaggcctggccaattggacagggcatgagacattcagcgtagaggttaaaacgagggccctgggttaggaaccccagctcagttctcagctctgtacccttggaaaattcccttcccatggagctttgtggatgcacaaggacttgcacaaagaaaacattcaatatccaggactataaaattccacaaatgattgtgcttattacattcattatcacgatgattattccagacacaaaggaacagaacgaggcaccaacagcaaggggcaagcagattcaagggccacagaggagatggaggcaaacaccttcccctggtcagaggctgtgcctcagcccttctccctgcatcagtttctccttcagaagcatgggactacctcccatctagttctcgtttctaaacctaggggagatgctatctttgctgcaataatcttagcctacatcttggaatggaaatggccttggtggaaatggtcttcaactcctctggtccaagctcaggccctgtgaccctggaacaatccccttcctggtcctccatgtaggagcaataacattcccttgccagcagcaccagccattctgatgattaaatggtatcggactctgttttccaaactcagtcattcagatgccccctattttatttcttccatgtctgcaaatgattataatatttttaaatgtaggatgagtcctttttattacacatagaaatagctactgtaaatagcaaactctaacactgtgcctaattaggaaataaaggtaaccataaatacagtaaaaatgaaacaatgttattatggtttaacctgatagtgtggcttgcaaggccctgggcctgaagcctgggcaataagtgagagttagaaaggtgtcaaagacatgatagcagcaaactgaggctttgtaccccacggtaaataggactgaaagcaaattcacagggagcaactgatccattccacaacagaatgctccctgtcaattcgctttccattctgttgtgtcctgtctcccagcagagactacaaactccccaaaaccacttacccaccagctgcacgtgagaagccaaaggtagtttatgtgaaagggctttggaaataatcacgcaccaagtgaaggcagaggacacaccttgtcagcttagttctcagcagcaaatcatctcttttccaggataaccctccctgattcttattgaaatctctttgctgaccacactaagctcttctctctcaggggcagtgggagccgtggagagtggaatagaccagctgtctgtgacctgcgagggagtccaatgtcggaatcactccccagccaaatgcacggttttaaaaaatctatttatttatttatgtagagaccaggctatgagactggctaatttttcgtatttttggatagagacaggatttcatcgtgttgcccaggctggtcttgaactcctgggctcaagcgatccacctgcctcggcttcccaaagtgctcaggattacaggcgtgagccactgtgcccagccaccaaatgcagttgaaaagagtttctgcaagataattccacagaagaggaaagcagttatctggctgggaataccttagacagaggctgtcctctacacaggctgtcagaactgacctactgacctgcctgctggcatgatagaccagagggaaacactctttccactcttcccagactgagtgtaagagacagacttttttttttttttttgagacggagtctcactctgtcacccaggctggagtgcaatggcaagatctcggctcactgcaacctccacctccccgggttcaaaccattctcctgcctcagcctcccaggtagctgggattacaggctcccgccaccacgcctggctaatttttgtatttttagtagagacagggtttcaccatgttggccgggctggtctcgaactcccaacctcaggtgatccgcctaccttggcctcccaaagggttgggattacaggtgtaagccactgctcccagcctttttttttttttttattagagacaagggctccccatgttgcccaggctgatcttgaactctaggctcaagcgatcctcctgcctgagcctcccaaagtgctaggattacaggcatgagcactgctcccagctctgtttttgtttttttaaggaggtatattttttctgttctctctcagccctgaagaaaggctacccatccccttcagacattcctgaaaatatatgtcatccaacatcaaggccaccacagtgaccactaagcaatgcaagaaggtcctctggggtgccctgagatcttggcagggcaggaagagtgagaaggggctttgcctgctcacctgaaagttcccacccaagccgggcccagaaaacaaaatgaattatctacatggtcatccaatcagccaccaaatggcattacctaggtccatcatcatgtaccaagccacaggtcagacccagggccccccaaattaacaagacacaggcactgtcctcaggaagtggagatctagccaggtcagacccacacacaaataacactgatactagagataatgagattgggaattatgattcagccattcaacctgggcttatgtggcatctacaccacctggccctgatttcagtagtgagcacagttgacagggtcccttcccttcacaggtgagccatgtagtccacaagtggaggtggtcgtaagtgaaaaccacattaccagcatggtaaagggttagaaagagggcaccgggtgggcgagaacatgaagcagggggtgctgatggctaaagaagtaaaggaggggctgggcactgtggttcatgcctataatcccagcactttgggagaccaaggcgggtggatcacctgaggtcaggagttctagaccagcctgggcaacgtggtgaaaccctgtctctactaaaaatacaaaaattagccaggcatggtggtgcacgcctgtagtcccagctacttgggaggctggggcatgagaattgctttaacccggaaggtggagtttgcagtgagccgagatcgtgtcactgcactccagcctgggcgacagagggagactctgtctcaaaaaaaaaaaaaagtcaaggagggtttcccagagtggccacttgattagagacctagcacaggaggaagagatgggcagggagagtgacggggagcagcacagtccctgggagcccgaagtgggtgggcacagggctccctaggagaatggaaggacatctatgagctgtagcccaagaggaagaggtcactggggctagatgcggcagaccctcgcaggctttgggaagggcttcagaattcagcctgagggcaatggggagcccttttgggatattaaacttgagtaagatatgagcatatttgcatcttgaaaaatcattatgggaagatggctgggaagagaggaggagtggcagaagaaagataggttggagacaattgattgctcgatgatataaaatgttaagtaccatgaatgatgctgttaggctggaatgcgccaagcataaaggtggggcatggcatcaaaaggtaggtcaacatattaaataattccatgtattgaaatatccagaaaatatatagacagatctatagagatagaaactggtctgcccaggactaggggttgtctaaggataaggagcttcttttttggatggtgaaataacctaaaatatattgtgccattgtttgcacaactttgtgaatatattaaaaacctgttaattgtactcactaaa

SEQ ID NO: 1707 - DNA, 580 bp, Homo sapiens
gagtcagacctaggctctcgcagagaactgcatcgcgctcccagctctgctgcctcggtgcggggacggggctctgcatgaggactgggaatgtaagtcccgggcctggacaggcgcccctgggagctagcctggaggagattcagtagaaggctgaggagtcggcttggagggtctcggcaaggcggcgcggatggagatgaagctgcgaagaatgctgagaaagagcggccgggggccttggagggaagctagggaaacgctgcgggggcagccgaggccgtcggcgccccgggagaagagaccttcactgcttctatcagtcaccatatctgaatcttggcttgccactcaatcctccaatatcgaccaacaacaggagattctctctatctgaggggggaggtgtgtttccctgactagactctaaatacaaatcctccacttctccatctgtctctccagtgatctcagaggcatggtcttaacaccgcgcacagttccttgcaagttgaagagtagacccaaatgatcagttctaaaattctattcttattgaagattactggtggaaatatca

SEQ ID NO: 1708 - DNA, 7020 bp, Homo sapiens
attttaatttgccaacaaatcctaatgtggactttgtcacgttgtgaaataaagtgattttttggtatggaaatatgtgttaagacagactgttagtctttgcactttaacaactagctgatacacttacgtcacatggatgaaaacatacacaagtgcactgttgttggataaggactcctgggtggttagaagaatgtgcagatctaactactcccattaagaccattgattaaaatgaaaaatgcttataaaggtggagatctctcagttttagtcttattgcgtgccagaagcactaaggaattgctgctaaatataagacaaatggacttgaggaaatcactgatgactaacttgaaactctgcctcctgagatcacacagatgatgaagatcatgtctccaagtcttttctgccgttgccagtattctctcccaatctcctgtgggcaacttcttcgggaaaacactcatgcaatttcataaggacaagcgaaaatatgaagaagctggatcttggaactaggctttgatcacagagcggagctgagatgaaagtccatccactcattcaacaaataattgagtacttacaaaaatttctgctgtatggagcttatatagtagtgaatatcaattcttattttatggattataaaacagaactttttgcaacaattttacactaccctaggggtacctatgagtcttcatgcctcaagtaattgtcctgtccatgtgactatggaagccctgaaatctttgaaaccccagatgacccatttcaccagacgcttggacattctccgtcgagtttggatttatagtgggtacccagatttaggtcaaggacataaaatctgaaccactttaggcactgctcataaggagtaaattcctagtgaaaaagcaatgtccctcaggaatgattgctatagcaggctaaaaggtagatttataaatgtttataaaaagcagattggatttagcagaggtagcagtgatgaccaggagcaataggaggaaatgttcttaatagtgctgtttggtggcatcttctttttatacaaagaagtcttgcaagcatttctacttgaatgactaatttggagtaatttttagtttctgtatttttattagttaataggatctaggaatataataacctggtgagaatttcttcgtgaatggcaatcaaatttgtcttattcatgaaactcataaataagctataatccagcattttataactagggaaaataaaactggggtcctgctgtttaagaggctaaggcaatttaacagaacactgggggatttatagtagatttatgatgaagatacattctaactggaagcttaattgtgatttaaattataggtcaagctgagcaatgtgttttctttttagggggaaatctttagagagttagagtgtgcttgtttaaagaggaaacagaccaaatgagaaaacagattgcattttctgtttttcttttaaaatttcaagctgctttaagtcaaattgcccctgagttcctgatgatggctgtggtgaaattgccttgttttactttcttgccttcttttccagagcagttattttacctgaaaataacaaaaagatataggcagcatatcagccagaaaactaatatggaaaccagagataaagtatactcaacctgcctagaattgtgacatcctataattttaggctgagttgtataaaattagcaagtaatatggatgaaagggcctttgaaaaatttttgccactcattttgcaaatgggaaaattgaggcttctagtggttttcctaaattttttatctcaagtactttaaggtctcatgaggaaataaaatttatgtacaaataattttaattaaaagtataaaaagttgtttccctgaaaaataaaacttaaaacagataacaaaaggttgattctgtaaggaggatttctattgggaaaaggacagttagatttgacagcccagatgcttactctctaacatttccctaccccttggcagaatccttcaataattaacaccaggacaaccacatagacttcagccatgggtgtgtcaggggcatttgaaccagagcaactccatcttgaatagggtctgggcaaagtgaggctgagacccactgggctgcattcccaggaggttaggcattcttagttacaggatgagataggaggttggcacaagatacaggtcacaaagaccttactgataaaataatatggtacagaagctggccaaaacccaccaaaaccaagatggtgacgaaagtaacctctggtagtcttcactgctcattatgtgctaattataatgcattagcatgctaaaagacactcctaccagtgccatgacagtttacaaatgccatagcaatgtcaggaagttatactatatggtctaaaaagaggaggaactctcagttctgggaattgcccacctctttcctggaaaactcaggaataatacaccccttgtttagcatataatcaaataactataagtataatcagtcaagcagcctatgccactgctctgtctatggagtagccattcttctattcctttactttcctaataaacttgctttcactttactctgtggactcaccccaaattctttcttgcatgaggtccaagaaccctcacttaaagtcttgatcaggacccttttctggtaacatcttcctggtgaccacaatgagattaaactaaggagactccctacccaaaagaaatagattagatcaccaattgtatgactttgggtaagtgataggaaccattttacctggttaaaggatggaattgggttagaggcccaacttaggagagttagagcctctcctaagacagagagcttaaaggcccctcttaataaaaggcaaggacgcttgatggaacttaggttcaaggcccaaactaggaaggttagagtccttcctaagattaagggggttagaagctcctctcagtaaagtccttcttggttaaaaatggatttcacattatgggatattaaccattattctctttgtattaatctgccttgcactgtttgctgatgtctgtgggtgacaggattaggtgtatataggatcactggatatggggagcattttctccctaaaggggaaatttgagagctgatgagacaattggccacctgaactttagattcagtgttgctgcaatggatcggtcttgtctggcctccctgagctcctcattttcctcaccctgctgcaggcaatgcttttctccctttctttctttcctttctcttttctatcttttctgttactcagggcaactgtctacggtttcagtttgcccagaaaccacatgtggaaactcctggtcagaagatcattccacaccaatttgagtggatcaaagatgaaaaggcccaactagaatcatgtttgagccttcccagtttgatactgggtgctaagcagagtggctaatgtctatgttttgtcacatttattttgctctggctggtttggaagatgttaattgggttaccccatgcaatctcttgggtgacatcttgcaaaattgagaggcttttgcctatggtttcatgaaatggaaaaaggtgattttcctttgtgttgtggtttggcccctagggctatggtgccacaagacaggtcactagggctgctcagggaaagggaacccagaagcctggcatgccagcaaaagggtaagaatttcttaccattcagacttctggcctctctgtgcaaacgagttataggaatggtaaacatccctctttattcctgtgtaaagttttaattaataggaaaaagaattttcccattaagttagtcttaagctgtagtgaatttgctgtactttgtgctataaatttgtctttccagattgttctgtcagaaggagggttaccttaggatagaatacaggcttaagcccccatttggtggttaatactgagtatcaaattgattggattgaaggatgcaaagtattgttcctgggtgtgtctgtgagggtgctgccaaaggagattaacatttgagttggtggactgggagaggctgacccaccctcaatctggatgggtaccatctattcagctgccagcttggctaggataaaagcaggcagagaaatgtggaaagactaaactggctgagtcttctggcctccatgtttctcccatgctggatgcttcctggccttgaacatcagactccaagttctttagtttaggattcttggacttaaaccaatgatttgccagtggctcttgggtcttcagctacagactgaaggctgcactattagcttccctacttttcaggttttaggactgggactggcttcctggcctctcagcttgcagatggcctattgtgggacttcaccttgtaatcatgtgagacaattctcctaataaatttcccattcatttattcatctatctgctagttctgtcccttcagagaaccctgactaatacaccctataagactgctgttcaagacagcccatcaaactggtcacttacaaactttgcttcagatccctgaaacaaaacaaaacaaaacaaaaacaaaactgaagttcccctcttgtcttgttttatgttcttgggagcttgaccttataaccatgtggcagtacttcctctttgtctctgccattcagagaacaggaactttggggttcatatcatagttagccctaaaaattatattgagcagttaaaaggctttgcaagctcaaaattggctgctctagactccttctgggaagggcaatggagactgcccagtgccgtagaacaacttctgacttcctttcttgaattttcctttttctgagtacctgggaggttacctttggtaaagttcaaaagctacaagtatttgctgttttgcctggctagagtctgataatgagattttttttttttaaaagaatgctatggttaaaagtcagcttaattaaaagtggatattcaagctctaacagcctgggactccttgggaaaaacaggaggcactacagaccctgtttgaggaaaaacctctgctttcttcatgaaaacccagaaattgaaatcagatagatccctctcaaaatctaaggctctcctctgttttgcactgtgatgtctgacagtattgacttttaggggtatcagaaattactttgcattatgagagagctttggtgtgtaataactaggtaggaaatatacttttggggatggctaatggcagttatagggagatacttggcattttgcatgtttggattagagaatcatgttcttggccacctagaaagtatgaaaatgtccccattccccactgagagatgagactcctatgggagatgggttgattccctcttttttaaaatttaactttaagttctgggatacatgtgcaggatgtgcaggtttgttacataggtaagcatatgccatggaggtttgctgcacctatcaacctatcatctaggtattaaaccccacatgcattagctatttatcctgatgccctccccgacaggccccagtgtgtgttgttcccctccctgtattcatgtgttctcattgttcagctcccacttataagtgagaacatgtggtggttggttttctgttcctgtgttagtttgctgaggataatggcttccagcttcagccatgtccctgcaaaggacattatctcattcctgattccctcttttctttggggatccaggatctaatataaaaatgagacccttaattttggggctctgctttgccttccagctgtgcctgcttattaggccctggaaactgcatgctttcccagtcctgttcctccaagggctccaccctaaagccagcaatccaattaagaaacttaatggattgtaagcaaatggaaaatcttccaagtactggattttctgtctgtctgcatatttacatgtgttgtgtgtgtggtgtttatatataaaagagctctgattaattggtttaaagataataggcaattaaatcaaatattatcagaaaaataaaaacaaatgccttttacttcacgtgactttaataatctttaggaattagagacagttttaaagattattggtaaaataaagacatttggtctaaattgcgccagtcagatttaggtttgccaaatgctttaatatcataaagtgcttttttaacttgataattgttcaacttacctgctttggagccattagattccaggtaaggcatgggaacatgtggagttagccatgcccccggctatgctgaaaaaggaccttatctggacttatgtctagtgtcttaggctccacacctgatagataattaaaatccttacttaccagatttttcaccaaaaataaaagttgctcagttagcattgtaacgtttaattgagtctactgaataagcagttttacatacaaggtgtgtaaggacagtgacgtgtttttggtaaaaaattataagaaggcatgggaatacggatttttttggcctagtttagaggcttaaaaacttttttcaagctagatagaaaaaagctgaaggtttaaacaagttgtggaaggtttgtgaacaattaatcttataaaagaaattctgtgtgtgaacatattagctaaaattaaaggaggtattattcagtttttttcataaattgaacattggaataaaagcacaacagggttttcttagagcagtgatctactctttaagaaaaaattgtaaagggttataaaaggtttatgagaatcttaccttatgatctaactgattaagattggatagattagtctataaggttttttttttaagaattaggtttggcatcaatactgcattaatgcaaaggtgaaatttggctttctctgttgaacaaggttttcatgttatattaaaaaatacgaaaatgtttttgtttgccttttaaataaactat

SEQ ID NO: 1709 - DNA, 705 bp, Homo sapiens
ctggttttctttcctaagagttattgtttctggcaacgaccacactccagcaggctcaggcctgagctgatgaatgggacaacctgatgaccaccacaaagttgcgtctgctcccatccagctaatccgagggctctcagacagactgtgactaatggggacatctgagggcagaacgttcgaaggccaaggaggaacaagtccagacaaagtgtgagcacacacatctggagggctggggagcccatgtcacattcctggctggactttggactccaggaggaaggcttcaggttgggcttgctcaggctgaggcagtttgggagagtgggagtgcagggaacttgggcatctgaatgcccgggtttgaattccacatctgttgctttttggctctgagagctctggcaagttatgtagcctccctgggccttggtttctgcttctttaaaatggggttaacaatgaagattggtgtaagaatcacatataaaggtgctgtcaagaaatctggttgaaggctggacatgatggctcatgcctgtaatctcagcaccttgggaggttgaggtgggaggatcacttgaggccggggcttcaagaagagcttgggtaagactgtagccatagccatagcaagaatctgtctctatttaaaaaagaagaagaagaaaaaaggaatggaaataaattaattaaatggaa

SEQ ID NO: 1710 - DNA, 745 bp, Homo sapiens
gatctcagctccaacaccaaggcctctgtgttccctagagaagccactctggatggtctctctgaagtctgcctccttccctggccagctctacaacttagaatgcctgaatatatacaaatatgaacaagacccacaaggactgctcatcaccccagtattccatttacaacatcctgaatgaactcccgaccaggcctataattctctcttgcagccaaatatcctgcttactcctggtatctacctggtcagcagacctcatgagttatcgcccagtgacaaaaccatcccaaagatgcaccagtccagcacaaagtatgactgtcaatctcacaaaagatgtagggttctacgaggatactcagagtataagaattacgctaagtgaaataagccaagcccagaaagacacatactttattatttcatgtatctgtggaatctaaaagagtcaaattcatggcagcagggagagggctgaagaagggggagatgttgatcaaagtttctatgtatacaaagaccaaaccatcacattatgcctcataaatatatacaattattatttgctaattacaagtaaagcaatacaagaagaaaaaaaggaatcataagtaaatccatgacaagtgaaaacgcaatggagagaagggaatcaatgattgaagaagagaaaggacagtggatttacaactgcttcgaaagagtgatttgactggcaaaggactggggagaggtcctt

SEQ ID NO: 1711 - DNA, 577 bp, Homo sapiens
atgctcagcctccttactatgtgtgccctgcaccatcttgagactctgcagagagtcccactagtaagcagactctcaccagaggcagccccttgacttggacttctgaaccaccataactgtggagagtcggatgcgatccagatcttgagcccctagtgcggggaaaaaggacacataaggttcctttccaatcgtgcatgtgccgacttcagccaacactctcaaggatggcctgccttcaaataattcaacagtacttaggccgggcacagtggctcaagtggtaattccagcactttgggaggccaagaatacctatgactggagaacagatattgtggatcccattcaacagatgatgaaaccaagagtctgatggacttggtgaatgaaggatgcagacgtttggattctaagaccagtatggcttccatctcatcctgttgccagttgtcccttatacactcaaaacctcaatttataaacaggactgtcggtttcatgaaggcgtgtctctgtgatgttcattagtgccacttgtgcctaaaatgagtgaagttagggagcactacac

SEQ ID NO: 1712 - DNA, 635 bp, Homo sapiens
tgaagggtaggcctttgactctgggtggtaggacagacataggagaacagggtggggctctagaggaccaggcggggcttctgggggccaaagggaaggaccagctgctgggcaggaggggctttccggccagtggcctggggtggcttggttttgaatttccgctctgcgggccacgtcctgtacacagcctctcagccagcacgtctgcacacgtgcatggctgctgggaatgggggtcactccgactgaccatcatctccacatgtattttccattgctcagacatctgactgttggtgtgagaccagtgctcctggtggtgtgccctgagccatggaggcgcctttgcagacagagatggtggagctggtgcccaatggcaaacactcagaggggctgctcccggtcatcacccccatggcaggcaaccagaggtcgaggaccctgcacggagctgtatggagggcaagagcttcctacagaaaagtcccagcaaggagccacacttcactgacttcgaggggaagacatcattcgggatgtcagtgttcaacctcagcaatgccatcatgggcagcggcatcctgggactcgcctatgccatggccaatacgggcattatccttttcctg

SEQ ID NO: 1713 - DNA, 475 bp, Homo sapiens
cacggagtgcaatcactgcgtccttacgggggttgcaaggcgtccgaagtatgagtccactaacaaaagtccagaaactcgccagttaatagtattgtgtctcttcaaaatatcggagaataatttctttctcgctgatcgcctaacttctactgacgaagcttggaagttgcagaaggttggagtgcaatggcgcgatctcggctgactgcaacctccacctcctggattcaagctattctcctgcctcagcctgccgagtagctgggattacaggcgtgagccaccgcgcccggccagaacattagttttaaacttcctaacccttgggagaaggcaaaacacttgatgaaatctacataaagactaaaacattttaccaattttgcattgtttgtttgaaattgcattgacgactggtatgttaattttgtatatatttttatgagaacaatgttggacatcatttaatttt

SEQ ID NO: 1714 - DNA, 2677 bp, Homo sapiens
gtggacagcatgcccatggcctgctgggtggccagagtccttttgtcctgcggtccatataagagggtctggatctggagacactgtagaacaccaagcagctatcatgaggctatggaagtgtcgctgagagcaggaaactaaggtctcccttgaatgagagaaagatgacctcattcttaggccctgctgtgatggaattagcatgctcctgggatgtctcctagtgactgacctttggtttggatgttctgagggatctaggcaaaagtgaacagttttagcactatttcacaaaactctctgtgactatctgtatgcaaaaaatagatttaaaagtagtatttttaaaaataaaggcaagaaccttggtactgaccagaggatgggctccagtttctatttttaaatgtggcccttgttatagcctggaaaagatttaaaaaaatagttttgttttttttgtaaacacatactctacttttattaatatataggctgtctatactcttgactacacagcaatgtcttagttattaggaaccaaatattcagcttatggactacccagggctggctttggcttgatttctcccttctgcttactttaagtcttgccatttgattgcttgtagtaggctagggcaaatcaaggagaggagaaagattaaagttgtgcccaaaatggccaaaataattttgagaaagaatgaggtggagaggtggaggaacttgctttactgaatgccaaagacccttttatttttttaaataaagtaattaagacagcatgtttgtcacccggggtagacaaaaagaccagtggaacagggcagagagcccaagccttgacagatgacagaaatggccttgcgggattggtgaggaagaggtgggctagtcaataaatgggtactgggaccgctggttttccaaatggaagaaaatggatcactaccccaaatcaaacacaaatattaagctcaagaaagatttgaaggactaagtgtgaaatgcaaaacttggagcttttagatgaaaatactggaaaatatatatatatatattttttgatggagtctcactctgtcgcccagactggagtgcaagtggggtgattttggctcactgcaacctccacctcctgggttcatgtgattttcctgcctcagcctcccgagtagctgagattacaggtgcccgccaccacactcagctaatttttgcatttttagtagagatgaggtttcaccatgttggccaggctggtctcaaactcctgactgcaggtgatccacctgccttggcctcccaaagtgcggggattataggagtgagccaccatgcctgaccggaaaatacgatcttgaggtagggaagtatttcttagacaagatctagacaaagcaaaagtgaaagactgataaaatgtaactatgtgaaaacctaaaatatttgtgcaccaaaattcaccataagcaaagtagaaagacaagccacgctgaggaaagattcttgcagtgcacagaaatgagaaaggtttaacattcagaatacatgaagaattcctataaggtaatgagaaataccaaaccaaaccaaaacctctcaatagaataacactcaaaagatataaacagattattcaaagagttgaaatctgatgaaataaacatgcttaatctcattaacaaccagaaatacaaactaaaacctcaatgagggggatctgtgaaaatgtgcagctgttactcagggccattttcatagcagcatcctgcagaagtagattggtggtgtctcccttcctcccttaacctcctgcctaaggtcccagaattgcatcataacatctattgaggaatttcagatgatgaaggtactgatggaacacatcctatttattcatggagacagtgcagcaaggactgcaactagagggtcatttaagttacaaggctacgtgactccataatagaaaattgagaaaagcatactattcatttctggtaaggttccaagccaggctcgtcaagctattacttgtattttgtacttacatgaaatgaaaaagctaaagaaaggtaaattttaaaaaattgctctaatgctgaggatctgaaatcactactcttctttatacacattatccaatgccagattacgtccacgggggagaaattactcagaaacttgaaaattgtgcttctgttttcatgtcaattctcaaggctgatactaagagaaaaggtgacttcggaagccttactacgtggaagcgtgaaatgtgataaatctttcaagaaatacaagtacgctttcatttaccaaccattacaaggcaggcagaaatgactaacttgggggaattgaaggaataaaccaaaacgtaattcatcagacaggcttcccctacagaaacacagtcaggggtagtgggtggtttttctgagccacccagataccagcctcatcctggctggacccacgtctttgtccacattcgccacttcctgaagcagctgtctgctgaacaccagcaacacgccaaccctgtggctacttcggggatggagtggagaatgggcagaagtgagccttgctctcagggggcttctaatggagtagcggagaaagatatttttaaaatacataaataaacgtgtcaacaacttgt

SEQ ID NO: 1715 - DNA, 7092 bp, Homo sapiens
atcagcctcctgagagctgggactacaggcgcctgccaccacatccggttaatttttgtatttttagtagagatggggttttgccatgttggccaggctggtcttgaactcctgagctcaggtgatctgcccacctcggcctcccaaagttctgggattacaggcgtgagccatggtgcccagcctggctcctgttttttgagacagggtttcaccctgtttcccaggttggagtatagtggtgccgtcatgacttactgcagccttgaactctttggctcaagcagtcctccccactcagcctctctagtagctggggctccaggcatgaatcaccgtgccagactaagtttttttaaaattttttgtagagagaatctctctctgttgcacaggctattcttgaactcctaggctcaagtgatcctcctgcttcagcctccgaaagtgctgggattacagttgtgagtcactgtgcctggctcttttaatcttgaaaactctgggaagagctcacttctgtttaggaggctgccttgggaactgcatctcctgggctggtgctctgtgctgcttggagtctgcagaccctatctgggtcgcttggcctcccgtgcacaagctgccagaatggaggccccattctcaatgtgggggctgcccaaagagcagggagcttcccacaggacagaggctgggcacctgcttggcctggttcttccttttcccagggctccaacacccaccccctcaggtcctcccaaaccctgcaggtccctggcctggtccgtccacacctacactcaggaatctctacacatctctgagttgctgcatctgtcttcaggcacagcccaccagcccccctgggtacccaaagacaccgcaaatatcagccattccagacaacgtcctcctcccgtgtccctatctcatggagtaatgcctctaattcagccacaccaagaccccacgctccacatcccctagaactctcatctcctgtggcccaacatggcccttcctttcagcagtgggatgtgggaaggatcaaggtcacccttgtccaaatcccatgcagacaacggtgttggagtcttgggcccaaagaccagctcctagaacctgcagggaagcaacggcacgttccatctctccccatgccactgaggaatcattggtggcaggattctcagcaggcatggccgtgggtgcacagaacagagaaaggatggcctggaccacacacatcactgtgtgcagatgctttcctagacactgcagccaaggacacagaggctcagagagaataacctccatctcctgggtcccagcgattctcctgcctcagcctcttcctatttcacaagtagggaaactgaagcccaggtaggcaagcctgacttgctggagtcacacaggaagttggcagctctgctccatccctgggatctggagcccctgctctggggaaggagaggtggggcgctgccttcccagagtcccctcaagctggcagggacggctgtacccccagggtcagaggagaactaaaaggagcggaagctggcctgggtccagggagagacctcgtgtttgcccaaaagggagctggagaggggcagctgggcccatatgcagggaggagctgcagggagctggtggcggggcagcaaagagaagtggatttggtgggtagaggggcccctccttggttctagtcctccccgcagccccttgcaaacaggcggggctctcctgtccttcttgtctcctgcagcaagccctacatgaagaggcctctttggtgagtggcagctcaacctctgctaaatgcctccagtgatggggagttcactaccttccaaagtttttaaaagatgttaaccactgctattcaagaacaattctagaatttttttttttttgaaagacaaggtctcattctgtctcgcaggccagagtgcagtggtgtgatcatagctcactgcagctttgacttcctgggctcaagcaatcctccctcctcagcctcctgagtacctgagactacagatgtgcaccaccacactggctcattgttttcattttttgtagagacaggatctcactatgttgcccaggctggtctcctggcttcaagcaatcctcctgccttggcctcccaaagtgctgggattacaggcgtgagccactgcatctggccttttttttttggagatagagtctcgctctgtcgcccagggtggagtgcagtggcgtgatctcggctcattgcaacctccgccttccgggttcacaccattctcctgcctcagcctcccgagtagctgggattacaggcatctgccaaccatgcctggctaatttttgtattttttggtggagacagggtctcaccatgttggctaggctggtttcgaactcccgacctcaggtgatctacccgcctcagcctcccaaagtcctgggattacaggctgagccaccgcgaccggccctgctgttgcttctgaggtttgaaaaccgctgcctcaatgctcctgattcagctcttcttacccaaaggttcccccacctcatctactctgttcctgcacagtcgcccttttctctgatgccccgggcaggtttctctctgccagctccacgcttctggagtcccccatccgtcttggggcccagctgcccactgtctgggttcagaccttctcaacactccctggcttctctgccctagttttgccttctccaatccactcttggtgggtggaagtacggttaccatggtaacttgaagacaacgcaaatctgattgtatcattacaatgactgggaaaacctccagtgccacaaaataaagctcaagtcactagctttgcagtccaggccctttaccattccggcagcatttctgggggctattctccttccccccactgcacaaccccgcctggccaccccaggctcaggctgcagaacagcgtagaccagggagtggctttggggtcatgctaactacctggtttttgtctctttcaggctgtttgctcagttgcaaaatgggaaggacaacagcacccgcctcacaggctaagaggctgtgtgtgaaaagcccgcagcacaggatctggcacgcgtggacgtgcgggatgggaggaggggatttcccagctcctcatctctgcagggactggccttggcctagggaacactagctgtccagggagggggagctttccctgagccccccgatgtgtggcaggcagaggagagcaagctacttctgggaggggagttgtggggaagggcaagttagtctttactgagggtggcagtgagctggcactttggtctcacctcggctgcagaaacccaccctgctcccgtcttatttcctggggatttcagctgtgtgcaggcacagatgcatctcccaagtgcctcatgcttgccttgatctcctctccttcctctggccagtcctgaacctcttggtgatccacggcggcacctctgtgtcctacatccttctctggccatctccttccctccttccagccctccctctaggaccctgaccccaaccatccttcatccccatggggacattcagtccactgactcatcaccctcccctgtccctctgtgagagaaggagcaggcagagaggatcttgcaagagccttcagcaactctcttccacccatcctgttgcttgctgctttttttttttttttttccaaaaaaatagagatggggtcttgctatgtggctggtctcaaactcctgggctcaagtgatcctcctgcctcggcctcccaaagtgctggattacaggcgtgagccaccacacccggctccgttccctttctaagcagggtgctccttttcttgccatttcccccatcctccttcctctcccacagctcacttccctctctactgaatctgctgaagatcatgcagctgctgttcctgcctctaaaaccctctcttggctgggtgtggtgggtgacatatgtaatcccagcactttgggaggctgaggcaggagaatcacttgaacccgggaggcggaggttgcagtgagccgagattgcgccactgcactccagcctaggtgatagagcaagactctgtcccctccctccaccaaaaaaataaagccctctctgcatccattccactctccactcttgctcattctctcctgccctctaaaaggtgatctgtctttggcagattcaatcacttgcctttctcattctctcctgagcccactattccactctggtccccaccacttcccccaaaactgctttgaaccatcgcactgcaacctgttgcttagcccctccatctagtctcaggcgttaggactgactgcccagcagaggctggtgcaaccaatcacctcctttagtaagtttctccctgggcttcacctcttcacctgtgggctttccacctgtctctctcttttttttttaagacagtctcctctgttgccaggctggaatgccgtggcgcaatctcagctcactgcaacctctacctcctgggttcaagcgattctcctgcctcaggctcccaagtagctgggattacaggtgcccgccaccacaccgggctaatttttgtatttttagtagagtcggggtttcaccatgttgcccaggctggtctcgaactcctgaccttacgtgatccacccgcctcagcctcccaaagtgctgggattacaggcgtgagccaccgcacctggcagtctccctaatttaattcagtgccactgcgggcaggtggggtgtggcctggttgggcagtatagagctaccagctaccaatggtgttcagccctcagggtcgagcgtgggttgtctcagccccttgcaggcagggctggagttccttctggtgcgagttgggggacccagctcccccatccctctgcaaccccaggccccccaccaggtcccctctggttcagcctggtgccttccagcacccctggcccccagaaatccctggtccacagctcccttgacctgaggcctgaaattgacccactgccccctgaggcttggtccaagtccaagtatgccttcctctccagccagatgcctgcctgccactcagcatgtcagagcaggcagggcctctagattttaatggggaaactgaggcactgagggcagatgtgatgtccccagttgggaaaacattaaagacattctgggcttctctctcttttttttagagacaagatctcactctgtcatgcacgctggaatcatggctcattgcagcctccaactcctaggctcaagggatccttccacctcagcctcccgagtagctgggagtacaggtgttcgtccccaccatgtctggctaatttaaaaaaatgtctttgcaggatgggatcttgctatgtttcccaggctggtctcaaactcctgggctcaagtgattttcccatcttggcctcccaaaatactgggattatacgtataagccaccacgtctggcctgagtcatctcttttgacccagaacaaaaccagtccaggagtggctgtactccccaggagtgtacactggggaggcccacagctccggggtgcagtggggctcttgcaatttaatgactgattcatcttcaaaaaagcacaatctcagccaggcgtggtggctcatgcctgtaatcccagcactttgggaggttgaggcgggctgatcacctgaggtcagaagtttgagatcagcctggccaacagggtgaaaccctgtctctactaaaaatacaaaaattagccaggtgtcgtggtgcacacccgtaattccagctacttgggaggctgaggcagacgaatcacttgaactcgggaggtggagatcgcagtgagccaagatcgtgccattgcactccagcctgggcaacaagaagcgaaactccatcttaaaacaaacaaaacaaaacaaaaacaaaaaagcataatctctttcagaatttttaccttcttggtgtggttctgttaggaaaggcttccatgggaaccttcaataagtgacctaaaaaaaaatctcagagcaattcctttttttttttttttttttttcagacagcatcatgctctgtcacccaggctggagtgcagttgcacaatctcagctcactgcaacctccacctcctgggctcaagccttcctcctgctttggcctcctgagtagctgagactacaggtgcatgccaccgtgcccggctaatttttaaattttttgtagaaacggggtcttgttatgttgcccaggctgacctcaaactcttggcctcaagcgatcctcctaccttgtcctcccaaagtgctgggattacaggggtgaaccactgttcctggtttagagccattctttttttttttttttttttttttgctttgtggttttgagacggagtttcactcttgttgcccaggctggagtgcaacggcatgatctcggctcactgcaacctccgacttccagtttcaagcgattctcctgcctcagcctcccgagtagctgggattacaggcatccgccatcatgcccagctaatttttttgtatttttagtagagacggggtttcaccatgttgggcaggccggtctcgaactcctgatctcgtgatctgcccgcctcggcctcccaaagtgctgggattataggcatgagctaccacgtccggccctagagccattcttaacagggtttgtctccctggaaacttcccgaagcctcaccctcccaggaattccctgctaagtgccacagtcatctcttcaccactcggtttccactctcccatccttgcaccgagatcccactgttaggcctttttcaagcacagaccttctcatgctcagtctctctgtggtgtggaagtgtctactgggtgggcctcacagaaggttccaggccctggtacaagcccaagggaaatgatgatccaaaatggactccgataaagtttctgccactctgcattgggggcttttggtaggagtccagttcaattttataaaaataaaaatacatgtctcgca

SEQ ID NO: 1716 - DNA, 597 bp, Homo sapiens
acctcgggggtttcctgctttatggcgaaggcgaaaatggagagacccggaaggcgtgtgtgcgcccgcctctcccacaggagggagcgcggagacccgggagcggcctaggaccggaggcgcgacccctcggcccaccttgaggcccggcctaggaccggaggcgcgacccctgggcccaccttgaggcccggcctaggactggaggcgcgacccctcggcccaccttgcgggagccgcctaggaccggaggcgcgacccctcggcccagcttgaggcccggcctaggaccggaggcgcgacccctcggcccaccttgcgggagccgcctaggaccggaggcgcgacccctcggcccaccttgaggcccggcctaggaccggaggcgcgacccctgggcccaccttgaggcccggcctaggactggaggcgcgacccctcggcccaccttacgggagccgcctagggccggaggcgcgacccctcggcccagcttgaggcccggcctaggaccggaggcgcgacccctcggcccaccttgaggcccggcctaggactggaggcgcgacccctcggcccaccttgaggcccggccta

SEQ ID NO: 1717 - DNA, 789 bp, Homo sapiens
ctctgcgtgcgccggaggctgccgtggcgggtgggccgcctgacttctcctcccggccagttctcgagcgcctcaccgggcctcgccctgcagcctcgctctcgctggcgctgcgcggcctaggggactgggctgctggcctccgggtgcggggtgggggcaggctccgacctggggcgtcctggccgcgcgagccgcgggatgggggcccgggccgcggaggaggcgccgctggtgtgtcccttggtggagagggcgctgccggccctgcgcggtttccagccaggaagcttcgggaagcctggacgtctgctcactggagatgacacgtgcgtggggtgttggcattcttgttatttaacacgggaaggaggtgacttcgcctgtgatggacttccagtgtgagcactggccagagtgaccaggctgaccagcaccagccctgatccagatgcagaggccaggatgtgggcccagccctgtgccaggaggctggctggaataaagggatgggcaggctggcatgggggcagccgctgcccctgcctgggtgttgctgtgtattcctgccggccaggggccactgccaggaccacgcctcccttttcatatcccgattcttaagttctgctattgtggtattctggtggagaaaaaagaaccgcgtggctgtttttgaactgcctggaacctaagaccctgaattcttttcccccccaaggggaaaatctatatggaaaacatttattttaaaatacaggatgaagtgaattaaaagatttaaatgca

SEQ ID NO: 1718 - DNA, 446 bp, Homo sapiens
attttcataaaggtcaactaagaaatgtgacaaggtttgtgaactataaagcactaaacataactgtgcatccctacattttaggagttacaaaacaaagaaaaacagttaacaccactccaccaaatgaatagaggaaatttagtaaagatgtcaacctctctgtattggaagaagctccttgttgcttgtcttgaccctgcctcccatcgctgaggagtctagttcacctctaagccaagtaggatgagagtatatttggtgtctgagctcatttttgaatctacttcatttgtgttaccacacattattcattccccctgttcaactatctactaagacatttaaactggccaagaaacatctatctagcaaaattttggctgagagtgttcctccaaatagaataatctatttctaaattaaaccagattagcaaaaatgtg

SEQ ID NO: 1719 - DNA, 443 bp, Homo sapiens
gggctacaagccgtcgctgggggcggggcttgcggcccacctgtaggtcccggtgccacctcgtcagtgtcccgagagatccccagaagaacgagagggctgaacaggggaccccactgacgtccggtctctatgaagtcagagctattactatcagcattttacccatgaagaaaccgaggtttagagagattcttttccaggaactggatagccagcaagatgtgaagcaggatgaagaaactaagactcagagaagacaaatgacatgcccaaagacacattgataagaacgcatctggtagtggtgttcgagtccagcgttgcagcagagagatgggtaactgtatggccgaacagctgtcttctcgtggaagaaggaggccaatgtccaggagtggcaggcatactggaacttggacttctgtaggccaacctgggtt

SEQ ID NO: 1720 - DNA, 564 bp, Homo sapiens
agtgtggaaattcttactcagaacacaaaggattgaagagtgcttggaggctgaactctggaaggactcttccctgaggcctcttggcatctggctcttgtttcttggagcggtggtatggcccacagtggaagaccacagcatgatgcatgaatttacatttcctcagacattctggtgctgatgaaggtaaagatggtgaggctgcgatgatggtttcagggatgggtgtgttgggcgtgatgaatagcatgatgcatattgtcactcatttagtttatctgcactgatgatgatgctgattatatgatgactgttacagggatggtcacattgtgggtgatgaatatgaccagaaagggaagactttcacagttcctacccgaactacaacatcgatattttcatttgtctttcctaggaactcttaccttaatcacctgaccaatatgctgacgactaacatgttgcgccctgcctttcttccgggcctctctgccttgctgatctgttttgctggtgtgccctccactgtgctcttgggtctttgtctctcggtaaagc

SEQ ID NO: 1721 - DNA, 521 bp, Homo sapiens
gctgccaggcggcgagaacgcgctgggggaacccttggtccgctctgcgcgtcgctctaggatccccgaaaaggagcacgggcgcgaaagcggccaggctgggccaggatctagaaagactgcctggcgcaggctccctgcccccgcgggcctgctgtcatggactcgtggagagctcgcttcccgcgcggacccttcctgcaggggtccacgtccaggcaccggcggctcggacaccccacccccggccgggcacctgccctgggtgccccttaacccgggcggtagctcgttaagatggcgaagtgtccggtccggaacacgcgaaaccccaaatcccgcctgcccgacctcctgacccccggccccacgggacgacagactgggcctcccgacgcgcagcgcgctgccgggacaccggtgcgtgcgaaacggaggacctttgtaacgccacgtgtttgctctttttgaaaaaacaagaataaatgtgttaaactgtctgaaaagcttgccgcctaaaa

SEQ ID NO: 1722 - DNA, 1428 bp, Homo sapiens
ctattttaaagttaccagttcagaaaaagctggttctagcacgtaggtctgatagaccatattctaaaggtcagctaaaaaggactttcaaaccagggcaagtaagattgtccgtagcattttggggccagaatggctttagtctctgagttgccacagggtaaggtaagaactatgagcaggtccttccaactcatgattcctaagttccagaaaagttaacaggccacagcttacattgggagctgaagattatctgggtcagttggctgtctttggtatttggctcgactttatgatatatgatgggaataatcagcttctgaatgccagtaaggttggggaagtgctgagaggagggactaggcagatttattaccaagtggttaatttttcatctctctggcctctgtataagtatgcagataagttacatgtaattcttctctacaaaactctccatcagttagtggtagagcctgttaaagtagcagcttggtattatgaatctgctaggctcttaaacacttacggacttctaggtatgaatgtagctggtataagctggcacctgtacatattccatttagtttgtaccgatacctctgtaagttcttcagcccctctgccctgtcccctacctttgattcatcaaatgcttataatttttgtttggagactactgcgtgcatgcctctattgctcttccttggctcttattatttggtcctactcctaactcacctgataactccaacttttggtagattttgttcctgtctcttatagtgtcccaacttggtttcttcctaccaaacaaaaagacacgggaagtatctgtagtagaatgtttctggtatccagttggcaaatggaaactgaggttggccccaactgttcttagaccacctttaggttttgttgatcttaatgaaatacacagcattgcatttcattccttttcatttaaactataaaattatatcaaatgatgcctacattaagattctccctataagactgccattccagatggcaaaaggtgaatagtcataatagaaaccaattcttaagcacatgtgtggtattcccttgaccacaccctgggccatggtatctgttaatatgaaagcacatggggaaccacagaggagaatggcctaggtggtggctgctgtttgctgaggtgtgctgcttactcaagcaggagggcacctctgactgcttgggatctccttttttttttttctttttttagacagagttttgctcttgtcactcaggctggagtgcaattttgtagtcttggctcacctcaacctctacctcccaggagaatcgcttgaacccaggaggcagaggttgcagtgagccgagttcacaccactgcaccactccagcctgggcgacaagagtgagactccatct

SEQ ID NO: 1723 - DNA, 2917 bp, Homo sapiens
gtagatcctaatgttgctctccctggagctgggctgcaggaagtctgggcccccggctcgcactcccggaccccgcaccaacctccagggtcgctctccaatcttaaccaggtttgctccctgagcgtacccaggtgctacagcatcagcttcccttgccgcttcctgcggctgaagggatggtccgaccaaagcctcctgccctggggcagccgatgccactgcatgctttttcctgcgcttgggcttcacggtgccacggatattggccggcttgctgcgcttggagcgtagggtaatgtacaccacattgggctgcagagtggacccattgccctgggactctggaggggccagggtaccatccaggggtatctcagggaaggatggctcggcggtgtcgcggctgcgatgtggccccttctcagccgcctgtccatgctggagagaggccctccccacctggctcaccaggaagcccaagtagatggcacacgcagtgcccagcagaaggtttctccgggtccttggacgccggctgctccagagcttacgcacccgcgggacgcacagggagcagatgaaccagtttatgagctgccccggcttgtctggacaggtcatttctctgccgcatccacatgttgaacggagtttaaagtctgcagttggctcctgctaatgtgatgcatggtttcctgacttcagctgccgcgtccgcttcgggattcagctgaaagaaaataaaagcatctctagttctgttttttcactattaaaaagaaaaagaagaaactcgtaagcaaccttacttacacagctggccccatgcttggctccaggaagaatgtaatccttgactctaatgcaaagaacttttaaaggctgaggcatgaaatgaccagtgctttggttaagaatgcacattatactgcagttctttggggaatgaagccacccttgactgaggtattatgccaactctcaccctgtgaatccactgactggggaacattgtttaagaaaatcacatggctgtgccaacaagcaaggagacacggcacagaagacagaggcagaagcagctttattgaaaaacagagcatgagtagaacgacttcaaatcccatatggcaccacagtgagaagtaacttcctctgagcttcttagagaatccaacaatgtcctgcttccttggggagctgcagccatgggcacatgggaatagggcttccaccaagagtcccgtcagtcacagcaacaggaggtcttcctcagacaactttgatgatagtggttgttagccagagcaagctagaaccagaaagaaaaactatgaagatgccacagtgggagtctgagcaccttgaggcctcctgttggaaactggcaaacctaactgtgggacacttggatgctgagttctggtaaacatgctgtcggaggcacgcctctaggatggacccccatgatccccacctcctggtatccgcgccatgatgcaatctgcttacagcctaaatcaggatgaaccatatgactcatagaacactgcagaaggcatgatgtgtgacttcagatgtgaagtcatagaggacaaggacacagccaccttcttggatttctcactctgtggaagggcagtgacattccatgagacaagcagtcctgtggtgaggcccatgtcaagaaggcctgagatctcccaccatcagctacagccaatttgtcagtcacgtgagtaaaccacctgggacgtgaatcctctcgacttaaccacctcttcaggtggccagagccctagcccaggtctgactgcaacctgatgagaaaccctgagtaggaagacctgcttgagctgctcccaaattattgatccacagacactatgagagataatacgtacttagtgttcttttaacccactacattttggttggctgtatttattaccctgtaacagatgactaatacatctcctgtgatcaaaacacttcagaggttccccatttctctcagagaaatatccaaagtccataaggcctgtgaggcccctcacattcttcccacccccattacctctctaactccattttctaccactctccttctttccacctcaaccacagctacagtgacttctttgccctttctcaaatctgcctcagggcctctgtactggacactctctccccactcccactccctcctccaggccttcactgaaatgtctccctctcagtgaggacttcctttcctaaactgcagtacccccaacctacacacacacacacacacacacacacacacacacacagagtctctagtcttcctagctccttaatttttttttccttagcacatatcactatttcatataccatatttgtcatctattttctggtttccctttctcagatgtaagctaagttggtgcaggggtttttgtctgttcccaatgtctagaagagtgtctgatttacagtagacactccatgaaatttgtcaaatgaatacaccagtgttaagagtataagagtgtaatagtacctttaaaaatgcctcaaagataaatcttttgatttatctttatttttagatctctacccccactttagccacttctgaaatttactactagaaaaaccttttctttcgtgaagaactgtctcacaaaaatagcagttaaataggaagctatcctaacccactgtttgccttttcccttgtgaaactcagaccaaaattgaaagtcatctattgtaactatgtgttcttggcatctaaactctgttttgtttcatcttgactttcttaatttcctaggttttttcctttgttcctattattttattgtttttattctatattgcttcaaagactttatgaaattaagtaaattataaatacaaatat

SEQ ID NO: 1724 - DNA, 501 bp, Homo sapiens
atctacatatatatgttgagagatgctgctttttggccaaaatgaatcttgaattgggggtgtgcagaaaaagttatatctggcctgaggctggtatcttttagagtggcctacttgcatggttggcccttatctgaacacgtggatttaggggtattctcactgttcactaataaaggtggttcactgtacctagactgttcaaacaagatgatttatgctaaacacctgctttccttctgggagtatggaattttggtacatgccaggtaaaggatgtctatatgaccaaactcccaatgaaaaccttgcatactgagtccctaggcagaaacatccctcgtataaaaatgtgctctgtgtgaatcttcatgggagggagagatcctaaagaagcctgcacatggattcctccagattctgcttatgtctttttcctgtatgatccaactgtgtacacttactgtgtcactgtaataaactttagccatgagtacgata

SEQ ID NO: 1725 - DNA, 553 bp, Homo sapiens
atcttgtggttaatggagacagatggtcttcccttgatagatgcttctggaaagttaacattccagcagtgacggttacattcctgtcaggcaggacttcaggaagagaggaactccgcaccgtttgatcaggattcccaggtgtgactttgcaggcattttattaatgcttttacgagttagaagagttgggataatttgccatctggagtttctctgccttgctgatctgagctcagacctgccaatttaccagagataattgataacaccctgtaacagctgagaggaaaatggaagaaacggagatacttttagtgaagcagaataaaccactgaacaggaaaaatgaggaagctgtgagtaccagtggaaggaacgagccaggaagagggactggaaccatctcagaagccatgcccctcaggctggaacttgccctgtctcctcgcagatgagctacctcttgtgtttaagaattaaaggaagatgagctaggaatcaagaaatacgcagaactgattcctgtcactggcgccaccctgccacttgc

SEQ ID NO: 1726 - DNA, 1504 bp, Homo sapiens
ctgcaagccaaggagagaaatttcagaaggaaccaaccctaccgacatcttgatcttggactttaagctgccagaccttttatacattttctacagaaaatgcaccccatcattgcttatagcccacccacgtggactgctcattctgtgaatcatgttttacagatttgtttatgtggcattcctcgtttgaataaagcagaaccaaatgtcttggtttgaagattgagatgaaatgggagggccacaaatagtaatttatctttgagcatcgtatagataaacatgtaacctgatactaaacaaaagtaaatgctcatggactgtcagtgatgtggtgggatatgccagagggaagtgatttgtggactcactggagagagacttctactagaaaaattgccttgatgttaggaattaaaaaaacaaaacaaaacaaaaaacatggagccgtattctccagaagcttacatctgatttaacgagacaggtaagtacaatttcaacataatgcattaagtgctatgagagtagtatgatggtgataggtgctatacaagacaagggttctaggttaattgctttgagaaaattgccaccctttaacaaggttaaactggattctttaacgtcaaccttactgagagtttctaatatgtcactgtgctttgtgaatcttcatgtgtgtggagtagagatccagtctgccaagttctgcaaactcatctgacaacagaactctttttcaatggaatatctcaaggcatttgtgctccacgagacataagatgagaagggctgacacaagattctcacctagtgaaaaaaaaatatgtatttatatttttaaaaactggttggatgggggctttctcccaaatacataaatgactttgaagttttttttttcagtcctatgacagagtaaagatgcagacttaaaaggatttaccatgaagattttaatgactgctgggctgattattaagcctgatcccagtgaaatggaatgcctttagtcattttcatttatggactgtttaacgatttttctccaaaagaaatatttaatgaacacaatatcgagttcctcccagtgcttctaattaacagaccactgaacgatctttgttaaaggaaaggctagcttcaggccagaaggcgttgcaggatctaatatgtatgctaccatgggtgaccaagcataaagataaactaaggatttgaatatataagggctaatgtttgtgtccattgttatggaatttctgacaatcactctctagtctttcctaatatttggcctttaggaaaagtgttttggactgaattgttctctctcctcattatcctccttaatgtgtgaaagtctcaatgtaactgttgattacctgctctctatttcataaagaggaaaaacagatccagaggaccatttcatgattcatcctttttcaaaacgtttcttaaaacattaaataaagttttattattgtaaactgtt

SEQ ID NO: 1727 - DNA, 495 bp, Homo sapiens
tcatcagcagcacagtgcttcctttcctctgaatctgccatcagctcaggcagatttctaagcagcaaatcagcctttgccagaacactgcaggacaccagtgcagcgcccagcctgcgaccatgagctcgcctgcacccaggtgattaaaaagctttattgctcacacaaagcctgtttggtggtctcttcacatggacgcgagtgacatttggtgccgtgactcggatcggggaacctcccttgggagatcaatcccctgtcctcctgctctttgttccaagagaaagatccacctacgacctctgctcctcagaccaaccagcccaaggaacatctcaccaattttaaatcgggctctaggggatggtagagtcacaggatggaagaactctgtgtccttgaatcattgcatggaagagaactggaagttgcccaggaacaccagccttggacagttatgtgaacaagaaataaacttcttttacagtgtca

SEQ ID NO: 1728 - DNA, 1742 bp, Homo sapiens
gctgcataaggggagtgaacacaaagtacatttgaccacaaaatgactctttaaaagtcagaactacggtagcatgaagccaaacgagggttccacagaagtctccaatcttcaaatcttcagtgtatgaaagcacagattcctgaaagaatggcctcaaatgaccaggagtaggagctctctatatccctgctcctgaaaaacaagctaactggagtctccatcacctgccaccagctatacacactaccaactacccaactgaactccatgactgatttgccagctaatcatgcccctgacccagcccacatggacatgggaaggacatcagtgaaccgtgaaaagaggcagaggctcactcccgtttgtattattaaaacacacgccaataggacataaaaagaagcaagagtactgggctttaccatgagttcaaatctcatttctgccaattcctatgtctaaaaaaaaaagcttcctaatctctttgagcctcacattctctatctagagaatcacttgaccagaatgttcaatgcagataaaaatactagaaggtattttaattcattccaagattccttaaaattctgtaattctatgtcctcttgattctgtctatagaaaaacttggaatacataggcagcagagtttgaaaaaaataatagaacaaaagaaacaccaagaaaaacagagaagaaagttttaaaaaatgaagacaagattatataaaagtcatggaaaaagcaacaagactaaaaaatgtattatggaagtaagcagaaatacttgcctaaatggaaaaccaaactgggaagtcaaataatttgtctctaagacttgcctaaacttgctttggtaaaacttacagtcctatggccaaagctaagtcagatctgccctagagcctttgaaggtaaaaataagatactggttaccactgaaatcgtcaaatttattaggactaaccacattctaacaataaacttaaatgagagttcaaggtatttaaactctcattaatttagaagttaatcaaattaatgaatccgattgatctgattcagacctatactttgatccaaggactgcacagatatctatcaatctatgctgaggagcaagagaaaggatttggaaggcaggtaggctgatggtcaaactgtaggccagctactttgttaactatgggatcatgaggcaattaatcagctctaatccatagttgtttatttaacagtaggttataggaacacagatgttatgatggctttatgagatgataaatgcatagaacatattaggatgtctagcccagaatacaacactcaacagatattagtttcttccatctatattttcttagttaacataattttttaaatctatgaaatcttacctgactgcagattcatcaggaattccaacatctattaaagaaaaaggtaaaatgcattttaaatcaataataaatgtacagaatattaaaatcataagaatgcacagtgatgcatgcctctaatccaaactacttgagaggatgaggcaggaggatcacttgaggagctcagaagtttgagaccagcttgggaaacataataagactctaccttcataaaaaaattgtgcacacttgtgtgtatgctttacatcctgtttgttgttgttgttgttgttgttgttgttttggtttggtttggttttttaaagcataagactgacgctttgttacaaagca

SEQ ID NO: 1729 - DNA, 630 bp, Homo sapiens
tttttgttttttttttttagtttaaacttgattttgtgaggggacgaacagcgtgacaattaaaagaagatctgggaatcaaaagcttcctgaggccttcaccagaagcagatgctggtgccgtgcttctacagcctgcagaactgaaggactttacagcttctctttcgcatatccaaattgccagcatcaccgctcttgcactccaagccattattaagtaaagtaaagaacacaaacactgtgatactgctacacttgatctgataaccaagaagtctactaagtgactaacagcagagcaactgggaacctaattctgaccaaaaaggaggaattgtttggctaattggaagtgacagaaaccttgggagaaagcaaccgcataccaaggataattataagaagaagagaagacatggagaagaggagggagtagttgtgaccgtggaggcagagaatggagtaatgtgatcataaatcaaggaatgctgacagccactaaagctggagaaggccaaggacagatattcaatcctcccgtagaagtacagccctgctaatgcattgattttggacttctggcctcagaactgtaagagaataaatttctattgttttaagccttca

SEQ ID NO: 1730 - DNA, 494 bp, Homo sapiens
gggaaggaataagcctggaagaaaaagatacaacgaactagcacaacgaggagtttgaaaagttcatgacagctcacagctgatgatggtggcaatcttaaggatacagaaagctcattcctcatgcagggaagaagaaaatattctaaagaagagataagcatattccatgaaatcaaaaaagcgtaaaacgctggaggagaagtcagtagcaagcagctaagacaacatggtacatgtggctagaagcccaccaactgctaacaaccagctggagggcctccccggaagctgagcagatgccagcaccataattccagtacagcctatcaaactgcctaggtgctctctgatggtgggaatccactaataagaggtgtccagttcttctagcaaacttgtcagtgctcatgtcttccatgggttgtgccctgaatcaatgcatttattaattctttcaaaatgcaaaataaaaattatgtgttgagcctcta

SEQ ID NO: 1731 - DNA, 516 bp, Homo sapiens
cttactgaaacctccatctcccaggttcaagcgattctcatgcctcagccacttgagtagctgggactacaggatttcgccatgttccccaggctggtctcaaactcctgaactcaggcagcccgcctaccttggcctcccaaagtgctaggattacagcccaaatgaccctccaagaccctctggaggcacccgcagtgctccttaatttgcagctctacagaatgagaccagcgtggcagccccctttcaggacagctcccgagacgagacgcgagagcagcccctaaatctcacccagcaaagccgtttcttcctaaccgggctggggagtgccgcgcgctgccagcagatggcgacagaggattagcctgcggaaaccgggtaaggggagggcggagctgaggtgagaacccacatccctcatgcccagtggcagcaggacgtggaaatggtttgcccagccctcacttctcttggacagagcttgagccttctgggaaactgcttttccct

SEQ ID NO: 1732 - DNA, 670 bp, Homo sapiens
gtttctcaaaccgtgccttcccatttatgctgcatccgcgccctgaatctgaaattggtcgtcctgccacgccgcctcaccgcggtataaggtcgtcccatcctgaatggccggtgcgcagactcaattgcgactttgaggctgtcagccgccacccggcaaccttccagtgaacaggattctgggtttctcaaagctgtaattggagggccactccagaggtgttaaagctccagcacttcgagcctgcctcgtgggaaagtcttaggctgagtctgtaggtgtctgcagttaagaagccagcggtctgcatatgattgctcaggggtggtggctgggtccaacagcattcactacaggcctgccttgaataccacctagcgcagtgctccgcatatcacaggtattggaacatctctagaaaagattgccttgtcttatgaaaatggctttttaaaaaaatcctaattccaactggtcatcctagcaactgatacaataactgacctcaaaatgtttcccaatgattcctacctcctactattcacactcttatgtagttccctcccacattgtaccagggttggactgtgagactaatagaatgcagtagcagtgatagatgtcactgctgagattaaatataataaatggcaccttgagttctgtc

SEQ ID NO: 1733 - DNA, 3779 bp, Homo sapiens
acatccaagtatgacaagttagtgggaccaatctggggagggaagcatcaggagaacaggacagacccacagaactgggcccacctaccctttctttgggtgtgccccggggcagcctccttgctcctgccttgctgacactgcctgctcccttccttccaacctcctagggggacgggctcagcatttctgttgttaggggcgggagctttgtcctcacggcctggccaaaatggagcctgcaataggtgcttatacttataaagacccgctagattcagtgcagctgttagcaagtgctggtcccaacagacccctcccagtgggcagaggcagggcctccaggagagagcagcatccatccctaaaacaaaccacctggcttcctcttacttctcctcccagcctctgtccagtcccccaaactcggacacggtctctcgcctgggcttccgctgcctccctgcctctcacccctccaccctaccctccatctccataggtctggaaggaacttggagagccacagagctgacgtccagtcacctattgaaagcagcccttatcggcacccttcccttctttccatcctaaggcccgcacctgacccctgcacctcaggaccaggctctgcagcctccctgagcccctgtccgacccctgctcccaggactgtttgtatctgttgtcatgagacaggaggaggatgtgctatttcccaccacccttgtcttgctggcccctctgcctggaatggccttcctctgcccagtggcaaacagactttcaaggttcagttccagtgtccccgctgcaatcccccaaacagagtgagcggttccttccatctacttccaagaactggaaagttcctgtcttgtcgcgcgcactgtgggaccacagcattggttcccacccagctgtgcgttcctgcagggtcaggcatgtgctgggtccacgttggcacagagcaggggccagcaggtgcttgctgtgaataggaacgtttagcagaacccgggagaggagacagtgttaccacacttgctctccactttgcctgcgggtgcctttaagaagcacagatttctaaaccttgccaagccgatccgctgaacacctctacattcccggctgccttgttggctccctgggacacggcagctgtcctgtgtccgtaaacagataatagctcctccgactctaggtgtctctccatggccctttgtggccaggcctgggctgcgtacccatgggcaccccctcccattcaatctcacagacaggacaccaggctgggcagtcctcaccaacacccctccagccggctagccagcctcctttcaactctgcattgccctgagtttgtgtggggttgttgagttcccagcaggtcctccggatgtgcatgtaggtagtcaggggaatggagtgggaggataggagcccagacacttgaaatggtgttccatgcctttctagaccccaggccctttcctgcatgattttatcagcacatgctcaatccttcacagtttacaaagcacttctagatccatccaacccaccaaggatgaggatcactggcactctgttttcccaggcagggaagtggcttccaggaggcttagtgactgaccaaggtctcgaggtctcgtgctggtgaagtgcagagccaggatccacctgagccccccggctggctccagatcccacactccttcctcggcacttcctcggttctgcacggtgcctcagcactccccaaaacatcccattttgcaggtgtggaaacccacgtcccgcagaggctgggtgtttgctccactcagttctggggacttagcttgaggctctctgatctgttctcctgctgagcaccccaggaagggctccaggtctcccagccacttagtgagagtggcaagtcctgtctcacttgatctttgggagcataagacgagatcacagaaaatgtcatcaatgtgaaagtgttttgtaaacgaaggcgctgctcaaacgtagtgttatcttcagcctggctactggcttcctacaaagtgtgaagggatgaaggtaaaagctctttcttgaataatgttatccatcaagacagatgaaaccacactggtcagctcctcctgccctccccccaacgccccacctccccttcattcccacatgtttaaagacattcgtaggctgagaaatgattcctgctgctcctctgacacccggaatgtgccttgtgattggcagagtgtccctccagaatagcttaattttttccccatttcttgactaatgtcctctactccttggccctgtaattgagaattgggcttgcaatggccagcacacgagcatcttccctgaaagctcagaaatgatggctctcccggcagggagctggcattccccatggctgagagcgctgtcctcctcgcacggagggatcattcaccaccgtgtgtattaacctgaaatccacctcaccttgatggatatttttgccaatctcccatttggtttgatgaatgtgagagaaattttcccctatggcatatgaatttctccctcacaaaataagtctaaatttttttctgttcctggagatgaaggagctctgcagaataggccacgtcttcatttacctttatctctagtagccaaaagtcttgatttttatataactggaaaaaccacgcagcataatgcttatacacacacgcgcgcatgcatgcacacacacgcacgcacacacgatgcacacgcatgcacacacgcacacatgcacacacacgcatgtgcgcgcacacaccacacatgcacacacgtacacaatgcacacatgcacacacgcacacacatgcacacacgcacacgcatgcacacacgtgcgcacgcacacacacacactgagcaccgttgagctttggtagaaaatggcaaaattacgatgtttttctcatttctggtgattggcttccgagtgttatttagagagcggagtggagagggctctttgcagccctgcggtagtgtcttgtgctcaccaagaggctcacgggaaacatgtcctccaacatgaaggtgtttgctaagattccaaccaggacccagtcttgggccacagaacactgactgctcccccaagcccctcgcagaccgcagggatattttcccttcagaacctgttgcatcagaatggggaaagcgagggctgagaatcccagaggaggccgtgaactgttctggaaaagcgagggctttgcagtcagaccttcatatgcactttgttctatctgttgcgctctgcctaaatgaccacgggccagtgactttacctctctgatccctgctccttgcctagatagtggggatcacgtcgtaatgtatgtaaagaaccgggtgcgggacttggcacctgggaagtgtcttaatacatgtctgtcgagaaaaggaagggtctcgacgtgcggaaacaagacggatgccaggaaatacgtctgcccacctccacgcccctgacagcggaggctcctggaggtctggtgagaggccccacgtgctccagccccctccgctctgtgctgagctctgcctttaagagactgcagctcctgcctctaaaaagcctttcaaaattctttattaaattttcatggcgcataaagtcaaggttctgttacttggcctcagttgtcttggcaacttcataaaacgcaataataaaacgaagctgagtgttgctaaacacaggctcattgtataaacga

SEQ ID NO: 1734 - DNA, 8507 bp, Homo sapiens
ttaaagaatcactgggtgttaaaggccttccgctgtatccagacccctccagagtacctggcacaaagactcagaacaacttagaatctgactacttggccagagatggcccttcaagcaacagctcattccacagcagcgaagaggaagggactgaccttgaaggagacatgctggactgcagtgggtctcggcctctccttatggagtctgaagaagaagatgagagctgcagaccccccccggggaagctgggaggagccgttccattcgctccaccagaagtctctcctgagcaagcaaagacagtgcaaggtggaagaaagaaccagtttcaagccttcacacagccagccactgatgggctcagtgagccagatgtttttgccatagctcccttcaggagctcaagggttccaaatgatgacatggacattttctccaaagccccatttgtctccaagagcagtatggctccttcccagccagaggagtcagacgtgtttttgagagctcctttcactaagaagaaaagcatggaggagttaacagttatccaatgcacctcccaggagctgcctgcacagaccggtctcctcagtcagacaggtgatgtccccctgcccgcgggccgtgagagagctgtgtacacctctgtccaagctcagtattccacagctggttttgtgcaacagtctaacctcctgtcccattctgtacaagcagcagaccatctggacagcatctctcccaggggatcctgcctggaatctgggggtcattctaatgacagaaacaaaggacctcagctccagaaagaagctgtctcaggccccatggctggcaaaccattccgcccccagtccttatccaagtattcccgtcactatagcccagaagacgagccaagtccagaagcccagcccattgctgcctacaaaattgtttcacaaaccaacaagcagtcgatagctgggtctgtttctatcacatccctttcctccaggactacggagctgccagctgctgatccatttgctctagcacccttcccttcaaaatcaggcaagaaaccctaggagcaaaacctgagcctcaagcctcttgtctctatcccaccctcaatacccgccatggcactcccagcttagccttctgaagaagaaatattatcagttcttatatttcaattccctgcgtcagagcagaatttcttgagtcaacaaactcagttgcagtgatatttagttgaagcccctttaagttatgttcatttttgtttgtttgtttgtttgtttatattgatttctggacttggaggcattttcatctccttcacagaggtcatccacttccaccaagaactctgctttccccccgccccacccacagaaactgtttaaatcctgaaatacttcttcaccccaatcccaaaggggccctattgttgctagttttaattcctgtagctcctgttctaagtcatgcccatcgaagaatcaagattagtccctccactaaatcaagatttagtactcttgaaaaggggagatgtctggaaagaagagcaagataaaaaccctgcacatcaacaggaagtataatcctgcagttactaataattcctgtagaagcagcagctctaggagtctccagatctgattctcagtctgtgtgcaagccaggctggctctcgtgcatgactgtctatgggtgtggaatgtacgtcagagcctgtgtagagatacaggcagatgggctaactcctcatgtctagtcatgctggcagggctttccccacatccatgcttttgaaattagtgtgagtgtacaggtttgtgtgtgcatgtatacgtgtgtgtgcacaggaagcatttccacttgagggaaatcctgccccatcatgcctacctccacaatgaaatcactcgttttttggtgtttgctcgcctaactgacttgaaccccattttatttatttagtttttttctcatggcaaagtagaatacgttggaaggtgtagggaaatcctgctggaactggtgtttcagagtaaatcttttttctctccggaatttcttgttttgctattaacaaattatatttacctgattatgaaaaattaattttccttatacattttccccttacaacactagaaaagagcaccttgttacagttccggcctctcagtatgtgggctaaatgccagcattagggaattcattaatcatgagactaggctacaaactaggcttgcttgttttggggtggttttgttgttgttgttgttgttgttgttgttgtttccaaatctctactgccttttgaggaaatgtaaatctgagacatggaaataagtgtttgggagaatggaaaagagctgaatcaggtaggcatgaaaacttttacattctctatcctctttagatgttgaaataggccagacaggttaactgatgttttttaaaattgtcttttatttctggaaagatctgacttattcctagcttttttcataccctttattattagtgccttaaaataaagctggccaggtgcagtgccacacacctgtaataccagcattttggaaggctgaggcaggaggatcagttgagcccaggaagttcaagaccaactctggcaacacagcgagaccctgtcccttcaaaaaataaataaaaaaataggctgggcatggtggctcacacctgtaatcccagcactttgggaggccaaggtgggcagatcacaaggtcaggagtttgagaccagcctggccaacatggtgaaaccccatctctactaaaaatacaaaaaattagctggacgtggtggtgcacacctgtagtcccagctactcaggaggctgaggcaggagaatcgcttgaacccgggaggcagaggttgcagtgagcagagattgcgccactgcactctggcctgggcgacagagcgagtctaaaaaataaaattaaataaaataatgaaaaaaattagctgggtatggtgacatatgcctgtagctactcaggaggctgagctggaaggatcacttgagcccaggagtttgaggctgcagtgagttgtgagtccagcctgggtgacagagtgagacactgtctccaaaaatataataataaaaataaagcctgtatctcaatgggaagatttctgctaaggcagttcaactcactggaaagaactgctgcattaggtttcaactttaatgctttctgttacttctagtaaaggttaagtgatttttccattagctgtagaagtttggagagctatttaccaagccagatcaatgatttaaaaattattggaaattcatctaagaatcaagtctgaatgcccaattctattgcggttgattaggtgtgatattctttaaagttcaggaatattggcagtaaaaaatgagcagctacttttcaatactttgtccttttttggtggtctctgcctatttcaaatgtcctgatcaaaagataaataattggcactgtgccaaggtttggttttccaactaaggtttcaactgtgccagaaacctatgtccttcactttggtggatgctaaatgttattctaagaatatgctttttcccaattctcctttctgatttttatgtattagtggatgcaaaattgtctttctagttgaatgaataatttcggctaatgcacgtggaactttgcaccccagattcttcccatggtcattatcaagtgaagccctcaaaaacatgagcgaagagcctagaaatactcagggagatttctcaccccaactcagaaattttttttttttttttcaagacggcgtcttgctctgtcgctcaggcgggagtgcagtggtgtgatctcggctcactgcaacctccattttccgagttcaagcgattctgcctcagcctcccgagtagctgggattataggcacacaccaccgcgcctggctaatttttgtattcttagtagagatggggtttcaccatgttggccaggttggtcttgaactcttgaccttgtgatccacccaccttggcttcccaaagtgctaggattacaggcgtgagccaccgcacctggcccagaaattctttttttttttttaaattattattatactttaagttttagggtacatgtgcacaatgtgcaggttagttacatatgtatacatgtgccatgctcgtgtgctgcacccactaactcgtcatttagcattaggtatatctcctaatgctatcccgcccccctccccccaccccacaacagtccccagagtgtgatgttccccttactgtgtccatgtgttctctttgttcaattcccacctatgagtgagaacatgcggtgtttggttcagaaattcttaaagtaagagatcattctaattcccctttccaaatattcaggattatctctgtaacagcccagcaaaatgtttttcctttggttatttgataattcccttctaatcaagtgactattttaattctcaaggtgcaaatcaggataaaatcatggtgattttactacatagttgaatacttcgtcaagtatgagcttgtatcctttttaaatttttcactggaggccaggcgcggtggctcacgcttgtaatcccagcactttgggaggccgaggtgggtggatcacttgagggtaggagtttgagaccagcctggccaacatggtgaaaccctgtctctaccaaaaatacaaaaagtagctgggcgtgatggcacgcacctgtagtcccagttactagggaggctgaggcagaattgcttgacccagggaggcagactttgcagtgagccaagattgtgtcattgcactccagcctgggcgagaagagcaaaactccgcctcaaaaaaaaaaaaaaaattgtcactggagacatgatgggtggagactctacataccttctttgaatacagaaacggatgcaaacacatgcaaattacttttttttttttttttggtgatgcatgaaaaaactttgacttgtggattacattaattattagtaacagttagattctgccgacttgtattacagtagggtcttatttccttaaagagaaaaaaaaatacagtcatgccccacttaatgatgagggagacattcagagaaatgcatccttaggtgattttgtcattgtgtgaacatcacagagtgtacttaacacaaacctagatggcacggcctactacctacctaggctatatggtccagcctgttgctcctgggctacaaacctgtacagcatgttactgtactgaatactgtaggcagttgtaacacaatggtaagtatttctgtatccaaacattttagacatagaaaaggtacagtaaaaatatggtataatcttatgggaccatcatggtatatgtggtccatcattgatggaatcgtttttatgcagcacatgactgtatataatcaacaaacaactctactttcttgttttcgtttgttgtgtttttgctttacacatttgatagggaacatagaagttgtgacctttcatttcagtggaaagcattgagccagaatatatttattcctaaaccatcgagccacacatgcattgatgaaccctgaaagaatccacagtaattgactaacaggcagtactgaatgaaagatgtcatatgtggtgaaaaatatttaatatatcagtttcttgggctcacatacagccctttagttccaagtgcttggttagattagaaaatgggatgaacacaatttgatgctgaagcagctgctgagcagcacccagggagtctaggtcatacgccctatattgttttcggcccacttattgttgagttgaaaagtctcatatttgtagactagagtgtatgtgtttagaggctcatgttgtatctgagttttctctggcaactaagatctctttctaaacgttctagaaagatactggtatcttactggcccattatttagtaagttttagaatacatgtacatcagtgttttcaactgcttggtggacatttcactgatgcataatcaaagtagcagattataatcatcagagtgatctgacaaggaaattctgtatttgcttccataaagaaaaataatcaaaacatatatcagatataatatatatgcagtatatcacataggaaattttattgtaggaaattagagaaggatgctactcaattcattctctagcaggaagaatacagcttaaaaatcacttgggtccctttaataaagaaaagtgtgattctgtgttgtgtgtttggaactgaaattggagaacacgtgccagtcgactgtgaaatggttgctggataaaaccacagatgtggttttatccgagaaatgtgggactgaaattattttgatgagaggtacataagagagctgcagaaaagactgtagcttctgaggaggcaggagtaccttgttaatatccaaaccacccctgagttctaatgttccaactccacctaaacgaggaattggaaactttaaatggaattatctaatttaaattcttagttttttctttgtctttctcagctgatacttgtagttttgttttgttttttaaccaccaagaacacttgcaagtttgttactgaaaacatcactaaaggaaaagaagagtttcaaaatgcttgaaaagtagtatgtggttgggaattgtttttgttcaagtccctggaagtcctcttggcttagctcccttgttcctgttcccacttcatttccttacttaacattcccctattttgagcatgtcaataagtgcatgatgaatggcacagttgaatgatcatgttaactttaattgcttcctttgttgctgtaaacagtttcttgttaagtttcagccaagtctgtgacaatctcaccaaataagaatgaaatgggcggggtgtggtggctcacacttggaatcccagcactctgggaggctgtgttgggccgatcgcttgagctcatgagttcaagaccaacctgggcaacatggcaaaaccttgtctctacaaaaaatacaaaaattagccaggcatggtggtgcacacctgtagtcccagctacttgggaggcttaggtgggaggatggcttgagcacgggaggcagaggttgcactaagccaagatcgtgtcactgcactccagcccaggcaatagagccagaccctgtctcaaaaaaacaaaacaaacaaaacatgaatgaatgaaatggctcaccttccctattatgaactagaagaaaggatgaaggaaggttggcaggaccccagccttactctgtagtgacaacccagaggtacttttcccggaatgcagggtcaagtttatgtgtgaagggactctagaatagctggtaaaaatggctacatggtaaccattcttgacttagtccagtattcccataatttgtaattccataaatttattctcagctgtcccccagccatttctaatagaaggatgtgtaccccagttttgacaatgttcttgaaatcaagttagtgttacctgcattgcattataatggaactatatgtacatgttaaagggatccgtttgattcctttcggcaaggaattgcaaaaatagtttttaccaataccagttaaaataggataggttagactttgggggcagggtgagacagtgcagccttttcactctgaaatggcaaatcagctgtactctttgagtctaccagagattcctatttgagtgtgaatggggtgtgtgtgtgtgtgtgtgtgctcattcatcttcatgctttcttccatggtgttaattcaagctctcctaataaaggtatccaaagagtactgagaagtgaccataggtatttggcatgagtaaatgtagttccttttgccaaaaaaactctcaaaagttacaactggagttcttcgcgataaaaggttggggaaatcagccatggctttagccttgttcccaagtacacatcttcttatccacaaggatgaaactctgtagggctcaccctgagggctcatgtgtggcattgagagggtagcagtgaccagaacaccacaaggcccacaagatgttttgaatgagggaacatttaatgtcatttgttaggagatagaaaccaaataataaaggacaaggaccacgctcattccgtggagaagaggtgaactccctctgctgactatttggaatggactgaatgaggaggtctctccagccagaaggagtattgaggtcatcaggcctcagaaaacaatgtacacataatctcgggctgtgaacaagagaaaggagggggggaaacatgaaagtcaatcttaacaatttttgcaatacctcttatttgcagaccattggatttatgttattgcactctcggtgtgatttatcgtatgtatctgataggttttatgaattgttttgagttgtaaactcctataccctttattaaaatggacctaattaagtga

SEQ ID NO: 1735 - DNA, 592 bp, Homo sapiens
tccccaccagggtcctcagccacacaccccgagccctgcctgcgggcccagcccccccatttccggagcctgcgccccggacccagcgggggctgatccctgggaaaggcctggcttcctcttccttcctgtccctgccccacctccgccgggctccacagccgccgggagcccagggccgagacgggaggagggcacccacctggtcggtgtcacatgctgcttcggccccagcgtcccctccaggtcccggcgccggccgcagtccccagagccgtccccagcgcaggcccggccgccccacccgcggcccgcccctggccgcccgacgggagggagggatcgggttctcctaggaagtttcaggtcattcaacatttattcaaccaaaaatactaagtcagctctatacaaactaatggaaggatacagctatgcaaatatagaacactaaagtgttacatgacagatgtatgaggggaagagtgctggattcagagcccacctcaggggaagacaggaccctctccaagatggtttccctagaagctactacctctccctggagggtggagatatttgctggtcaaag

SEQ ID NO: 1736 - DNA, 2633 bp, Homo sapiens
aactgcaatcatgagtcttcagaacaccttatgttcacattccctcatagtgccacagaccctccttttcttgtgaactggataatcacatacctgcagcccccttcccttattgatatcaccttcaaaaattgaagaaatgtcaacattggggaagaagaacacagcaggatgtgtcaagtggagctgatattgtccgggaaaaatggctgactgcacactcttcggctcacccagctcgaactcttgcattatgatgagacagcaacaaggcaccatcttggagaagcagagagcagctctcatcagacaccgaacctgctggcaccttgatcttgaacttctcagcttgcaaaactgccagaaataaatttcttttgtttataaagcacccagtctcaggattttatcttctatggaattacctcctctaagagttttctcccaaggcaaactgcatgaaagtcaggtctctacgttggctatgcctggctctactgtatacactggcttttgaacctggtcatatgttggtgtcttggttggaatctggagaatggagtgggggaatgaatagtttaaatctggattatgcatatggaagactcaagctaagagcatttaggaatcctgaattaagccaagagtaaacaggagtgaaatgggtaaggtttgattcaggtttatctaagttaattgactgaaaaaataccctgaagatcatgatgtcagagaagttgtgggtgcagaactccatttgtaagaaatttgctagtgaatgggagttgaggtagttaaagcaatgagcaaagatttcttttttcaggaggttaagggtgattggaaggagagaaatggtacgttaacttaaggagccataaggttaattatgtttaataggagaatgaaatgtgagcagagtgaatggagtgggaaggctgaggtttggaaatgtgtaggtccattctgagacaaagtgaaaagaaaatgaataaaatgatgattctaagaaaacgtattaagggaacaaaatgtgaggagtctgggggcttttttggtaagtccttcttagttgaggaggtggtgaaggcatagaagtttagaaagattctcactagctcttttcgcttggttcatgaaagaatcgtgactggaaaactatattctgttacattattaaatgttttgatagaattttctctgggggatggcctcactgtatctaaactccactcaactatagaataagatgattctaatggaaattccaggaatttctcaccacatatgatatatgagaagtaggatggagttgggttcaggctccatgctttttgcctctggataatatttataaacaaggagtcctactctgtctctgaaaagaacagtcaacatagttttatgagagctgcttttctggtataattactctaatgctgtatttatcctcaaggtcagtagtggccattaaaaaaagctgtccctttccctggagaacagcatcctcccccgacaaataatttctgttggaagaacattctgtaagtccatgttctcactacaaatattatccaatgtagtactgaaggacattttaaaaacaaagtcctttttgatctttctgagccaaaatgtcttcgacttaattccttttccacaaaataagaaacatcttttggattgaggattagtcttgcaattcctactctccttcttcacaaatgtctttatttagttttggttcccatgtctgaatgagtgatttgaatagatggcctctaagttcccttccatttctaacatgctggggctctttgagtctgggtgattacagctattgtgtcttatttccttggtatacactaagcttcttgaggataaatagggaacatgttttatttgtctttgggtcccccaaaacatgtaggctggagaacctgtataagtaaatctctgttactgaaaaaaatacataagttaattaaataaataggaatacccacaaatatcatagcattgcctggaaatattgtcttaatgagaactagaaaagaaaggctcttcaaggtggacaaaacacctaagtacatggcttgattctcaaagcaccaaggcacaggcactggctcatcagataaccaacctcttttggctgtgtgctattgtgcagaacacaacctccataactgtgctgggcatgcctgccactgacacacagcatcttagctccagtgaagcctgaggagcaggcttccttatagctccctcactgttctgcatgtaagtcaaggggacagctgtcctgggagccaatacaccactaacctaagtatctagaccacagccacaaaatgatatacactctcctccaatatactattagggatcaacaccatcctatattatgtctctgtttacctcaggcacctgcagaggtaaagcctcactattcatcaactattaatctcacactattttgttccaattcctttttctcttatatccatatcactggccctcctatatctgtgtctttatgaattagcttatgctccctatctttttcttcttctcttttcacttctaccacttcctagacttcaatgaaattgaactgtagctcacacaag

SEQ ID NO: 1737 - DNA, 2208 bp, Homo sapiens
cttgatatgtgtggcatgggctccttcaggtgctagtggattccttaggatggtggtgttggcatgaaaggcaggcttgtatcatgaggaatgattgtcatcttgtctgattcttggagatggcaggaagcccctggaaacacatggtgtggactctttcacaggctgttgaaaccctcctgaatgtgaggccagagacaggcagacagcagatgtattgcagggagctggatgacatggcccttggaacctgtgcacatgcctgcctttctgatgcacgtccatgttttctctgcacctccccggtggtgttggtataaaaagcaggcttacatcagcaagggatgattgtcgtctcatgcgatcctgggagatggcagaagtcccgggacacatggagtgtgggctctttcggaggctgttggatccctcctgaatgtgttgtggccatggaagtaaggccagtggctacgagggacagtcttcatcttgggagatccctagagagggcagggagccccttgacatgtggaatgtgatctctgttgggtgctggtggatcccacaggtggtctggcatggaagaaggccagaggctgcgatggatcatctttgtcttgggagattcctggagatggtggggagcccctgggcacgtgcagcatatgtggcgtgggcttcttcaggtgctggtggatccctcaggatgcttttcaaggtttttctatgagttctgttaaagagtctgaaaatggagcgtagaagacatgcttcgatttccaggatggttgtgttttccagagaggcggagttcattgtggaaccagcacagattttcatacgaaagttatttctttttaacctcaaaaagtgacagaatggagtgtatcatgaaaaagtctgacatcaaaacctcaaaatgtgatattgattgggtgagatagaattccatggaatttcattgccaaaccagtgaagtgctaattttgacatttgtaccagctaacgtagctgtgaagaaacacaccaatacacttctaaggacagcatagaccaagatctaggtttcatatggatgaatttattcttccctttgaggcaagacaagaaggaaagaaagtattgggaataatgctgccctcccatcctcaagggccagtgggaactctaatattgattggttttcacagaattccatggactttaactgctgaaccaatgatgcactgattttgtcacttgtaccagctaacgcatctgggaggcaacaaaacaatactctcctgaggttaatgtggaccaaaaactagatttcatataaaagagtttattccttctacttgaggtgtgacatgaaggaaagtaatggaaataattctgccctcccattctcaagggccagggggaattcaaatattgaacggaagtgattttggaattgcatggaattctcactgccatcccaaagaaatgctgatcttgtcactcttacctgtttcattccctgggggcagaacaaaaggacgcactccaaagatcggcatgaaccaagaactgggtttcatataaaatattttattctgtcctcttgagatgtgacatgagaaaagtattgagaatacttctatcacctcatcttcaagaatccgtaggaattctcccatggtggactttacggttaacctgaacaggtcttggaaaaaggactttaaacattctcctgttctgtggaataagtatacttttttctggacatacaccttgtcagtgagttccatgtgatactagagttgcatagatttttaacctttacgccaatgaagatctgaggcaaacattgccccttttttagaagtttgcatttgtcactgataactgtaataattgatcttgttgaaaagcctgggaaatgaagatctgatatgtcacttttaccggcttcctcaactgaaaaagaatacaatgaaacacgctgagaatttttgtgctttctcagtcttgctgatgatctttctatgggcctgaagcgtggagagtgccagagaggctgatcctcagcagtgtggcagaggaaagttgggtgcgactaaggggtatgcggtgcccacatgccactgggtcctcagcagtaccacctggtcaacaaagacaaggcacctagccccacatgaaactttattcctttcccttttgagatgtgacatgaaa

SEQ ID NO: 1738 - DNA, 579 bp, Homo sapiens
ctagagagctggcgcacctcctgggcctgacgcgggcttcctggattgcataaaggctccttctccttacatagccagggcaaaggtgcatgacaactctgagcaagtcaaaacaaccgtcagcagcgggaaacctcgatgaacaaacaccgggagagtgtttctgcagatcctgctttgtgacttcgagtgaagtgtggaagcgctggaagcacttagaccctgcctgtgccgcagacccctgggaggcaccaacaccccggatcgagaagcccgatgggaaagaatgtctgggaaggacgtcatgcccgaggcttgcgtgacagtttccactcacagtgcgctcactctgaacctctgtgcacacgatgggcctgcatctcttcccactatctgctaggaaacacgaggggaaggaaatgaccgcagaagggagtgcaccgtgggggcaggaggtgctgcggccaatgggcagtgctgggagatgaaaccaacagcggcgattgccccagaaagaacttggcgctgctaaggcaatggcggcccgaaagaggcccctgacgcatgaggagcggccgc

SEQ ID NO: 1739 - DNA, 645 bp, Homo sapiens
acagggcaccggggcaaaacggagccattctgtgacaaactcacctcccaaagccactcagggtggttggctgcaacagcagcgactcagagggaaaggccactgcaccagccctcagctcagggggaaggcggtgagatgacaccacagggcattaagccagggccccagatcaggtgtgacgtggaaaccaagcatgcttcagggaaggcctggcagcagagacccgacttctgggcaggcagagcagtcaaggctgcccagcagctgctggtggaccctgggaaaccagctggggctgcacagggccatcctctcccgctgagctgatggaacacgtatgtcacctcctcctgaggatgcggcccagatggaaatcactcctggctgcccaaacggaggcccggtgcctctggtcatgtccacatctcgtccagcgcttctgctgcctcaccaagtctggaaagagctgctcttatctcaggctacccacttccactccgcgcccctgcctgtcccatctcttggaatgagcgccagcttcctgggagtggagtgtacctctttcccaaacaggccctctgtctggaacgcgcctcttctcactccctgagtcatcaataaatctgtctcactttgtcctga

SEQ ID NO: 1740 - DNA, 1587 bp, Homo sapiens
cacaataatttaaacagctttcttatttcttaacttctctgggtattttgtgtgctactgtatcttgtgaatgaatctcaagaggaaggatgaagcttttccaaaatcacatgccttcatctcattttacagaaaaatttgtgcctaatattaaccaaaggaaatggggagcggcagggccagtgggttttcatggtgaactgagggttgcatcttggacaggttgcatgtggaagggacagcagggttcccaaggaagctttgcacggtcatgggtagagccatcccttcttcatccatagtgaatatggctggaaatagcgggtagtcttggatttgacctccctcccatggaagtgctgtctccagctcactcctggaaaaactgctttctccccaaagtgtgtctgagcagcagatttaagcatgaagttggttttgtggggctacagtatggactttgggaagatggtgccatctgtatttctgattctaccgtccctctgtctgtctttggaagtatcctttcacttgtttgggagactgagaatgattttctgcaaacagtgagccagaccatgctggtctcaagcggcagagcagttattaacagaatcacagtctttctggagctgctgtcagtcctgtgctgtcctcagggcctttgcttggtcaggggccccacttcttatccacccttccctctacctcaccgaggctgctaggcccaggtgtattgtgattatttgatgcacctgggaggccatgtctcccggggagtctcaggacctcattgggctggaattccacggggatctctcattgggtctctttgggcctttggagaggggagtgcagggcaccacctgggcgaacacctgtgccatcctgtaagtccttgtgtgactcttcatccaagtcaacaggggcatgtaggggaagagcctcagggcccatcaggagtcagaccctgaccaggaagtcagaactgaatcaacttttcaataaacacacaggctggccccaaacaaagcagcaggcttttgggaacatctgccttttcagtctcttctgaattctgtttatgtggacaccccatgtcccgcaccaccattgccgccagcaatgtttgttgcttgccaatatttgaatagatgctgataaatttgattctctggcttattgtggcattcatgatatgtctttcccttttcagtttccatgtactagagcgactgtcagtgtggttggcagtgacctgtgtttttcatgcatgtttttgtttcagaataactgggagatgaaacaggaagctctatgacacacttgatcgaatatgacagacactgaaaatcacgactcatccccctccagcacctctacctgttgcccgccgatcacagccggaatgcagctgaaagattccctggggcctggttccaactgcccactgtggactctgaggcctctgcatttgcgggtggtctgcctgtgatattttggtcatgggctggtctggtcggtttcccatttgtctggccagtctctgtgtgtcttaatcccttgtccttcattaaaagcaaaact

SEQ ID NO: 1741 - DNA, 3401 bp, Homo sapiens
gttgcaggctatcgtgtgttaacctgtacttctgccgcagagtttggagaaagcggcagcagattgtgctgccgcaggctggagcctggaacctggagccctggagccttgaatggtgtgtggtggcaatggagagaggcagctggcagtgacagctgctccgtgcttggctacaggaaggaaagaaggagaaagcacctaccataggctggaggctagagcctgcaggactgcggctggcctcgctggctcgcctccctggctggcctcgctgtggttggtggcagcgacggatactgcagctggccagagtgtagaaaggcaatggggagcgcagtcctggtgggcccagcggttcctgtggattggagccaggcagtgtgatgttaccagtcaccactccaggtcccagttcctggcccgcttgagccaaaaggagaggctggactttggagggtggatatgagtgccttcactgagactggcccctgccacccagtggccaggatgacaaggcagaggagaatgaccctgtggccaccaccatcacaggcctatggggcacctcaaactcaactccaaaattgatctaatgaactttcccaaaccacattcccttcttgcatttctgagagaatggattcccattcatctgactacagtgctaccctgaaagcagatccagagactaagattcacctgcaggtgattcatttgcaaggtaagctgtcatcagttggaggtaagcagaagacagtagagagtacagagccctggactgtgactcagaggatgagcaccagatccagtttgctgtgccacagtggtaagtcacctaacctttatgtgcttggattcctcatatgtaatacaggatcacaactattgttctcactcatgcaatactactattgtgagaacctcatgaattagagaaactctgaatttgcaatttagctttagaacactgacaagtagctcattgattcttgcctcattcctctggaataaagtagctttttatcaaacaagtgaacacattgctttcagtggaggcagaaggaattcattttgaaaaatgcacatagcattctccaacccatttttgcatattcttttttaagggaatgccttgtgtgagaggactagcagggtatcagaactgttttttgaaagaactttgtttgcaggtgctttcaaatatgttgtcttcaactatcattttcagtgtaaaaagcgggcttggagtaagcactgcctgcagaccacttttgtgagccctcctttcagtgatgtgatggcaatccaggcccctgctgggagagatttctgcctggttaaacctctcacagcttctaatcctctctttctcatctggctttccttagccttctccaaagtcactcacagaaggcatcccactcaacctcaccttggggtaaatcaaaatagtcctccttctgaagctaccgggtaaaacggtggtagctgtgcagctgctgctgatcaacaggctccagaaacagcagcaggaggtgagcagtccctgcgttggccaccaagtggtaggtggccagccctacctccaagttgcactgtttacttattcatctttcatggtaaagcctccagttgcctattatgaaatcagcaataatcatgtgtcccctgtctgggtccctgaaaagatggaaagaggcagatcaggctggtgctctgagaatgacagacatcaaacaagaatgaaaagtgtcaccctccttggacttattcagtaactcatgcccttgagcaaaggaggattttctatcaaaggacatggatttctgtgtctttctcttgagataacattgctgggtgaccacagaaagctggctctggaagcacagaagctgcctttccttgagtaataatgtctcttcaaagggagctggagcatgagtagtgtacatgcctcagatttcagtgaaaagttcagaggaggcctgagaagaaggtcctgggaatgaatcatctagatgactcaaccttgcaaagccatccacctcattgtggatatcattcaatacatttggtgctccatcatcctatttccatggctatttcctcacatttttcaaagtctgtttcttgagccctgactgtgtcaaatagcatgccctgttattcttgggcttccctctctgttctagtattcagggagatttcagaggctggggtaaatctcagaccaagaagacgcaatggttttgaggtagagatcctaggaatatagaattctgagctatgcagtggtcctttgctttcaggaaatcaagtttgatagtatcacctgaagcatacttacattatccacaaatgacagctccttacttgagcagttaaattgtggcaagtcttaacacacagattcctcttaaatgccacctaatccctgcctggcttcaagcctctggcttcccttggagaggggcagagtctctctgtgtgagagattcttcatttctgctttctgccctgtcagtttctacttacttgctcttccaccttgtccacaaggcttatctagcggctgtttacctctgagcagagaaaatggaagtcagcagagacaaggttgaaatttctcaggaaggattttttttttccactttatcgtgcagcaagagtaaagcctttttttcggtgattctttcctccacaatggccattggctgccctctgtcacacacaggtgtgactcccttgttattaactgtcaggtgggaatttctagggaagaaggagagtgctttgttaacctcttaacatctccccaaattgcatcatattctctccctttcccctcccagttaccttttctatttttgatttcccctttttcagtctgatttggggatttcagttcccactaactttgtataatatcctcctatctctgaaagaacaagttccatctccattttccaggagagtttttttccttgcagtaagagcaccccatcatctctccatttctacctccccatcccagtgctccctttatggcagtacaattgaagagggacccacagtcttgctgaaggaacatgaccttcctactgaagttgggattacggaatagagggagaagaggaaagatggatgtttatctgaatggtcggatcttgttttccagaggacacaggccaatgggaaacttttgggaaggaagtcaaaaaatcaaagccagaactgggttttggtaatttaatctcccaaagagagaaaagtccccatactctaattcatattttgtttgacttgactgaagcccttttgaatattttttctgcttctgttctgttcttgcaataacaatgacataagtttgcctttggagacattaaaatagttttctc

SEQ ID NO: 1742 - DNA, 3043 bp, Homo sapiens
ctgtgggccagaggagagcactgggtaccagaatcacagatcaggagctgtggaaggcgctgcccgacaggatgggggaccctgggagagggatgcagccacatccaaactgtggcccagaagagggagtgggaaaagtcctcgacctctctgtcttcctgctgtcttccaatatcctacctggaaagcaacgggtctgaaaggtaattctgttcttgatgagggtgcaggcagcagagggaattgtcatcctgctgaagacacacagctcttccatgctctaccctatgtgtaatttgttcttatctgctcctggagccaccacctgctacagtgtaaagagaccccacagactctctggatcaaactactcactgtccagaaggagaaaatgaggtcctatgtctgtggctagaacccaggcctctggggagcaacccagggctccatccagggtgacctgagcctgctctgctcatcagagccagtctttaccacccttcatatcccgggagcccacaggtagaaagatgggcattgcaggtcaccgtggttcccccactgaagcaagttccctggctcgcgattagccagtgctctgctggttcatgatgcgctccaaatgctagaccaagaaagaaactgggtcggtgggcaggacacaggaccagcgctctgggaggagagctgttctcaagcagtttggtggcatcagagcctctgtgtggtcagtcaagcagggcagccaatttcctctcctttcagccctaactctggactcctgtacctggaggggctccctttgtgctcctgcagcccagaagccctccgaggcttgacatgaaagagtcgcgggatcttggactgttccggtggaagggctcctagcaaaacccagatgttttctcttcttgtatggatgggaggaccgaagtccagagaagtggaataacttgcccagggttgtgctgagatttgtgaaggtgccggatgctggtgtgctggtggctggcatgctctgagcccttccttcccgctgtttccctggagttctgcttggcaaccacccgcctgcatttttgcaaagtgatgtcatctgcagataatggtttttccgttcctggtggagcaggagttccagatacagtgcttcgggggaggggctcaagagagctgattgtgcactcctcaggcaagtgggggctgcatagaccccctcccctctgacagtcacatctcagttgtaaggcaaggcaccgtctcaggcttcctggactccggaacctggaatgaccaaaatggcagaggccccagagacaagcctcccctgcctcctccttgtagagttgggaatctgaggcccagagagggcagagccttgcccaagctcacacagcatttacaggcaaaaccttgactcacatcccgactcctaacatctgtggccacttgcccgtggttgggggtttttcaccctcaacaccgttgacattttgggccaaggagttttgttgtgggggcagtccctttcatggcaggatgtttggcagcatccctggcctcgacctcctacaggccagtagcacccctctccagttctcaaatccagacactgccaaatgtctttcacctaagttggggtgggagaaagtaaccctccagctcctaagacctttatccactgccataggcaggagaggtttcttgagtccaagcccaaagggtgctttgtctgaggctctgacttaacgtcaggcaccttcaggatgggaggcaggcctggagggggctatgaggggctggagatggtccaggccctccttctggttaggaacactgcttcctctgatcacttttcttggagcaaaactgccgatttattttcctggggaaataaaaataaatgctggctgttgtaatctcatccctgatcccatctggaaaaagcaggctcatgaatcttggccgcctgagctctgaggactgtgtctggcggaacctggagttacaatgggccttcgaacatcggaacagtcacggctgacatttcctttcccgttacatggctccttggaatgtgagccccagggggccgtccgtgggcaggcggaatttggtggaaagaagtgctgcacgggccggaggccagctcagcttctgacttgctgtgtgactttgggccacttttctgttcgtttctgggccttgatttctccatctgcagaatgaggggagccacgttcctcaacaaggggtccatggaccaccttgtatcagaaccatttagggaatgtgtttatggctattcctgatatttctgattcctcttccagacctcctaaagtttttatgcatctctaagtgatttcgatatatataagttttgggacccacaacaccaaggactttgaactttccacccagtttcaagtttgaacacatcacagttcttcagcctccttccccctcataacgaagtgtagagttatgaagctagagggtaaaattatggggtgggctggaactgggcattgctcctaacaattatctgctttcaaactcttggcagggtctctggggtccttgatccaactgaaatcactgttaaagcactttattcctccagtaatgaaactcgagctgctagttacagagtttggtttcaaaattgtgccatttattatttttgttggattggcttataaaccctcatatagtcatacatcatttataatgcattattccatgagaatgcattttccagatgagatttattttttctgttaaaaacttaaaactgttctttttttttttttaaatggcagtctttcgccatgtgttacctatttataccaccttaagtgaaggtcaggaaatgcaattttacttattctcaatgctccagggttgtcattgtgagttttaactactgtatgcattgatgtaaattttagggactccaaaactcactgtgcctgaactatgaatgtcccccaagctgcttagcccttgtgtctgcttttaaaagttctgctttgcttct

SEQ ID NO: 1743 - DNA, 1252 bp, Homo sapiens
aggggccttttagaaaatctcacaccacttcctagttggagcaattaaacaatagagaagatgggtattctggagcagaatttaatgaaacagaactccaccatctatggcaagtttgactgcttgagtctccagaggataatagttggaggccactgaggcccaaattcatcagtccggccattgaaggacacaagtgaacaaaggaggacggcaaagacagaactgtgatattcaaacactcaatagctcacagtgtcggggttcattatgacacttactaagcacatgccatatttctgacactgtgctaagagtttcatgaacattaactaaattaaccccataaaaacgccattagaaagatgcagttttgtacccccttacacagatgaagaaaataaagtatagagactttaagaaatttgccagaagtcttataactgattggtttgccatggctctttgaaacagttactcttgtcctcattgtagagatggcgatactaaggcagaatatggctagcctggacttctttttgtggagactggattccaagattgaaagtagaagctacatgttttctccaagcagggctttcagacttcacttctgcaacattttattgatgaaagcaagtcacaagaccagactgattcaaggggtggagaaatagaccctacttcttgatggagggaggagtagagttacattgcaaagggatctggacaaaaaaaggagtgatttattaggaatcatgtttaacaatttaccacaatccccagcgcaactgcctgttagctggatccagaaatgtctacgactactgcaatgccacttggccttaggggtgatgtgacccagtgtaaagagatggtggtcttaaccaatcacagttaagatagtttagttttggaaggtataaaaaatatgtaacaacatgaatgcacttttagggtcagacaagagacttggaaagagcctgcaaaatggaggagccctgaggcctaagtctcatgagtgtcaatgcttacctgtatctagacactggcatcccccttttgataaggccaagattgattgttttccttttctacctaccctatatctaatccatgtacaaacactgttgacacacaaaagaaccctaaattcaacaatctgtgaagaatttttgcactaacatgttagttcaaaaactcaacattgcttgctaagactattgcaataaactcctctatgatcccctaa

SEQ ID NO: 1744 - DNA, 776 bp, Homo sapiens
agcaaactcccagctgccccttcttactgggccatgacttaactctggaatgtgttttgactcactgactgtaatagtgactaaaaggaacatgtgggagtcatcaaaaatctgcaggtggatctgactgtaagaaagagaaacacttaattgggtacttactaaatgtttgtcaaatggatttgaatattttgtgaattttatattcacataaaggattcagaagaaagcgcaactgagaaatgtccaaatatggtgaagacacttcttctagagtgaaagacataaagaaaataggctaactcctctggggagaggaggaaaaacataatttatatctctatgtataatgaactaaaactttattgccaaaactttaaaaatgtttgtttagatggaactcagcatctaaacttttctaaaaacccatgatacgtgagagaaacaaaatcagtcctaaaattacggtctgtaagcaaggagactttttttctagaatactatgaaacaatttttttaatggatcatctgttctcatgatatttctattactccttccagaatgggtttacatattaaataacaaagcagaagctaccatttccagggaagagaatgcatcaaattatttatgattttatcaatcctgattaactgcacagccacaaaatcaacaccatccttgtcactcctacaggcgcttgatgcctgagttctacatttcctgttttattcctgtgcactcagcacatccatccactttagtgaattgattt

SEQ ID NO: 1745 - DNA, 378 bp, Homo sapiens
gaaacaatgagctggatccttgacttgaatgtgctggcggagcggggtttagcgtttattgagaacctactatgcctaggataattcctgaccaatacaagagagacagtttccatggagatgtgatcggtaaggtggtggagactcagagtgatggatgggctccctttgattggtggtccaggaagcctctaggaggaggaggtggcaacatttaaactgagaccttaatgatattgatgagttcctgttttatcagatctaagatatctttgaaatatttcaatttttaatgaaatatacagttttaaaatgttccactttaaaatgtaccacaaagaaagaaaaactactgtcaataaaattggcaccatctac

SEQ ID NO: 1746 - DNA, 3145 bp, Homo sapiens
aggcaaagccgggagaaactgctgagacgaggtggcagcggggaccacgtgagatggcgtatgtggccttgagcgataaacctcacctgtcgggggaggtgggcgaggaagcctgcagctcctggaacccaccacttttctctcccaggcccttgcccaggctgtggcctctgcctggaaccccttttcttcccatccgagcccttcccttcagtgcctcttcctctgggaagtcctctctggtgcccagcccgtcctcttctgcccactctgggtttcgcaccccatgcttaggccctgattgcctgctttgcacacagggctgtgagctccatgagggcaggaaccacatggctgttcacagctgtgttgccagggcctggcctggagaccctcaggaagtgagacatctgaatcctctgctctgtgaccctggcagccaggtagagccatcttggccatggcacccaggcttggagcaagcagcagcctcatgggtggggaaccacgtttccccagcacatcggcaggccctaaggggacattcgcttggctctgccctcagagcactgatgcccgggggacactgccctttgtgtgtcccatgtaagagaggatgcaaccttagagggggcaggggtaaacatggtcccaggccctgttgtcccctcctaagaaagttcccagttctgcctgtccatccctggccttttccctgtgctgtctgggacagtgggtggagctgccgctgagcggtgggacctagaaaacacatactgacctataggaggcactgcccagagctcctaactggggtggggtgcaaaggaaaggtgggtgagggaagcagagagaaatcatattagtagctcacacgtcaacagtctagctgtgtgcctgcctctctcatgcacttcatggggattatttcctagaattcccacaagagccccttgcaggtggtgcgattgttagctataatttgaagatgaggaaactgaggcacagagtagttaagcaatgcacccaggagcccacagctagggaggacagaggctggatccagcccagtcccctgtctcctggggccaggcccagcgctcccacctctctgataaggataaaaaggagggagcgggaagggagatattccagaggcaactaccatgagacctcccggcagagaggcttgaaaacatcttttgtgtgtggtacgcaaaccatttcccctttggtgtctctttgaaagattttgggaagatttaaactttttttcaatgatttggggatgtcagactggtgtttttttgagggtgacaccgtgatgagactggcccccaaggcagccccgttttactcaggttatggtaatagaacttctgcagcctcaaaagcagcttccgccgactgagcgctcaccccggggtccgtgctggactcagccttgactcggatgcccaccctgagccccacccgagaaagggattatttcatccctgcattatttccttagagctgatggcagaatctgctcatctccaaattcgctgtctccccgttaggagtgagcttggtgagggctccaatctggtctcccccgttcattgctgagtccctggcacccagcatcagccccgcatggagcagctagtcaataaagctttgctggacacatttcagatgaagagactgagggtcagagaggtcacatggcttgcttggaagaaacatcagatttgtctggctcaagagtccacttctggctcccccctcacacagttgcttaagagacccccagcccaagacagcctcagagcctgggtcttccccccctccgcccattctcaggcccttatactaaaaccagagaggcctctgaactgctgtctgcccccccaaccttttccttgcttatctgggaatcacgcaaaagttggccagagttagctcagtctcagagaagctgcattcttctagagtcactcggttttgcgtgacctgattcaaattttccatctttgtcactttgattcccactctgagaagttttctcagtacatataaccttactatgtgatgactggcctgggtattcatatgtgcacttgttacctgttgcttatctcctgggggacccctggttcagaggggtttaagcaggtgtcctggtgagaccggggttataatcagagactctcagggttagagcttggccctgccactgagtggccttgggagtctcatttgacctctctgaaccttggattcctcacttgtgaaatggggacaggttgagttcctgcatggaaagtgtcttgcttgatgtctcgccaaaagaccaaaactgccgtcactcactgccggagaggccctgcacgtggatattagagtttgctgggttttgtttgtcctgagcgaatgtccgtccatgtacaggctgatggattttgtaggtgcaaggtccctaacgcaatcaatctctctcctcaaaagaccatgagcatgcctggactcagagagcaccgtgtgtggggggctggcgtgggcacgtgtccgcagctgggactggcttctagggttctgggctcaggcaggagggcggggtcccaggaggtcatctctctctccttaccctggagcctttggaatttggtttccaaatgtcctgaattcctgttcattaatatgtggctcagtacagtgcttgtcccggcagcaggagcttggttggtgttagtctgctggggaatgggataaagcagagaaatgtcaagctttcccttaaaaacaaaaaacaaaagcaaaccctcacatctcccaccaataacacaccattgttatccctgtacttaagacatgttgttgccgggcatggtagctcacacttgtaatcccgacactttgggaggctgaggcgggtgggtcacctgaggttgggagtttgagaccagcctgaccaacatggagaaacctcgtctctactaaaaatacaaaattagccgggcatggtggtgcatgcctgtaatcccagctgctggggaggctgaggcaggagaatggctggaacccgggaggtggaggttgtggtgagctgagatcgcaccattgccctccagcctgggcaacaagagcaaaactctgtaag

SEQ ID NO: 1747 - DNA, 536 bp, Homo sapiens
aagaaaggcgatgctaagaaacgtgctgcaggggaggctggcacattctgctccttagctaaccgcacaggcccatgggtccacacacatcagaccatggctctctgtggtctatctttgccattactttaaccaggctgtttctcatgcgctcatggagggtgactgaagatgccaccccgaggtgcaccctcagcctcgctggacacttacggctcgcattctccagccggaccaggcagttgaggaagtcatcgaagtccagctggagctcctcatccgcatacctgagcacaatcagctgcaggaggtggctgctcagctgaaagcctgtggggacaaaggaggagacccaggactcgctgtatccgagccccgagggtatgcggaagcgagcaccccagtctgagatggctcctgccggtgtgagcctgagggccaccatcctctgcctcctggcctgggctggcctggctgcaggtgaccgggtgtacatacaccccttccacctcgtcatccacaatgagagtacctgt

SEQ ID NO: 1748 - DNA, 2538 bp, Homo sapiens
catattacacccttacttaaagtgtagttttcaaagtcgccacagcagcacttgggagctttttagacattcagagtcaagggttctaccccagacataccaaatcagaatctgcctttgaaccaggcccctgggtgatttctaaacacattatcatgtgaagaacactggtctataccacagggatcaacctaaataaatttgggcacaagtgcagaagttaattcctctatttatttcttttttgctcctttttagtaagtacagcccttattaatttgtgcttttcaatgaaaaattattatgttatatgctttggataaatactactgcactgtaagtgcacacatctgcatcattattgccaaaaaagaatgctctgctgaggaatgtactggggtcttgaacatgaacattttcttcatggcagcagagggagcacaagagtgcttaataaaaccagtgcacaggtctctccaaatcatgacagattttacattgtagtatatgttttcattggaagtagcctgttatgtagttcaaaatgaagcaaatcaactgagcaaacacagataggcttaccaggtcataacaactatgtaactgaacagattgaaagttgaataaaataaagataaacttctttagagttttaggcttgaattcttaaaagaaagtggacctcaaaagtgaaaaagatgccttagctttgctcaaaaacaaagataacacaacacagaatcaggcaaccctaagatgccttagctttactcaaaaacaaagataacacagaatcaggcaaccctaatagtagctcctgtttatctaaaaacagagtcagttcactggaccctacatcaggtaacttaatttcatttggtgtcatacatgttggttaaggtccatgcgccttttgctgtgtttacactcagaataattttaggggtttctccttaatgcttgcagtggtgaggatttaggtttcagttatacctacgtagtatttcatacttttcactactcttccatattgcatcctcaaaaactcccttgaagcagataacatacttggtaaaagccaagtatccaaaaagttatggaaccacatcgtgctttcataacattgagtcatttaattgtttcagtagtgctttgaggtattcataaatgagggaaattatacagactaaagatccagagcattttttacagttttaaaggtttttcaaagttattcttagataatatgtttatatatttattatttatttacaagcagtcacttactctgcatctacaataactaagacttgagaatataaaattgagtaagacatcttagtgtgcaaggagatcagagcagaacagatcttacctttggaaaactgttaatttttaccacgttgaaacacaaagattcatagttgatgcgatccagcacctgccagaatcatagcaatcagacttccaaatatgagaatcaaacattagaatcattaaaaatttgagaggcgggggggacagttgtacaactcttgagcaaaagttgacttataagctaatattaatatttcaaatttgtacgacaaacaaatgtgaagatataatgtgtattttatttgaatgtcttccctatcacaaaatcacatgagtaagttgagttggtaaacatttatttatttttatcttttctaaaatgctgaaaagaatttttctcccacactaaagagggtttgccaagtttctgcctggagcaatttgttatggctgtgtaataaatcccagaaagtttgaatttttaatggaaacactgacagaataaagagggtgtaatcctacatatgtcatttaaaaatctgagcaaaccatagtgtgcttgcaaaacaaatatactttccttagattgcactcacaaataaggctggggagaccacaaaagtaaaacaaactcaaaagtgaaaaacactcacacaatagactctgaggtcagctcaccacacccagactaaagtcactgggctctgtgcgtgtcaccaagactcttaaaagacatacttctgaatcatctttcttgaccctccaccaaactgtagcaagacaggcttcctgggaatgaaaatgacattagcattagtcaagagtgaaattaaagtcattgtactcaaacatctgccaacagtctgtgatttcatagtacccacctctgaaataagactctgtctacaattaaaaacaaagaaaaaaaggtactttaggtcttcactatccactatgtctactgagcacttgaaatgtgtgattagtccaaattaacatgtgctgtaagtgtgaaatattcctcagattttaaaaacttggtataaaaaatacatattttacatataatatatattattcattattcctatattattaattttatgtattatatatacacacatgtaatatctccatttttacattgattaaatgttgaaaatattgggttattttttaatagtgtacattgggttaaataaaatatattattaaacttca

SEQ ID NO: 1749 - DNA, 2189 bp, Homo sapiens
gcaagatggcccttaccagatgctggcaccttgatatttgacttcccagcctccagaactgtgagaaacaaatttattttctttataaattactcagattgtggtgttctgttacagcaacacaaaatggactatgtgaagaaaaccatgttggaatcttgtgctgtcattgataagaaaggatctgagcattaggtcaatcaccaaaaaactgaaaaatcagtaacaatgatgacagactcttcaaataggatgatttaaattttaggaaattggaagaagactccaagaaacttaacaaggtcctccaatattttccccaaaatgatcttctctgatttgactatgcttgttcctccatatctccctgatccctagacttcttctgtcctctatccacattctctcccaaggtgggtcatctagtttcatgactttaaatcctcccttaaactgttggttctcaaatatgcacttgtcacttctctcctaaactccagactcatgtattcagctacctacttgacacttctgtgtggatgtctagtaggtaataatcttagaattattgtgccctgtcaaattcctgctcttccctctaaaatatcttaatactattcagtcttccccatttctgtttatctcagttccttttcaggtcaaaaacctgagttatctttgattcctctctttctctcacattctagtagtccagttcctttcataatcagatcaattagtaagccctatcagctccatttttaaaatgtaactaggatcccaacacttctcaccatttccactactactctgtctcccacctgattctttcaggagccactcgattcgtttcctgcttctaccctcactactctacagtctattgtcagctcagcagccacggtaagcctactttcacttccctgctcaaaactctattggactcttcatctcagagtaaaggtctttccagtggtatacaatatccaatcatatctctccagattgcctaccttcctcccctcactccctccattccggctgcactggctccttgctcttctttgaacgcattaggcacatcctgctccaggacatttgcacttgatgttccctctaactagaatgctctttctctggatattcatatgtttctctcctcatcaccttcaaatcttttccctcatgtcatcttctcagagagacatattctgaccaccctctttaaactgtagtctttaccaatattctgtactacttattcaccatctctgcttttgtattttcttcttagtatttgctactttccagcatgatctgcttttccctaatattttatgatttatcacccattagaatataaggtccatgaaaacacgaaaaatattttctttttttttttttgactgatcccactgcctagaacagtgcttggtgcatagtaattagtcaataaatatttgttggatgaatgagtagatgtcttgaaagtcaaataggaaggaatatggtgatgtcatacaattttattaaaaaatatatgcatccctagtattctaagaattagcacatagtaaagttatagcctaattttataaactctaaaatcacttttatggtttttagctgctgtttttcaagataaaactccaaacaagtacagttttcagtatttcttatgatatattcatcattatttcaaatgcattggctttatggggcctgcacaatcatctttagataaaaatgacctcttatatttctgggtgactagacacaagccttaattaatttttaaaaagggattctatgcagaagggacagtgtttctgcctgtcttctttcacactttgcacacccaggccatctggagtgaaaatgaagtctgcccagagctgctggaagccccagctgccctgctgcccatggagtcctctgaggacgactccagagtccctcaactccttggaggagataagcagccaacacagtgttgttcagcagatgccaccgtctgccatgccctggaatttgaaccaccatcttctggagtgactcaaatgcagaggaagccaggcctgctgctaacgtttctgagaggcggcaagagtataaatggagatccacatatgtataaataaagagtgtgaatcaagctaacaaactgtttaataaaatatgatctaccc

SEQ ID NO: 1750 - DNA, 216 bp, Homo sapiens
aagactatactttcagggatcatttctatagtgtgttactagagaagtttctctgaacgtgtagagcaccgaaaaccacgaggaagagaggtagcgttttctcctgaacgtgaagccggctttctggcgttgcttggctgcaactgccgtcagccattgatgatcgttcttctctccgtattggggagtgagagggagagaacgcggtctgagtgg

SEQ ID NO: 1751 - DNA, 394 bp, Homo sapiens
catattcatatgctcttgttccttctcaaataattccatcactaatacacattccttgctgctgcttcctgctttcgcttttgaagtgcccttccatccactcctcagctctattccctgcatatctctaggaggctgtgaggggaaggaattattctctttgttttccacctaaagaaacagaagctctggcaatagtcggctgcttgctcaaggtgacacagttaatggagaggcagatctctggatgcggcgtctcaggggccacgcctgcctcccccgccgccgcgcgcatacacagaattcctcatgctgctgctatcacggaactcaggggtttggctgactttgtctactaggagcagagaacaaagtgtgacttgaaccatgcaca

SEQ ID NO: 1752 - DNA, 431 bp, Homo sapiens
tcggccacaggacacagagcactaagaagacagagaaccactaagaaagacaacaagggctgttaaggaaatcatgacattgcatagtttgtgaagcccatcctgaccacaaaggtgttgaactgtgaagaagatctgcatctcagaactgatgaatgacttgattgcatgaattcatgattgattaatgcattggtgtgttaccttcattctaatctgataatttattctttttatttttgatctttattttaaaaactctatagcgataggataagttaaaaaagttttactgtgaaacgctttttgtatcatgggaatattgagtcttcacatttgtcagtctgaatcaagaacttgatgctaatttttgtcgtaaaagttcataggcattccttagctcttgattaaaaatatctaaacaaatgaaa

SEQ ID NO: 1753 - DNA, 626 bp, Homo sapiens
gtttccaggtcctgaccaggaggcaggagtccataccgaggcccaaacaggctagccctgagcagggcccccaagcctgaggcccaggagtggacagacctttgtgacacccattctctcttccttttccatctgtccggaactctggacactgcctggaggaatcaggcctgccgtaggcccaggaaggcggaaacaaagacgacgctcagagacaggaagcaacttgcctaaagatacacagcacaaatgagaaaattggtgcccaatgtttctgaagaccagcaactgctaagacagagacttcgagggaacccgaccttgcctgaaggaccaacagcgccccctgcaggacacttccctccattgagagaagccacaggcgccggcctgaggcattctgagtgcgtggaatcctctattaccacctcctggcaaagaacggagctgcaacccagctatatgagacaccgagaatgatctcaacaaaaaggaacagtgaccagaatgcctgggggaggaacaggggatactgggtggaaggaggggagagggagaagttgtaatattttgtaaaaatgaacatttttactcctaatcaatatacaaacatcatgctcagcaaa

SEQ ID NO: 1754 - DNA, 798 bp, Homo sapiens
aacaccttaggctggtggggctgcggcaagaagcgggtctgtttctttacttcctccacggagtcggcacactatggctgccctctgggctcccagaacccacaacatgaaagcttggaaatgaatatgctgcactttacaaccactgcactacctgactcaggaatcggctctggaaggtgaagctagaggaaccagacctcatcagcccaacatcaaagacaccatcggaacagcagcgcccgcagcacccaccccgcaccggcgactccatcttcatggccaccccctgcggcggacggttgaccaccagccaccacatcatcccagagctgagctcctccagcgggatgacgccgtccccaccacctccctcttcttctttttcatccttctgtctctttgtttctgagctttcctgtctttccttttttctgagagattcaaagcctccacgactctgtttcccccgtcccttctgaatttaatttgcactaagtcatttgcactggttggagttgtggagacggccttgagtctcagtacgagtgtgcgtgagtgtgagccaccttggcaagtgcctgtgcagggcccggccgccctccatctgggccgggtgactgggcgccggctgtgtgcccgaggcctcaccctgccctcgcctagtctggaagctccgaccgacatcacggagcagccttcaagcattccattacgccccatctcgctctgtgcccctccccaccagggcttcagcaggagccctggactcatcatcaataaacactgttacagcaa

SEQ ID NO: 1755 - DNA, 2033 bp, Homo sapiens
acctgacactaaagcgccatgccggaagcactgagtctgatacgtcggaaccagtctccaccgtgtggtttggtcttgatttccactggtactctggggtcttggataagtctctggacctcgcctttgtcatttgcgaagtcgataggttccaatagagattttcccagaatcattcaactaaaaatagagaactttttttttttgagaggaaggacgggggcgcagttaaagatgttaatgttaagtcatcccttctgtgatttcgggacattatctttgcacgccatgtgaagatgtgcttgcttccttgtcaccttccgccatgattgtaagtttcctgaggcctcccaggaagcagaagcctgtacagcccacagaaccatgacctgatgaaatctcttttctttataaattacccagtctcagatcttgctatgcttgtcattgtgtaagcagcaaacttgcagtgaccagttggattccacccccctgatgttggtggtgtgctcttggggagatgtcttccagacaggcaaagaagagtgacatcatcagagcatggacgacctcaaagatattccagctatgctccagagagagccatcctgatggaacctactgaccagggggacacaaaagaaaagagggaggagatgaaagaaggtgagggtctctattgccagcagaactggactgtgtgtttaactggaaagctgatggagaatgtagttaggcacagctctctggacccttctagtgaaataaagaactagttaaataaggcaagacagaagaatgaggctgccatctagatgtagtaacaggtaatgttccagggcacaagggagccaaaggaagagagtttcttcactttttattctctgcagtcttcatacataataatgatctcattcctctatattagtcaagatcttcccattataagtgacgaattataaccagattaaaccaaaaagtaaaataatttattgactgattgatatggtttggatttgtgtccccgcccaaatctcatgtagaattgtaatccccagtgccagttggaggtgggtcctggtgggaggtgatgggatcatgtgggtggtttctcatggtgtaacgcaatccaccttggtgctgtcgtcacgatggtgagtcctcatgagatctggttgtttcaaggtgtgtggcacctcacctctctctctctcttctcctgctcccaccacgtgaggcacctctctccccctttgccttttgccatgattggaaacttcctgaggcctccccagaagcagaagcccctatgcttcctgcacagcctgcagaaccaggaaacaaaaggagggtgttagaggaaaaagagggaaacccactgacagagaggaaggctgaagagatcccaccgctgacttggactaaggagagagaagtcaaagagtggttacctggatgaggtggctgaatatgggcctgctcttgtcactttggatgtcacaactagccttgagaagagctgctgttccaggagtctgtcacaactagccttgagaagagctgctgttccaggagtctgtagccaaggacgtacagcagtggaggctgactcatcgcatagctgagtgaccaattgcttggcatgagtttactttaatggctgtttctgagtttgatccctctccggaaccaacccctctgatgtgtcctgttccagcaggaagagacagacctggaggttctgtacttgtgatttctggttgtggatcctgagaacaagaagtactgggatcctaaagttctgacatttgcaaagcagattaatgacctaccacattccagatcatttggtgattttgtgtgtgcgtgtgggtgtgtgtgtgtgtgtgccaaattcaaggtggtcccagcctttctagtcttctctaacctttcttctcagaagtcgcacctgttctgtctttctaggatataattttttttctattagcctgggtaacaccccaaccaataaagtttgcaatatccaagcc

SEQ ID NO: 1756 - DNA, 2379 bp, Homo sapiens
aggagggaccttgataaactagagttcatccaccagaggaggaggctgcaggccttgggcactgctcagcaggatgaggggccactgcagttgagcatgtctagcctggagtcttctgaagaacatgattattgactttatgtataggaatggctgccaatgaagaagagaatattgaaagtcagaagcatgctatcacataactctgcatttcatcgggccgagaaagcacaggttttcaggaccacagttcccatttctcctgttctgcagtcctcgtctgattggccaacactatgggcactccctgctctggtggccactggcagtgggccagggtgagggcagctcacagcccgtctcctctctgttaccttgggacgtcactcagcagttgcatcaccggctgctctctccctctgaaacatgaagcccttcctttcttattccaccttagggaagcctgggcctgcgacagaccagaagacctcacattccacagagaagacctcggtttccccccaagctctgtccagtatggagtgacaaatcgctgtacttatgagacaaaggcatgaagtccaggtcaaggcatgacttttcggcagcaacttttctagatgtgaggtatcagtaaacatttatggtgcttctgttatggatacaatacaaggatgtaaaagaaaataagtatgaggctcatcctcctgggaactcacattttcactggggctacaagacccccggagcaaatgccaggcacaagatcggggataaaagcctaactttgagaagcttgctttggctaaaaccgaaatcaattatgaagcaaaggaagtggattagagggagatcttatgaaatcccatcagatttggatcatgctactgagtttttttcttcctggctgtattttaggttttctctcccactgaaactgattaatcgttgtcaaaattcctcccttgtacccttctctctatgggagggctgtcccttggctggcctgggatgcaggaatagcttttgtgcaccctttggtgtccacttctgtgtgtctctcttggtggcactgcttccctatctctgcttgctctgaccaccttcaggctcctaggaccctaccctctcaaatttcctcctcccctgcgtccccctttcccattcaaagcccacagcacatctcagttagtgctatggaaaaaactagcctcagaaacgaatattcactgacatgtcaaggtctagtagtttgtagagccattttattggaagggacttcagaaaggaattagtttacctactcatcaggtgaggagacccacagaggggaagtcacctgcctgactcccagagacagaaacagtgctgggactaaaacccaagaagggtcctgactcccaagtcccaggaacttaattttcccccagggaatggcccaccacccacccagatgtaaaaactagagactctgggcagcattctatctctatgccagcctccagtctcctgtctattttgcctccaagatacatctctaatttgcccacttttcttgaacttcacatcaccgatctggtacaagccatcatcatctccttgcttgggcctaccaagacactaatcactgttctttttgttttgttttgtttgtttttgagacagagtctcattcttatcacccaggctggagtacagtggcatgatctcagctcactgcaacctctgcctcccatgttcaagcgattctcctgcctcagcctcccaagaagctgggattattggcatgcgccaccacaccaggctaacttcatatttttagtagagatggggtttcaccctgttggccaggctggtcttgaactcctgacctcaggtgatccacctgcctcggcctcccgaagtgctggcattacaggcatgaaccaccatggcaggctgactttcattctttctctagtattattagaatattcccaaataatattccattgtgtatatattccacattttgctcattggtttctcatggtccgatctgagctttgggtagatctggctataggcagataatccctgagacatactgctaaatgggaacagcagatgcagaacagtgtgtatgatacgctaccacttctgctggaaaacgtcaaacaggcacgtgtgcatacatatgtacgtggacttggaaaggcatagaccgtctttgagaatactcaagaagtggttatcttgggtaggagagctggtggcgggggacagaaatggaaaggagacttatttttcactggatatgcttttgtacattttatggcttattaataatgattttataattatattaccatgatcaaataaaacccttggtgaatcttc

SEQ ID NO: 1757 - DNA, 313 bp, Homo sapiens
agtgagttcgggaagccagtgcccgaatgctcaaccttgctgtatcagggagggccggagaggggagctcaagaagaggacgtcctatcgaggtggcagggattttctgaaggagggcgtattttgctgggtgtcatggcacgtgcgtgtagttccggctacttgggaggctgaggtgggagaatcacttgagcccaggaggagaagactgcagtaaactatgattgcattattgcattccagcctggacaacagcaagatcttgtctcaaaaaataaataaaaatttagaaataaagttttattggcacaca

SEQ ID NO: 1758 - DNA, 732 bp, Homo sapiens
gaattgttagcaagagaatgagtggaggcgagaagaaatcgcttgtaaaggctatgtgattccctgatgacagatctgaggaagaatgaagaggctttgaagataaaggtatcttcacctcgccaagatcaaccacatcctgcagaaccttcattcattcagcaaacagccaggctttgtgctaggccctggggaaatggcaattaaggagactcagtccctatcctcacagaacaccccatctgacacggaaatagctcctggcccgcaatgtggtaagatgcagtaatacgtgcaaggcccctgacttagtggcaatgatgtttaagccgagatctgaaggataactaacaacggcgtgccagagaaaagagtagcgggtggagagaggaggccaggggaatatttctgggcttggtaagtaagccaggtccctgccagacatggactgagaagagcaaagccaggagtgacagctgacgattattttttaactgaggaaggaagatccttgagaacggaacctcttgggaccttctacccagaacaccagagcacctcactgggatcagagccaggccatcgggtggattaagcaactaaaattgattgtcctgaaccatgagtctgtctgtttatggggagagaaactttgagatgaattaatccacaggtccaatgggactttgacattttaatttgtagaaataaaacttgcctttgattttgcca

SEQ ID NO: 1759 - DNA, 392 bp, Homo sapiens
tcacagcatgcactgttactaaaaagacgatgcgtcctcctggacctgagatctgtgtgatcgtgggaaagcgacgaaaaacgaacaaaggaacagtaaatggagtaacttggctagaatatggcagtaactacaaggcatgttctgctctggcacgaaggtaaccaccactcatacctctccagccctgtgaatacgtcaattgactaagcagattccttgaggataaagtaggctcctggggaccttgcttgttgggctacttgctttgtggatgttaaacagataattctcatgagtttgagtgacgtctgatctaccagtattccccctactctgattagaaatgacttgaccatgccaaaaagaataaaagacagctctgatacaaa

SEQ ID NO: 1760 - DNA, 691 bp, Homo sapiens
gatgccaagcagtatgtttatacttctctaaaatgtatttttctctatataaatagtgtttttgttaactctcaccggctccagtctcaacttttgcctctaatttttcccataatattcactaactctagtgatagctgtctatgcgcattgtactgagactaattcagagagtgggttggatgaactttggtttgatttgtacgtaattgttaaaaactgtgtttaagaaaacagttgtacccttggcaaaacctggaagtctctatgttaacaattttcccaatttttgttttaggaagccattctgcatattatgtttttaaataaaaggatttgactttgggctgacaatttagcatttaaccactgtctccgcaccagttccacaagagcagggatttagattaattggaaaaacctcattggtttctgatggagggggcattcatagaaacaacctactgacaactaaggagctactgcgatgggatgggcagcctgcagcttcactcggtgggcagcctccacagatgagaagatggagcctccacaaggcacatagctggcctgttgatgccactgctgttgaagtctatgtgaatggtgccccctggtggaaggaaaaagagaatgggacgccaggaatgtcagatgcttttcagcctctcccctgctctcacgcctagaa

SEQ ID NO: 1761 - DNA, 569 bp, Homo sapiens
ctgctcataaacctgggctgggcctgtcatatcatgtgcctggaggacagacctgagatcatgtgacctgcctcaccccagagattgcccaactgccctatcccatacctgttccccagaaggccatggtagtaggcaaagtagaccagggagttgtcattctgctcataggaggagagtccattgcccacagccagcccctgtgaaacacccagggtgctcagctcatgtggagggcaaaaaggaagagcctccctcaccctaccacccagaccttcagcaatccggaagctgaaacccagggtggtttatgtaggccggtgggtatgagaggccactcaatgcaaaacacagagctggcagcctgacagctaccctgcacctgaaggttcatgctgggatcctgcatgaccagcacggccagggtggggatgtagatgccagcatagctctccccggtcaggaaaagtttgttgttcttgtactccggaaagaggcggaagaaatcttgaagggcctcaaaattgctctgggcgacctggggatggcagagcaagacagagggaatc

SEQ ID NO: 1762 - DNA, 784 bp, Homo sapiens
cacgacgtggtgaacttttaaaaacggattcagtagtaccaaaatactcataatgtgcagacagacaaaagaactggaaggagtcgtgttttcagacacaggaagcttttcacgtgctccacctggacctcatctctcagcctcacactccgatcttcagcagcccccgctatgcgcccgagtcttgggacgtcatcccggagctcctagcctgcccgggaggcagagccatcagttgtctatcttttagattctcctcttggccccttatcccaactaaacacatcaccactgaggacctgtccaggggtttagctcctgatgaagagacagagaaaaggtcagagaaaggaagggtgacgctccatccaagatgactacagcgctatgatttccagatggggaaggtcacggatgctggacgcaacagaatctcaacagggacccgagagagagaggctcctctctccctacactaatatcccacgatccctgtgtcactttccagaacacactgtcagttccatggacctaggattataaaatcctgtaagatttatacagaaaatataaaaatctggggagggggaactgtgaaacaatgtgaaaaaaactatttgtcaaatggacagtggggaataacttctcctcccgcacctcctccaagcttctaacaacactcatggcacacaatacagaggagactgccataaaaatgacttaaaatgtgcccttttgaggtaaagtaactatgggacaagtgactataaaaatgacacagctg

SEQ ID NO: 1763 - DNA, 8937 bp, Homo sapiens
cccctgaagtgctgtgcctggagataccattgtggaccctggagaggcacctgctgcttatgcgagagaattggcagctgactgcactgccaggagccaaggcctaggtgtgtggagcctggaagaccagggatacctgaggcaggaggtgcagcgtgtggagtgagaaacccgagagggactggggcctgtgctcaggatcagcagagcaggcaggcagagtggagagggagagacggagccccagaaggggagcaggaggagagggaagtagtggcagcagcccaggccaggcgtgtgtcctgcaagtgctaggaccagccacccctccccatggcctccaagccggctgccgggaagagcagaggggagaagcggaagagggtggtgctgacactgaaggagaagattgacatctgcacgcgcctggagaagggcgagagccggaaggcactgatgcaggagtacaatgtgggcatgtccaccctctacgacatcagggcccacaaggcgcagctgctccggttcttcgccagctcggactccaacaaggcgctggagcagcggcgcacgctgcacacgcccaagctggagcacctggaccgcgtcctgtacgagtggttcctggggaagcgctccgagggcgtccccgtgtcaggccccatgctcatcgagaaggccaaggacttctacgagcagatgcagctcactgagccctgcgtgttctccggagggtggctttggcgctttaaggccagacacggcattaaaaagctagatgcatccagtgaaaagcagtcagccgaccaccaggccgcggagcagttctgtgcgtttttcaggagcttggctgctgagcacgggctgtccgccgagcaggtttacaacgctgatgagaccggccttttctggcggtgcctgccaaatcccactccggaaggcggggctgtgcctggccccaagcagggcaaggaccggctgaccgtgctgatgtgtgccaacgccacgggctcccacaggctcaagcccttggccatcgggaagtgcagcggtcccagggctttcaaaggcatccagcacctgcccgtcgcctataaggcccaggggaatgcctgggtggacaaggagattttttccgattggttccatcatatctttgtgccctcggtgagagagcacttcagaaccataggtttgccggaagacagcaaagccgttctcttgctggacagctcccgggctcacccgcaggaggccgagctggtgtccagtaacgttttcaccatcttcctgcctgccagcgtggcctcattggtgcagcccatggagcagggcattcggagagatttcatgaggaacttcattaaccctccggtccccctgcagggcccccatgcccgctacaacatgaacgatgccatattcagcgtggcctgtgcctggaacgcagtccctagccacgtcttcaggcgggcctggaggaagctgtggccgtcggttgcgtttgccgaaggctcctcctctgaggaggagttggaggcagagtgcttcccagtgaagccccacaacaagtcctttgcacacatcctggagcttgtgaaggaaggctcctcctgcccgggccagcttcgccagcgccaggccgccagctggggggtagcgggaagggaggcagaagggggacggccccctgctgccacgtcgccagcagaggttgtgtgtggagttcagaaaagactccaaaagctgaccaggacggcggaggagatcctggtgagggcgaggaggtggcctgggagcaggcggccgtggcctttgacgcagtcctgcgctttgcggagcggcagccatgcttcagtgcgcaggaagtggggcagctgcgggcgctgcgtgccgtgttccggagccagcagcaggtgaggaggcggcgtggtgccctcggggctgtggtcaaggttgaagccctccaggagggccctggtggctgtggggccacagctcagtctcccttgccctgctcatccacagcaggtgacaactgatggcttctctgccctgccctggccactggccctgtttctccccacaccctggagtggcatggtcctgtgccccgaccccacctgaggcaggagggcatgtgcagacactcaagagcccttccaggagtgggtcgcccacgggtgtggctcgggtgcccaggacggtctgtgcccgaggttcctgtcaatacaggttttattttatcacttgccgtgtcatccgaaagtgaggaaatgttttggaagggtccaccctagcctagaacaagccagagccgcaccctggctggaatgggggccaggctgagccgatctggtctcgtgttcgctggctgatcattgcagtatcagagggtggagatgtcagtctgtccacgtggagagaagttgccctccaggccgacaggaggccatgcccaccgcccctggacaggcttcgtctcagaaggctctatctgctgggctggcggccatccccgtgttgggtggaccccgagcacggttgcctgaggtccgatggcccgagagctgggactcagttcttggcctgctagcggctgaacaggccgcacatctcacttcagttgtggcctcattcagcagaatgactctggaaccatcctctgttacccgcagatcctgtcccatgggctctggccccaagatgttggggggccccacggagagttgacttggtagagttcctttctgggaagaaagtaggagtggctgaccaggccctgctcatcacccggatagaggacacggaccctgtgtggtattttggcattttggctcagagtccaatgtaccatgttgcccagaatttcatacttacggcctttacatgaatacgtcttgatcagacattcagagattagtcttaggtttccacgtaagtcactgaaaacagtaaaacaggctgcttagatttctagcagtatgtgtgctcttatccccagctgttagcacgttagtaatacttttggggaggagttgtctgtcctggtcagttttcacagaggcggttgtaagaggatgtggttattttctccatgtctgtagttgctttgcggcatctccatttcacgggcaacactcactgcctgcagctgagattccagaacgccctgtgtccacagtgattagcctcgtctttcagcgagcataaaataggtgcattgtccttttcttttcttgaggcagggtctcactctgttgaccaggctggagtgaagtggtgtgatcccagctcactgcagcctcgacctccctggcttgagtgatcctcccgccccagcctcctgagtagctgggactagaggcacgcaccaccgcgcctacctttttattttttttgtagagacagggtctcactgtgttgcccaggctggtcttgaactcttggcctcaagcgatcctccttcctcatccttctaaagtgctgggattacaggtgtgagccacagcactcggcctaaataggtttttcttgctatgttattttcagtgctttgcccttgaattcttttcctctcttaaattcatatcatttggccgagtcagcacgtagtttgcattccagcgtctgctgttgattccactgaaacctctgttctcatgaaggagaggatttggctcgctgtggtttctcgtactttcacatctctgtagatacaggggcaaaagtcattgctgacagagccctatctatgtcctggaagtgtgtgtttcttgctttgaatgcatgtgtgaagattataaaagccaaatagtttttaaagatctcggtgctgaacgacagtcccagttcccatttgtgtcccattgtctttgtggtgtcacccgcactgtttgcttcattgtctggggaacttctgcacatccatgtactttgtgccatttctgggctcacgtgtcactcctaatagagcctcttaaccaagactgctggattgcagctgcttgaggcaacacaggaggttagaacatgtcccgagggctctgaaacagtaggacatcctgggtgggtggagctggggagggcatgggcaggccagctggccgagctcctggctggctctcctgagtcctctggacatggcttgtccctgtgagactgtagctcttcaggacctgagctcttcccgttcttgacctgctcttgtgctgactgtgctgggctgatgggtaggcgcttgtccccagtgagtggctgtgtcctcagggtgcccctcttccagaccaactgcagcaaggcctggagcctgactctaggtgcagcccttgtggctggaatcccttgtgccacccaggggactcgggccctgctcctcctgcagcccctcctcacctgggctcgctgctggagtgaggtttttagggagcccagagcgtactcatctctgagctgctgggcccagctgcctggtgcatacctcttgcctcggtcctgtcccccagaacgctttatggagactgccgtgtcctccgagcactttgttttcacttcctgacccgtctcagaagctcaagtggttgaatgttttagcctcagaatctttttccccaagccctctcaggtggagccccgctgtaccagacaccacagcacagctctgtgaggctgtgtctcttcactctgtttctggggctgctgaggcccctgggaagccctggagcttgccagagcagagcgagaaagtctctggtcctgtttaaatgcctccgcgttttatctgtgagcaccaggctggagccactccctgtcttctcacagtgcccctgcaagttgcagcctcagttttccagtggctcgtggggtagcaggtgctgcgtcatatggtttgggacctctgtggctgcttccagcctgctaatagaacctctttccaccactgccttcatctttggggtggcacccctgagtgctcaggcctgagggcgctcctgtgtcctcactcgggacaggcagcctccactctgggagctcccatccctcgggatgcccaggagaggccatactttcagggtggcatggtgaattcaggggttaggatgggtaggtggtctttcagccccttctgcgttggggttggtttacagaacacctgtcctgcctgtgccagcctggccttctgcgagcaccccaggcacgctgtcctggaagttgtctgtctcctgcataggagggtctagagcagaccttgccctgggcctgtctgtgcgtgacttccatatgcttcattcgtgctcagccatggctgagcatgcgatggagagcacctggaccgcccctgacgtcgcaggccactgttcttatccagtgggccaagtgattgattgctagtggtggggttgattggaagaaaggaagtcgcagcccctgcccacggcttccccagctcgctggggttggaggactgtcatcagttgtccccagttaaagtccatttggaggaggttcagggtcccagtggctggatgtgcttgtggagggacacggtttgaggcaggggtttgcagaaggtgtagactgcatccattcttgggaggctgtggcacagggcagtgacaacttgggacaaatcaagacccgtccacactgcacctcagggacctcacctcacgccccacataaatgtgcttattggggggccgggtgtggtggcttctgcctgaaatcccagtactctggaaggccacggcaggaggatcactttagttcaggagtttgaaaccagcctgggcaacatagggagaccccatctctacagaaagtaaaagaaaatgagccaggtgtggtggcatgtgcctgtaaccccagctactcaggaggccgaggcgggaggatccccaagcccaggagtttgaggctgcagtgagttatggcctctgcactccagcctgggtgacagagtgagagacctaatctctaaaaacaaaaaataacaaaatgtgctttggggtcaggtgtggagatcagggtcggggaggtcatgaggtaggtaggggtcaggatgtggacagtcatgggctggtgggtgtggcagccgtgaggggtgggtggtggcctgggaggcagggcctgggcagggcttctgcacttctgctgcttacccagccccctctgggttcgaggactctccttgacaagggctgagctctcgggcactgcgttggactcagctgcctactgggaggctggggagaatggacctgtgagaccttgtttgtcctcttccctgcccagctcttgtagaccccaggcctggctgtccgcagggccaggagctgcagccatggcagccaccagcctcccacatgagccccagctcccagccccacacgcccactcctttgcccatgtggtgtcagctctggcctccgcttccacacatggaccctcagaccttgcacatctgttgtttcccttgcagggcagtgatgatgacatgaaatgaggtggggtcactcctgtttagggatgagactggggcccagggaggggcaggtgtgaagttgctgagggcagagggagacccagggctacctgctcctaatgaccagcctcacgttctccactgctcactccctgccgttcaccagctgcatgaccttgagcagtgcactcaactgtaaacagaggtgaaaacactcctttaccaactgttttaggggccactcttgtttgaggccttgaacctcctttcagttccgtggtggtcctgagcctctgaatctgggtatggcccctgctgggtcctggtctcttaggcagcacgatggcctccctgctcaaggccctgcacccaggggcagattgtgggaggcccactggccatggctgggccctatcgcagagagcctgtcagcacggccatttccacacccaggctggctgggaagcaagctacgaggtgctcaaaggccctctatgtctgcaggtagccccgtcccacacaggcgaggatcgttgggcctccttagtagccaaaggaactgaggtccagagcagggaatgtgttgcccagtgtcagcatggtctgctctggggtcaggcgtcttgccctggtcctaagccaccccaagccaaggcatgtccctgggcccatttcctctctcgaggtcttgggttccctatttctgatgtgtgtgaaaggaaggcctgtcttctggggtgaccatgaggctcagtgggaggagctgccaggcttgagctgggacttggcacctggccagccttttttctatttcattgtaccttgatgggctgtcagttctgaagagaaaaaatacactaggaatccattcttcctccaccattctccctggcagagggaagtgactacacccctatggtgtggacatactgacgctcctccatgaagcagcaaagttctgttgtttcaggagactgtgggccttgaggatgtggtagtgacctcaccagaggagttggcaattcctaagtgctgcctggaggcctctacagagacataatgttggagaacttctgccacatggcagtgctgggtaagacccctctgtccccaccagtgcccttgaggttatgggtgttggtaggtctgtggcctccatttccatgacgatggtgttaaggactgcatgtttgtgtccccccccaaagtttatatgttgaaaccctgacccccaggagggtggtattaggaggtggggcctttgggaggtgactaggcttaggtgagatcgtgagggtggggctcgccgatgagatcgagtccttataagaaaaggaaggaactagagcgaggtcactttgtgctgtgtgagcatacaagaaaactgccatcttcaagctgggtgcagtggctcacgcctgtaatcccagcactggaaggccaaggcattaggattgcatgagtccaggagttcgagaccagcctaggcatgataagaccttattgctaaaaaaaaaaaaaggaaataaaatagaaaattgccatctgcaaatgagaaagccttcagccgacaccagactgccagtgcctttgattttggactttcagtccccagatctgtgaaaaattaatttatgttgtttaagacacctagcctgtggtattttgttatcgcaatccaaactgactgagacaggcagtaaggagagaacagaggttccagcctgcttcaggtccaggcagttctgccattgcccctaactcctcagtgccagtcatgggccaggcccctgggggacttggaatgagtaaaacatgcacctattgttaaggttcacctggtccagaaggggaggcagacccacctgcccaccatgacccggacagaggcgataaatacggagcacctcatggccagggcctggaggattcccaccataccctacccagcgccaataacagagggaccctggagttgtgtacacaagatagcagttcagtgcttgcacacatactagttgagaagggaaatcagggctaatgaaacagctcaactgtctggcagagccaggctccttctgccatgatacagtttggatgtttgtccctttctaatcttatatggaaatttgatccccagtgttgaaggtggggcctggtgggagatgttcctgttatcgggatggatccttcatgaatagcctggtgccatctttgtggtaacaagtgagttctcacttgattagtttctgtgagaactgtttgttaaaaagagcctggtggcacctccctcccttcttcctccttctcttgctatgtgatgctgctgccctttgccttccgtcatgagtggaagctccctgaagcccccaccagaagcaaatgctggcaccatgctgcttgtacagcctgcagaactgtgagccaaataaacctcttttctttataaatta

SEQ ID NO: 1764 - DNA, 420 bp, Homo sapiens
gttttagggagggagagcggcctgggtcctgggtgttgtgtgcggagctgtggcgtcgcgtgtgaggcgcgtgcagggtgagtgtgagtggacgcgtgagtgtgtgagtgtgcgcgcttggagcgtgttaggcgagtgcgtgcgcccacccctgcgcccctcctcccgcttacactttgatcttatttgatcggatcgtgaccccagccccgccgggccgacccgaaatgaaaagctctcctcctgcgaagccccctcggggcgctgtgcagcgaggccccttaggcggcggccacgctgtggtccccgaggtcccggagctggccctgcggggcccggcgctcagaagtgatgaattgatcagatagacgaggccgggcttgtccccggccactgattatcgaggcgattctgatctgg

SEQ ID NO: 1765 - DNA, 965 bp, Homo sapiens
gaatcctttgctgaaagacttctcccaactcatctagttgttcaacgctgcagcattttatatatatacctatatcattgaagttgccgtcacgactgatttattagtttgtgcctttcaccaggctgggcagagatgtaccaaattcatttttactgataagaacataatgaatgctgaatgaatgaatacaagaataaacagaagacgttcagaagaaagttcacttggtaaacaattgacagtcttagtgactatttttatgcattgaagcagtgagagggaccaaggtatctcaaaggatccaaggtttttggattggctgcaatgagcagagatcagtgctataggaaggagaaaggctttctttcacttttagacatggcaatatgaggttttcatgggacatacagtcagtggttgtacatacgatttgagagcttaaaataatctagagaagtaagttcagagagttatcaacacctatggtggttgatgtaaaagtgtggtgagatccccttaacataatgtattgtgagaagaaaaatgaaaaaagaatcctggagatgaccagcatttagtggggtgaggaagaagagaaaagcagcaagtaaagaataaaagtttcaagattgtcaagaatgacgagttggacttggtctagttacttccacagcagcaggaggaacatgtgtgtgactcaggataactggggaagccttggctaggctttcctcatgtcaacctaccactcaaagggagaaaacctcctgatcagaggtgcccagaacccaggaaatccataatttttgaatgctggccgaggtctgtgacctctgactgaatggtttccaagctccgaattcctaggtgatgttttcatttgttcacacttgctgaagaagggaaaggctctctgatttacgtgtaagcaaaacaatctaaacagtaggataaaatcatgt

SEQ ID NO: 1766 - DNA, 477 bp, Homo sapiens
aatgaggccgcagatggagtcagaatgtgaaattacaaataatcactggatccatctactgttttccatcaccttccccactgatgctctgggcgagagagtgatgtgtcacttcaactgtgtgtaatatgtcagacacgtcctacaataacaggcgtcatatttgtattatttttagtttactgtagaaaataatgtcaccgccaaaggtgatgagagtcacgttttgtaggatctgttttcttatacttaaagacagacttctgctacggtaattgccagtattcatggcttcctttctgtgtcagaagagaagggatctgctttctcttggctgatttcacatagcattggtaatagacatgcatttctctttctaaaggggagtaactttttaaacccttcctgattttagcctggcaatgtaagtgtccttaatgtgactgttttgataattaaaaaaaggtatataattta

SEQ ID NO: 1767 - DNA, 1256 bp, Homo sapiens
ccggcgtactggaacctctctcgcgatcccgcacccagcttgaattcagcaagaatcgaaaacagtccaacaaccgtcgtatctacagcgatccttagagaacaattaaggccagttgacagtaaagaacaatcagtgtgtatttgaagtccatgctgagagagcatcaatcttctggcagctgcaagactgacctatcaaccgaggcatttcttcattccctgccattgtctcctcctcttgagatcgccatcaggcacagtcacttttctacaaacaggcaataggactcccgctgccaccctgcccagattttagtcctctactgctgataaagtgagcaaagatacgtggcacttcctgaacccaaatactcttctgagctgattctaaatccacacagaatcaacctacctcctattacctccttccaagctctgtgtcccattctctcatttcagtctcagctccagacatcagtgaattcaatgtgatacatcaggggacatcacaggacttccctacttgaaaatcaagcaatcgtgtccctgaaacactctgtctttattcatgctcagttaccgtaaagtagatgcaactctaagaacctatggatttttttattgccactaatagatcatgatttacagcaaaattttaaaaggtccaattttactcacataagaagaagaaaacattcagcaagaagcatttcttttgctttatctttcccagttaaatatgactttaaaaaagacaaaattttaaaaggtccaattttactcacaaaagaagaagaaaacattcagcaagaagcatttcttttgctttatctttcccagttaaatatgactttaaaaaagacaaaattttaaaaggtccaattttactcacataggaaacaagaagaaaacattcagcaagaagcatttcttttgctttatctttcccagttaaatatgactttgaaaaagaagagcacacctcattagccgtaattgtctgattaatacaaagaaatggactcatatcacggggttctactacccctatggtagtgtttactatccttatttcactcaataattacagttactttaaccagaatgcctgccttgtttggcattttgggagaggaagcatatgactgtaaaccctcttcaaactttcagacttacgtttgcttcttctaagtccatcgactttatacataaatgacttctttttaaaaataaataaataaataaataaataaa

SEQ ID NO: 1768 - DNA, 563 bp, Homo sapiens
aaatctgagacagccttggtctgagggagcaaagacagagaattcacgtgctgcccaggcatagccacatagcaggtggacatccctggacacttttctgacaaagcacgcaatgtggggacaacacagaaatccaagaaaggcaagaccaatttcaaggcactaaataagtggactgagacaagaagtacacagatacttcccagaacaaacttggttctaaggaagttccagactaaaatagtgcatcaagaggactggcataatcagcctcactaaaaacagcctgattaatactaaatatgtcctagctcctaatcaattatgttaacgaagtcataggcagcacatctgcaagccctgacaaagcccatgatctcagcattgcctgataatatagactccccgagctgctcagggttagcagccttcaagctttcagagaagacactgacaaaggcttgtgatcctcaaaccttgttattttattcaccacagcctattactaggttctgggatgaactgtcaaattacattgctctttaaataaaataacaggagct

SEQ ID NO: 1769 - DNA, 2453 bp, Homo sapiens
tttgggacacttaagtgactttgaaatccatccaaaggttactctgttccttcactccacacagctcaggcatttccatgttggtctcagctgccatctcaatggtttattctttttacatgttggagcagatctggacctcccaaaatgttttgaggagaagtgggcttagaggggttttccctgctctgtgagagaaggaatttagcaaggattaatttttctaagaaggtggcacaagttttgatgtgatttgctggaaaatagtaatagtcacaatttatcttattcccccaagagaatgggatgatgttcccatggaaccttgctcatcctgctagcaataacttgtattctctttctgattcacacaaacaaggatcagagggtgatggtgggggaaatgataccaggaaatacagttcgttttttgcagggattcagaatgtgttgctggacttcaagataggaagaatctttgccttgatggctgatgacagtaaccaccccatctaccatcatctattaaggatttactgtgtggtcactttacagtcatccaagtaaattttcataatcacctgattacatgggtaccgcttttcagaaaaagaaacagatttctggagggtaagtaacccaaatcgtacagctgagccatctgtctgcatctcaagcattgaggcagcattcggcctccgagggtgttgtcaaatgtgctggtctctgttaactcagggttttggattaatgggtggagctgctcattttcacaaacacccaggatgcagtctgcaccctctatttaaagtgaggtccctggacgagcaacacggcagcacctggctgcttgtcagcaatgcagaacatcaggcactccctggagctacagcacaagatccccaggcaggcgcatgtgcatccaagtttgagccgcactgctttctgccactacggaggaatgtatcctttactctcttcctccccttcgtctcatcttgtttggtaattttaaattatttaaaagttatagaaaatcatagtgcctcaaaatggcttaccaagaaatactcaaagctgtaggatcagaagcttgacatgaagatttctgtgcatctttgaattgctttacagaaattaaagaaaaatccagacatctaaaagattataatttcagaattcatagtaacatggggatcttcttggtgtcagaactgagttcttgctgaggtttgcattgggccctgtctccgggcagctgcagcataacacggagtcacccttgctgtctaagccttgtggctggaggggaagagtgaggaccaagctgtcaacaatcccagacctgccaagccccatttgtctgtgtgcctgccaggattctaagactgcatttgggaattttgacttttactgaatgtgaaattctgtgtatatatagccttggtgagctgacccagtcagggatgactctgatgtacttttgtcttacaggattcagaatccatggctggaagaggtagtaaggccattgggagggcatgcctctcctcagcccacccccaccctgtgtgggtctccattctgaaatttccattcagatgacccggtcctaggcagggaccaaaattccttgtcagctgaggaagtcctgaagaaacatcctgaagatgatgactgcactgccatcgtgggcagatgcagcttccatctacctgagggctgaaggggaaaacctttcacacacgtgaggaaggcgcagctctgtggaaaggtcactagaatggcagcggcagcaaatagggctccaatgcacgtttgcagttaactgggtccaaggagagcatggccctccacagcaagtttgctctatagaataaagtcctgagcttgtttttatcacagttagacagagaatggtctcttgtttctcagttatccagggaagaacagtgtatattctctgtagatgagtgttgtctaatgtagtgattaatctctgctagtgttaggaaagctccactactgtgtgtgtgtgtgcgtgcatgcgcgtgcgcatgtgcacatactgcagtcttgactttccaattacaaaatgcctaagtcaggtcacattgtcttcttccagccagtttctaaggcaggcaatggaaacaggagccgatgccaaatggtctagaggcagaagggctgcatgctttgcagggccagccccaaggctgccttccagagctgcactttctctggggacagtaaactctcaccgcagctgccagccccctgtgcttggccatgcccctcacatggacttggaatcagtgtctctcttgctgatgagcacctccaggagcctcagtttcgcctttatgtgcttatattcactgtattcttcagccataggagtgcggtcttccttctggacatttctaatgcaaataaaggaaaaaggggtc

SEQ ID NO: 1770 - DNA, 490 bp, Homo sapiens
gtcacacctccgtgagcggcctcgggctcgcggttgaggctgattgaggaagtgggttcaggcggcccgccgtgcctggcacacggtcagagtcccctgacaggactttcccctttctctgagatgacaatcaggccgctttgctttgcactgccctcagagaagcagtgtgcccagaagtcaagtgtgagctcttgagtcaaaatgcttggatttgaattccaactctgctgcttaccagctgtgtgacatggggtgagtgagttacctgacctctctgtacctctatgtcatcatctttaaaatggagcccacagcaaccagggaaatagtctaacagaagcctaggatgaagaatttcgggaaagaagaaacgtccagcaaggccaagtccctttgtgtgtcagtctgctttctctctcacacatacgtgcacacaggctcgtacacacaaagatgttaagcaaaatataaagcccctccactgata

SEQ ID NO: 1771 - DNA, 2398 bp, Homo sapiens
atttcaaaattaaatttaaaaactcaatatatgagtttaacaataggttggacactattgaatacaagacttgtgaactggaaacatatcaatgaaaaatatacaaagtgaagcatggaagaaaaaaagaaagagaaaaaataagaaacaaatgtaagagacatacaggacaagtatgaaaggtctaccatgtaaaactgaagtttcagagggcaaggagaaagaaatagagcagaagcaatattcaaagggataatggttgggaattttctaaagcagataaaatacatttaacccactggttaagaagctcagcaaaccctcaagcaggataagtatagagaaaaccacaattatgcaactcacaataaaactgctgaaccaaagacagagaagatggaaaaaccagccagaagaaaaaagacacattatctacaaaagagcaacaatgagactggcagctgtctctaatagcaacaatagaagccagaagataatggaatgctatctctagagtactgaaagaaactaaaggccaacgtgtgaaaaacaatcttcagaaatgaacgttaaatgatgacattttcaaacaaacaagcaacaaaaagaagcaaaaagtaaacaaaaaacaaaaattcacataatttattgctaggagttttacactgaaatgctgaagggatttctactagcaaaagtaaaaatgatctcatttgaaaagatggaaattcaaggagggaatgaagaatactggatgggtaaatgtgttggtaactgtaaatgaatactgactacacaaaattatgttgaataactgaaagatgaaaacacaatcacttgaaggagaaatgtatggtcaaactgcatgcaggaaaaacttctataaaagagttacttcatgctctgggttggcagatacaatgagcaggagtgcatcagaagtaatcaagaaggtgattagttggtgtacttcagcaggagcaaccagatgaattggcttctctatatccccgtattagccacaagctaggcagcagcctgcaggtgggagcaatgcctatgcatgtatggatcagtgtgctacatacagtcacgttgacagcatgaaccttcgatgtgatgtgaggaaaatggcattctacctctgtgttcttcctccccaaaatttgtaaccaccatctaatcatgaggaaaacatcatacaagtccaaattgaggaagattctacaaaatgcctgattaatattcatcgaaactgtcaaggtcatcaaaagcaaggaaagtctgagaaactgccacagcctaaagacaatccagggaaacgtgatgactcagtggtattcggggtgggtttctggaacagcaaaaggacaacaggtaccctgagccactatctaaattgtctgcttaccttatgaagacaccataaggaggtataacgtgtggtgagcacaggtgaagagctagaggcctgaaactagatggggagggagaagccagccatgcctgcatccagggctgcactcagcctcccagcatctgtgcagaggcatcagtcaagccacagctaactgcagtcccagctaacattatgtggaacatcccagtcatcccagatcatcccagtcaaccaagatcataaaattgttttcagctattaagtttaaatatgtgaaataaggagataaaaatactgacttggactctgtctgaatgaaaggattagtagattagattagtgattcttaaaagactttcttggatgcatataagtgtccacaaaataagagtatgatggtttccaggtacaaataagatggaaaactattttgtgaatcagaattaaattggtttatttactgtagaacttctaagaggctttaacatgtacatttaattatcataagccttatgaaaactccaggaggacagaagagttgcctgtgactttttttaaagtgtttattcacatcccaaggaaggattcccagaagagatgatgcctaagcagtgtcccaaccatgaaataaagtctcctagctactggacaagatcatctcgaagcttatttccagctccaaatgttattattttcctcaaacccattataaaatggcctctcttagcactatgagatctgtaatacaagaagtagaacaaacacatgaagttcctgttggaaattcaaacttctcatacagccttcactgagttctactcattatggataaaggcttctgctttgagtcacctaagtacttttgacccccaacttaatcaatgccttgaagtgaaaatacagtgtcaggcagtccctattcatgacacaaacaaaccaaccaactcatatcatgacttaatggtgtgagacctcagtaaaaactttatatgaactaaa

SEQ ID NO: 1772 - DNA, 906 bp, Homo sapiens
tgggagcttaagggcgccggcacgcgttcccctggcgcagagctcgctagccggggcgcgggctgcctccttgttctggtgtgatccgaatgtaacggagcggactttgggatccagaaccccggactgaggttgtgcttggcttgaggggcgggctggatttttcctcttaggatttatttccctggagacctcatgaagaatgatgtgggttctatagggtacagtgtgatctgggtcctgcctaatctcctttctaaacttcagaaaatcatgtaccttggagttgtggaggcatgtttataagcagatctgagttttgccacactggaatttatttattcattgaacaaatatttaatacctactacaattcttagccgatatatcagcacaacttctctgctccaactagtctacattgcaaagcatctcctagtgtctttggaagaaggatctatggtgttatatgtgaacaaagatgtagactagtaaggtatcaagatttgatggggatatccagacaacttggagccaagtccccacagctggatcagacaacttttggtgacatctcacagtgtggattatcaagccagtgtatcagtctggagcctaggttttttgcctttagctttgctcaggatgacttctgctcttctatggcaatacttgagaagctacagctttgattagacgagaggctatttcaataactttctcctgataagaagaccaccgaccgtggacggattctggccagtttacaaaggctgcataccatagggcagggcaccccactatggcaaacactaataatgatattgctcctgattttgtttctgaagggaatgcctctaagatttcttcattaattataagagactgggtctcactctgttgccc

SEQ ID NO: 1773 - DNA, 6890 bp, Homo sapiens
agagccccctctcggctgctggcccgggctcgcccgcgccgctgggggctctgactcctgccgagccgggcctgggcagcgccccccgcgccccgcgagcccgcgcccccgtcaccgggaaacgccgtagccggcgatccgcggtcgccctgggctcggcgccggcccagccaggaccccgggagcgcacgggacgggcctcgccagtcacactccagcgcccccacgagccagcacagtgcctgctctcagtgaaaggccactgttctccttgggtgacccccatgatgcctgaccgctcctcgtgcctcctggaacagccagggtccttatgaagtggtgaccactccagtcagcaggggtggaaaatggtaccagtcaaacccgaggcggaggaggagcagcccgcagtcgctgccgcgagatggaggagcccacgcccgagcccgtctatgtcgacgtagacaaagggctgaccttggcctgcttcgtcttcctctgcctcttccttgtcgtgatgatcatccgctgtgccaaggtcatcatggacccttacagcgccatccccacatccacctgggaggagcagcacctggacgactgaggcacagcggctgtggggactggacctggcgctctgtgggtggctgtgccccaggatgcatccgtgtgttccctgccagcctgccatcccacagaggcaaggaatgaatctggccacccagggaaacagaaggtgcagcttagccctctcagccctccctcgagcaccagcgtggaatgcccgggtgccgtgggtgtcgcaaccatggaccagccaggggaaaagagccctggaccaggacccaggaggctggggttccagtgtggggagtccctgtgagatgatagggtagtcaccttcccaggttcctgggcaccttttggaactggatccagcaacagacaccccccatccatcacataacagtggtcttgtcttgaggagactctcggtcctttaaatgcaaagtagcaatggaggctcccaaccaagaggtcccacctgaaccccagccccctccccatggactagcagtggtgtggcagtgaggggggaaagcgggttgagggagtctcacctgaaaattcacaaaacgcacaggatatgggctgcttccaagcagtatttttttaaactaaaatatagagggatatatttttcctgttataaataaaatgtacattttagaaacttgggaaaatgcagataaatagaaagaaagggggaggaaataacacttataatcccacctcccggaaaccaccattttgatatattttcttccagcctttttacttgtattttttagtcaaattcatactctgtgcatgatgttgtatcgcctcatatgatagcaggaatacttccccattacatcaaacactcttcttagctgccagttttagtgaccgaagggcatcccatcggttgggtaggtcatggttaaaaaatcatctcctttggttgcatatttaattattttccactattttttcctcacacaaaatgatttcgcccggtaccctttttgggggtgcacagtccatgagatgaatattgaatggggagacctgggttctagtctcgcatttaccagtcaggttacaatgcgaccttgagcaagtcacttcacctcccagcgcctcagtttcctcattgtaagataggaaaagccttgtcatttttaaaattttattttttgcatatacctcatgtgaacgaaaggacagaaaggggagtgaatatactatgaatgtgctatagtcggagttggggggcaaggaagaagtcatcgatgatggctcttctcaggccctccctcctcccacctctttctgccctccaccccactcccactccatcacctacatctatgaccttgcagcaaaatcattagagcagagcctacaaaaccggccccaagtcccaattcctctacttccttgttagaggaccccaaataactcactcagcctctctgagccccaatttcctcacctgtaaagtgagggaataacatctacctcgcaaggttgttgtgaggacgaaatgagagaacatgggcaaacatgaatgttcttgaattcaccaccccaggagaagccaggggtctgagctgggaggagcagaggttctgggtgccccctgcccctacagagcctggcaccttcagcttttctcaacttctgagggctgcttcctacaggccaaatctcccagccggaaccacttggtcagaggaacactcacagcagcctttcccagcacctgacctcaagggatatggcgtctaccaatttacataattgcctttgtcatcagttttcccataacatggtacgaagttaaatgagagcacctgagctccccttcctctgagtgcatttattccatccctccaagctgtggccttccatccccatccaagagacctgcagctgtgaagaagctcaagacttctttctcattgcctgcctcccagccattagtccccaccacagcccaggccacctggaaaatgggttccaaagcactatcactactaggtgacccctgaatgtggacaaggccacagctcttcaggcagcatttcaggggctatccagttgtcatccctctcatacccctctcctacccacccctatccccactattgtggaatgcacgaagggacagctggcaaaggcagtgaaccaagatgcagggaaggccctgtatgatggggaggatctaaagcaaaagccttttgtgcattgcctcaggttcagcagcagcagccctcactctgaagcctaccttgagaagccaggcatttctgtgaaaagctcatcagcatgcatttacaatgcaaactagaaccaactcccagtcagctaataacagaccccaggaaaaagaaaaggtcttccagacctccccgacacactttagaaccctcaggggtgaaaaagagggtgctccagggcagtgcaacttaaactgtggttgaaggacaaacagcctctgcaatacttgaggagcttgttagaaacccaaactcacagccccctccagacctacgtacagaatgtatattagcaagattcgctaggtggtttatgtgcacgttaaagtttaagaagcactgcctgagaatcccttggtcctaattaattcttttccacactcagatttgctaatgggtttcaccttatctcttgactcttgtttgatggcaacaggaaatagtagcatttcaggaagggtggaaaatataaaaagcactcccaacccaagcctccaaaaaacagcaattttcattttgtgtccatatattcccttctaatcattgtcctcatgcaagattttttttcataaagatgatctgctacataattttatatcatactctttctcctaacattacatcacaagtatactttcatgttgctgctacattcttcacacttgtcattttaatggccataaaacatgacatctagtgcacatatataattatgtagactcctattattaaatatttggatttcttccattttccctgttgtacatgttccaagcaaaaaaagaaagatcaagatagatatgatgaagccggggagcttgcttaagacaggggagaataaatacttacagtacactctctccatttaagagacacatggagcacatgggggagggagacctgtctaagaactggatcatattaaggagaaaaaagcaactggaatctcaggcttcagttgttgcattatgctgctgaagcatagaggagatggtcctttgtgatcagagcgtctcaactcgtttctggcaagctaagatgaactttggggttgtggatagaaagataaactgatctgcaaaagaaatgcacagaagtattgaaggctagaagttggcagacaagaaatgaaaagcatttagagaatgggaggcctgtgaaggtagccacaacccaggacttaaggagaacacaggctggagaggaactctccaaagcagagaatgggtggtgggttttccaggcaatggtgcctagtggccagttttaagttgttgcttgtactgtgctcagctacactcccttcatgttgccccaagccctctctaaagtctgataaatgatccaccactctgcagcagtggtctttgggacaatgaagacacctcggtggtgggtcacttagggaaatacaatctggaaggggccaacagtcccagagacaagtggggtagcagaaatatgcagaaccaagagttcagagtgatggtcactagaagaaatgtggcctctaaggatgctcagacaggtggatatgtatagtaggaccctagctttaccatcctggcatatcattcccatcatagctatttcatttttttccaattagttgctgaaatgtctacatgttcttatcgagttgaaagatcagtgtctccctgtctcattaaatttccagaacttcagaggctaaatcaatccaaaaggggctggccctgctttcaaacaccaagtgaagagaactacaaagtttggtgtgtccactagtgtggtttcataccccctaggtcttgctgttgaggactggttctgccaggcatgatcaatgaccacccacaatgtcctgtggcccagcctgtggagaggtgcccaaacagagttatctgggtccacatccatgtgcccagctattctgtccaatcatagcacaaagacaggttgcctgtgtccagagggacacacagcctcaggcacaccagcccttacttatgagcttgatggtcatcagcaaagactctctccctttaggagggttctccttgggacttttcagtgtcttggcaggaaagagatggcacacacgaagcactgattgaagacagtttaatgaaagaatatttacagaggttgggcaagggtatggaaaacaacagggaacagtaaaacacccagggatgacaaggcaaggtagctcatgtctgtaatctcagcactttgggaggccaacacaggcagattgcttgagcccaggagtttgaaaccagcctggcaacataagcaagaatctgtttatctacaaaaaataaaataattaaaaaaaaattacctggctgtggtgttgcacacctatagtcccagctactcaggagtctgaggtgggaggatcacttgagtccaggagtttgaggttacaatgagctaggatcacactactgcactccagcctaggcgacaaagagagatgctgtctctaaaaataaaaaacaaaaacaaactacccaggaacaggcaggccaccaactgttaccatctcttgcctagagagacaaggagaaggatctagaacccagggagagctatagccatggagaaggagtcacccaatggaagccctggccacagctagaggatcaaaactcctgcacccactgcagctcagtaggaagagagctgggggaataaataccttgacctcttgcctcctgccctccaatctcctgtctgggtcttccattggccaaaaacaacagaagctaaaggtcaggggaccctgggtgatacggtccacataggcagcacactggagcaaaagaagaaaaaccagcacaattcatcttattaccacttagcagccattcacaaactttgcttagatgggagaaaaatattttgtccccggcacaggggaaacataaaatctcaccagcagccatattgtctgggggtgatagcaatttagtcccactccctcctgcaacttaaatcataatgtagccagtcccgggtaagtggaacacttcctgtaaagcacaactgctagtgcccccttctgtggctggtcatgaggcccagagtggtaactgcagtcttgttctcccaccacccattccatagcccctctactttctggcagtcccttagctgttggagaattttatctggtggaatgacccaaatcttcatccacagaggattcaaattcttagtgccgtgtcttcaatgagttgccacagtatccacagattcctaaagaacatgaagaggccttgaagatctcacctggaagctctgtaaaattatcagaaagaatagcaggtgctctagggcaacactactcaaactatggtccacggatggacagcattggcatctctggggagcttgttagaaatctaatttcatgcccccacctcaggcttacagaatgaggacaagggatacagggagtaccaagtgccctagcgaatcccagggttccaaagctagtactccttgcccctattgtgtagcagaaaccccactttcccttggatattggggttaaccatcctgacagtgcagtgatctctttctctgccaatatttcaacataaggagccccagatggcacaagatcatcttccaatttaacagacccataactatattccctggtggaagcagttcctcttggtcactagagatttccaaacccacaaaacctaaggtttcttggttaaaggccatgtttgtgggatatgctgagatgaatatgctgtggtttgaatgtgtcccccaaagttcatatgttggaaacttgattcccattgcaacagtgttgagatctggggcccaatgagaggtgattaggccatgagggcggagtgaatggattaatgcagttatctcaagagtgggtttgttatgaagggggtgtttggtcctcttttctctcttgcccatgtgattccttccaccatgtttatgatgcaacaagaaggtcctcaccagatgctggttccttgatcttgtattttgcagcctccaaaatcgtgagccaaataaatttctattcattataaa

SEQ ID NO: 1774 - DNA, 564 bp, Homo sapiens
gcactgcgccatcaaatgagtcaagcggaaggaccggtacccctccgggaaaaccaggcactaacacacggtgcacccaactgaatttaaactcgggaacagtgtaggcagtgtcaacaaagcgcggtgctgggtcccgagcgtccaaaggtccctgccagctcccagacgcggccaaatccacaggattccaaaagtacagacggggtttcaccgtattagccaggatggtctcaatcttctaacctcgtgatctgcccacctcggcctcgcaaagcgctgggattacaggcgtgagcctccgcgaccggccagaactagctcttcttaaggatgtgacagtgatctgcactagagcttcaggcagctaaggatatctgaaaaggagagactctatggagtgtggatgtagaaaaggagttattcctaccggaaaaaaatgaactgtggacacagtcactcaagaccagagaaacaaccactatgagtaagtagcttcaatttcactgttaccaggagggcacacaccagaaagcctgggacaaagcctgggctagagccctc

SEQ ID NO: 1775 - DNA, 448 bp, Homo sapiens
aatgtgagcatcacacctaaggtactgaagtagagttctggctgttccttacggacatctctggtggatctgaaaatatcattttcatcaagcctcaaggacactttttttcctgtgatgtctctttcgaaatctaaatcctctggacatatagcgaagcaaaattctcttttaggtatgatacacaacacaagtataaggatatagtcaataataactctgggagtaagaacacattatgaacagtgaagacattgacaaacctccgggacctttgatttgtgctataaagtatactatgatcagccctgattaacccaagagaaaattcagtgtgaagatgatggagtgacacaatagaaggaacctgaatcactgaatcatcacttggaagaaagcagcccagactagttacccaactcccatcagacagtgaccagagtgagaa

SEQ ID NO: 1776 - DNA, 1676 bp, Homo sapiens
gtaccagccccaaaccctgccagcagtatgggggaggatgcatttctccacaccttgctgaaggatggggacttggcagagttcagtgatgttttagggttggaacattgattcctttctctctctcttttttcccttttctccttgtgcctctcttcctgtgggtgcctgagaaaatactcagcctgtatgactgtggcctgagtcgagaaggagtgctagctctgagaagaaaaggtttatttccactctcatgtgactatccatctatccatctctccatccatcagcccattggacaatatgtacccagttcctatatccagctagctactgtaccaggtgccaggcatttcgggaagaataagacagacaaggttgtcgtcctcatccttctgctctaccaggaacaagtgaagtgataggaagagcttttcctcaaatagctctgagttgtcccaagtccagcctccagatcagagaccgtggttagggccctggaggatgcccacagcacctcccatgtttgcatgctaactggaggctgcctcttcaggtgtgaggaggcaactgtgcaggtggggcagggctgcctttcatccccctcctttcttctccagggatctggtatgctgagtttgcttttgaaatggaggtcctggccagaggtagcctggtaaatacagttcttaatctaaaaaaacaaaactcagtggggagagagtatggggaagaaggaagcattctccttacctgtggactagacagggagtgctgagagacggagcctggggaaagtcccattggtgtgagcttagagttccaggagagattagccacagccggatgctgacaagggtgccagattgtttcattatggaatggttagttatcacctcagcctcccaaagtgctgggattacaggtatgagccaccatgcttgacatggttcattttaaaagattacatctgggtctgtagacctcctcccatataacttggattttgtggacctgtatgatggcctgcagcacagcactgccagcctcagagaaggctggggtgtcagttcatgagtcaccccagagtcaacacaagtcagccccaccagccgcacagtgtgcctgctgtctattgcaaggtgaatgcaagatgattttttaaacaaatttgtctccctgtggctggtcacttggaggcctttttttttttttaaaacatgtatttacatcctattgatgtatcaccatcctgttggtaactttaaaaattttgtgtatgtaaaattgcctatctactaatttgacaacaataccccggaggtggaactcatccccaacttttggcctggctgtgagacatccctccttgttatgtcttactttgttgctgttgcttttgtttctccccacacccatgcccccatgggggtccttggccagctctactccgactgcagttgtagaactgggcagagaaggtatgacaccccctcccccattatacctcagaaagaactagaagtatgataaatgagtacgactgggaatttgttttttccactatctctaggatgttcatgttttgtagaatccatatccttaattctttttgtgtgaaaatgtagagcatacctagttctcagacccaattccatagattagaaaaaagtttt

SEQ ID NO: 1777 - DNA, 1040 bp, Homo sapiens
ccgggcgctgtgcgaagctagaaataactgggggcatggagaatgcggtggctgtaaagggccgctgaggcggtggaggcctggcagagagcgtccccgcggtcgcggcttctggcttctctgtggagcttggttcttccgtggtggtgcagcaccccaggaacttcaggaaccagtccttccttggagagctccccgggacagccacgggggccaagtgaaactagcgcgttttcttggatcctacactttatagtgagtcataaatactttaaatacaaagccaacaacatttgctgcaaataaacgtaaaaatactgttaaagtgtaaagtgttttcctccgtaccatctgacgtttctggcggttcgttgaacgcgagagaacgctgagccgtctgcactgagcccgggagcatcttcagggcagcgccgcccacgcgcgaggtgaatgaaggacacggcctcttgacactcccaggcagcacagatagacggatccatgaggaaactgggctcagagaagctaagctaattggccaagccagaacacaaagctctgtcagtctgtctgcaatgctacctgcatccttaacccttgtggtaactgtgatggtttaaggcaaaaacaagtgcctcaaccatgaacctagcaatgaatgaggaaagaaatctttcttcccctacaattctgctgggttttgcaatcacactgtgagaaactctaccctgagacgtcaaaccgagaaagaatgctattggctccaaggtgcggtttggaagacgaccgacctctattccgacctggaggtcagctttgaggatgcctctgcctgccatctttgggcgtgttcacaaggcacatttctttgaatagatttcagcagcgacgcattttcacttctgtggggtgggtgcaaaagtcattcagagctgagtctggtggagaggacgggtgatatgctgggaatactttttgctttaaaaagcatttaaagtacttaaatacttttttttttttttgagtcagagtcttgctct

SEQ ID NO: 1778 - DNA, 1120 bp, Homo sapiens
ggatcaggcaaatctggccataaacaagagatggagtctggctatgttccccacaccggtcttgaactcctggcctcaagcaatcctccctcctcggccttccaaagtgttgggattacacgtctgcgccaccccatctggcctaaaatgttttgaattaatgaaaacagtactgtaccaatcaagagaagtaggatggaggatctggtgaaaaagagattgcttctgacaagcctgcccgctgcgtggcttttccagctacactgactagcattgtgttcacctggagagaggagattctaaaccatccactccctgctgatccttagtttctggctggtgacacaccagaaggataggatggctccaatctccctgatgaaggggtaatcacctgactttctcttggaaacagaggcactggttcaggtccacaacattgaacttggagagcaataacctctgtgtgcacagtcactgctggctgaatcaaaaggcaggcattagggataaacactgtcttttaagaataggagtgaatgtctatacatttctgacaaacgcagttttatttaaacaaaaaaaaaagtggagactgggaagaccagagagggaggggcaaatgaaggggcaaaggaaagaagcccagtttctggaattattcaactaagtatgcttttaaaagctaacaaccacaaaaccctaagccaaaccctgtttactggccccttgctagccttgtgtgtttgcactcttgctccataacggcttgtaaataccaccatgtaaaaccttgaaggcaaacagaagacaagaagggacaagctgcatgtgctaggggtgaatgaagtatgtgtcaaggtatttggatggagatgtgcccagaatcttcctagtcaagcttaataaactttggcccaaggtcctctcctgttattgaaactctttcatctggcagaagatctttttctcagatccaaattggtgcctcccacccttccccaaactgaacaataaaaccaaaataaggaggaagcctaaaattaggaactgtaagcatatcactggtaaaataacaagacactgttggccgggcacggtggctcacgcctataatccc

SEQ ID NO: 1779 - DNA, 353 bp, Homo sapiens
cccagcgctggggagagctgtgcagaataggactggaggtggaagtgttggagattaacagccaggtggaggggacgggggaggccctgggtcagtcctcagggaacccccattgtgaagggggaaagggaaactcaggcccagtcctcaggggcccccagtctgagaggaaggaggacacacgagccatatttgcagagaaacaccagcctgcgagaggagggcttgaccctggggactgagaggtggagaagacacagtcccatctgtctcacggcagagacaggtttgggggcacacgtgaaggtttgacatatagtaaacacatgtcatggtggtttgttgtacagatt

SEQ ID NO: 1780 - DNA, 1074 bp, Homo sapiens
gcgtagcgaagcccccggcgagccgaggctgggagcgcggtgatggccggtccccgtgagcagagggcagcggcggcgggaccggggactctgggccaatgggtaaagccaggaggaagcccgtgcctggcccgttgggctccctcctcctcagagccgaagcagtccacactcggaacccagcttcacccggattaccgaggggttccacgcctggaggcagagctgcagcgtgggcccgctcgcggctttgcagaaaacaaataatgacacacttctctggaagcccggggcctgggcccagagccgtggcttctgccaaactttctggtcccggacaccaactccccgcctctcagcccgaggccacagcggcccagcaccctgcaccttttaaagtggctccaaaaaggagaaagccaaatagatcagggtggtaggcgcgagtgcagggagctgcgaagttggaagattactgcttttcaaactgccaaagagcaaaatactaagcgagaaactccgtccaaagcaactggaactcgaggttctttactaatgagagttccagttaccatcttcagagaaaggagctcaaaagagggagtttattttttgcggaatgtcttccttgttaagaagaaaattaaagattaaaaaagaaaatgaagggtctggcaactatgaacctaatggtgccctaacgtttgctattctaaggccgagaatgccagatggggagaacgccatgagcttttgagcttgtgtattttgcgagaggctcgagtgtgaacagtagactacaggccttgagactgagaaggaagctataaaatgtgggccaagggaatgtctgcaggaccgggtttcagagcaccctatcgtggcggataaagagccactaacagcttttttctttatttagtagccaaattcttggttggcgctttgagaaaggagtaagcattaagcgaatttaaccaagtaaaatgtatcgtcctgccctttgtagtcccatagttcactatcctagagatacctatttttcactattttattaaagtgtattgaaaacct

SEQ ID NO: 1781 - DNA, 1239 bp, Homo sapiens
ccggggagcaggcgctccagcagcctgcagaggaccaccccatccttcagcgacgcctgcagaaagccctccgggtccgagatggtttttttgggcgactccagcacccccagagtgatgagccacgtaacggtggcggggacaggctgaaaacgagacgtttgtttcgctttgctaccttgcaagccggtcatgacggaacagaaatgatggttccatctgaagccatatgggtctgaatcgggaggaaccgactctccggagcgcggcgccgacctcaccggcagggcaggggcctgcgcgactctgctctagacggacggtgacgcttcagaccctgccgggggaaggtcaaggaaacggcgtggcctgaagtggggctgtgcagagggccgggccgggccgggccgggcgcctggctgcgtctcggggacgccgaagatctgggctgtgaaagcagcaggccgaacctggagagcccagacggcaagtgtcgcgtcatgcgcgagcttcctcgaacaactgatgacacgcacacattgacatgcgaggaagaaatggagcctcttcttaaaaggacacgagtctccactcactccatccactgtccctgggcgctcccccagtttgctcgctatgacccgcgggcagtttaacaagcaaagcacttagtctatgccaggcacatacattaatccattcaatgacaaaggctagaaagcatataaagcttccaaaaataatcagaggcttaagtcgtctccccctgccttctgccggtggatttctcttgcaatcactaattgcttttatttctagccttgagttaagtggttaaaattttctttgcaaatacaaaaaatattcaaatggcagtatgaattctggattacgaggacaatgtgctcagtgataacagcgactggttaggaaccgtcacaaagtgctgtctactgcctcgcctcccatcatggtccccttttactgatcagatgccgaacaagtggcagagataagacccaaagctcggctcctaccaggaaaggcatacctaacccgtttcctactgctgccctataagctttctaggaaacaggagggcaattaacagctacatcaaggcttgtacccagtgtcttcgtggaaggaaagatgtcaacccggggcgtggttgtacaccgagacttctgttcactttccttactgctgaattagagaaataatttaatgcagtcctta

SEQ ID NO: 1782 - DNA, 363 bp, Homo sapiens
tttctagtataaataaaaactactcatctccagaaaataaacaatgactgctaagatgattgaaaaaagaaaggagaagaaagtagcttgtaaaagcgtgtgaaatgcattcacgttggaatctcctacaggcacttcaggtcaaagactaccgatgtccagatcataatgcgaggacagtttgagcccagtgctctctgactgaggtagaacccccgggaaggtgaagagggcagccgtctgcgaaacagcccagcatttaagaatgggcagcacctggccaggtgcatttgagaactaggaatgtggcaacaataacatttatttatttggatgaagagaagaagatgtattggattccct

SEQ ID NO: 1783 - DNA, 751 bp, Homo sapiens
ctcctctggatcttttctggttccttcgctcctagaactgtgtctgatggcttatgaaggcaaatgacaaatgtttgccatatgcacatgtatgtgcatgaatgaatacatccaggttctgacttcctcggggcaacctctactttctcaatgcccctcttaagatgggggtgggggagggtcctcctagaactgaacatgatattccaggtgtgatctaatacatttaaatgtccaaaagctctttcttccctaaacgttcctttttaaaagctactgttctcaattaatgggtgtctcatcttcttaagtatattaataagaggtattttgatgtttccctccattctgtggattacctcttgattctctggattctttgtgattccgttttgttttaaggatgttctcaggtgtctggtgatccttgcttataagtccaaattaatgatgaggcactaaaatgctgattggaagctctctgtgcaggccttcctcacacccatgtcttcagatacccaaggcctttaatacccaagtccttccaggattctgcacatctcattagcttcatattccctctatttgaaaagttcatatggacccagctctgtcatcatcacatgttctatatccccaaaccttgtgacatctgcaaagaagtacagaagacctcaagagaagataagctagaatttatttatttttataccttttattcagtttttattaaagctttcctacctttcca

SEQ ID NO: 1784 - DNA, 7000 bp, Homo sapiens
aaaataagtaagtgaaagaaaggccaaatagcattattcatttgccttaggtttacagggtcacagattcattagcttaattacaacctcatttggatgccaaagaatgagcaagagcaatcagtattgctacctggctcttgcttcttcttcctgggtttgttttgtttttcagagaaacagggaagggaggacattttctaatataattgtttatagggacaaattgttaaaatatgatgtgtgtgcattttgcaagtttgacttgtgtaaaatagattacctctcctgtcttctttccttcccacactgtataccatcctgcctcatgtcaacccaatgaaattgattccattatttttcctctttcttatttccaaacctcataggctatcttgcctatgaacagttgaaagttttgacttctttggactcaattgaattcactaaaacaatgaattttaataatttttttccaaattcttattcccattgcctttaaaagtcctttagaggcaggttgtataatcataatagcctcctctgaactgccttgagttgtttttcttttctgcttttctgtcacttatgtaaagagtacatgtatttacataaaccttctctgtcccggcctatttcaaaataaagtggaaataaaaatctttagctcaatcttacagaaatttatattatctaccccagagtttgaagataaggccatctccttacactataattgtaatatagtgaacttaaagtgtatcaatcctttatcaaacttgtttattcattagctttttcagtctccagtaggcccattttacaatttattattattcctcctagaagggcttatcattcaaatagcacaccactagttacagactatccttgatccatttcatcttttttgtatattacccccattacaaatttctacttctatataacaccctacccacttcccctcagccttgcagacagcctgcaaactgtctaaatttctcccataaaaatatgtagaacatctgtttcctctagacagcatttatatagatttggaagagagttctctaaacatataccaaagagtatgcagcctaacctcgaaaagttaacaataagtgagcatcatgatggagagagggaattcacagtggatggaagacaccttggaattattaatatgattggggacctggtcttggtgctgtctctgccactgcctaggagcatgactttgaacatgccaccagatgacctccaagttctcttccaaaactaaatttcaaaggtaattttagagaagttcatttgtatgggaggttagcagaaagatacaggaggaccatggcctctgctaacataacccaactaatttggtaataattcttgatatcatgtctttgagagtaagccatctggtatcaagtgaattgaattcaatacctattcatgttcctttaaaaatatataggacatacagttacatttgcaagccaagtggaaaaatgttactatttttgtaattttctataactacaatatttccctttaagagagagtctcagataatacaaatcctttatttttagatccctggaagataaagatgttcttaaaccattctctgtaattcaattaaggaacagccatgcaacaccccatcatgggtagaaaagccaatctctaggcagcatctaagcccaaatgttgttgcagtgccctcctcagtcttggaccccacactgtcttgtttcctgaaagtagagtagcagatatttttgagctctcaggcaagaagcagctttccatctataatagttggaaagatccaaggtctttagaacatctgttatccactctccttgctcaagtccttccaccccggcttacctagttaactacttacctagttaactacttacctagttaaatccactggtgttaggcacagccatgacaaaactgacagtttattaatttgtgattagcattctagctattcatgttcttcaagcatgcatgaagaattccggtctctgaacattgtcctcaatacaacttctgtaaacagatgttcttaactttttcttctttgttgaaagataccttccaactctaaactttcatgattttcctgagtatttcctggccattcaagctttttccactctactaagctgtctagattttatccattttaccttgatgatccagattttgggcagttcaaaaatgagtagagagtaagggggaagagaactattcccactcccaacagataaatatcatgctcagtagacactctgtgtccagttttgttttctgctttttccatctgttccacccacttgcttacccatacataaaagcctttccttagtctcttgagaaaatatatagaaggaaagtttgcacagcagcaaaatagcctgaaatgtgctccagttctttttggttaacattattgtttagaccatatgacccaatttgcctcagacagtctcagtgtgtaattattaataaaactccttttcactctcaaaattgtccatgtgaataataaatgatacgaccaccataattatgggatctcagccacctgaagggtggggaaatattaataaatgtaacattaacacactacagaaaacatgtcttggctccctacaaatcatttaagtctggcccagtcttctccaccactcgttcatactcaccttatttctccatgagttccttaattagctgcaagcaagctcatcctcaggtcttccttatccttccactccaacatccacacatcatcccaaaatgtcctcactgctgtgcttgaagttttacattttatttccactgattagatatttttcttcctagccccatctcaatcgtggtttatgaatcaggccaacatcctcaaaaatgctgtccatgagcaccctgcctcattctgttcactctcctgttaacactccctcaattcttgtggtcactttattcaataataatagacagtttatttgcacatttctagttttgcaaagagatattctgcctccctttgtgaggtccttaaaagcaaacaccccattttctaattcttttgtattgtccaaagcaactattgttctgcccatggcagggtctataaatgctgattagatcacctacagtgggaaaggcagcaaaagacaaacactttttcataacaggcaatatttcaggattatagataataccttgtgggacagatgacctcctctctcaaattattttagtcccatagagcctctatctacaacctctcaaagaataaaaaatgcagtcaaaggtacagttgaatccaggtttgtgtcttgcaaagtggtcattaagatttttttctactgggattttccaagcagactgaatcctgataataccaccaatctagattctaccagttctagaagaattgaatattccttgctaattaccgctgcttttcctttatggaaaaaggaaagttttcttttatagttttttcccctgtttatcattgtttgccttattaatggccttttaaatctaggttctacagggtatttattcttgaagctggggctacactgtattattgatggaacattcccatgtgaattctaatactcccagaaggtactgcacaacaaatcctatttctgccaagatataaatagaagatttagaactatataagagggatggacagttcttgacattcaccactgcttctcaagagtgcataaaatataatagatgtacaaggaaatgcattttctgcctccacccccttttttcaattattaactttccagttgtcctgttaaataatttactaatttgcataaaagaaatatataatttgcaagccttacctcagagtggcaaccagccatcccagtttactagataacgtatttttctacctgatactcctcaaataaattgaattgcagtgtatctgctttttctttttttaagctaattaattcattgttgatctgtttgttagatctttttaaaatactcactggataaagcttgaaattttacaacaatgcccctgagacaattttagggaagtcctttgattattctaacttaacttcagtgtcatggaaaacagaattatatatccaagtgttctttcatattcagaacatccagtactcttccaagaagggaatgttcatgattatatacacatatatttattgactgtgttgctcagcttcttatctcaaggagagtcagtaactctttttcttgataaaaactaccatgtcagccaagcacggtggttcacacctgtaatcccagcactttgggaggctgaggtgggctgatttcttgagcccatgagctcaagaccagccaggacaacgtggtgaagccccgtttctacttaaaatacaaaaattagccaggcatggtggcgcgtgcctgtagtctcagctactcggagggctgaggtgggaggatcacttgagcccgggtggctgaggctgcagtgagctgagatcgtgccactgtactccagcctgggtgacagagtgagacactgcctaaataaaggaaaaaaaaaaaaaaaaaaaaaactaccacgtggcattatacaaagccaagatttcacaacatttttgaaaattccaaatgacttacatgtttacaaggaccaaaaactttttgatattttaaaataagctttatcctttttaaccaccatgcagcatgctgtgccatcatgatggaagcctgatggctaatgtgaaataatgttggcatgtcatttaaaaggttaacagacatgaaaattgggaagtttaatattgtttaatacaaataaaattgtttttgaaagaaaggcatctgtgttgagcgtggcttgcttgaaaacttctcctgtctatcatctctgaacattattttgctcctcttgactttactcaaggggcctaatcctacagtgattcaggaggtttgagaaagcaggactcatgagactaaaaattaggaaactactatcctgccagcaatgggacacctctttggctaccacctcacctaaaacttcattgaatcagaaaattagctgaactttccacaccagtctcctgcaattttaattcatagcatcctgtactaaatagctggggctttcaaaagcaggtgctacgtatatacagaaagaaatacataccttctgttgcctctcaaaatccgttatgctaaactcaccaaatacgttacatgttaaatgtttcattccttgtgtttttagatctccagttaccaatttgctatctatcctcctaccaaacattatttaaccaactcatatcctgattggtattacaattcttgtaaataaaagaatccttttctccctctttatttttaccaagtagacttctttcattgcaaataaacataaattacaatattttaaggctctttgacataagcatttgctttcttacctaagcaggtaatacttttgtatacctaccagacactaaagaagctaaatgtcaagagtgagtatttcagtaaaacctgtagaaattttaatgaaatgggacaggtttaaaaaaatgccaagaaaggaaaaggtggactccttacttttatatttcaagttttctattttgtatcaatatatgctgcattttctgattgaaattgctgttctgtctaatgaaacttgtgattttctgtagttgctttttacatttgaaagcaaactttcatactgtgtgtgcttaactgtaccccttctgttagggatttgattaaaatactctaaccgtttcattaattcctttttatgtgcttaatgtatgtgacatttatggctttgttatctcaaaagctatctgtggacaaaatccatgaagcctgttgactgtgatttatacacgtgaaagaaaaaaaccaatttcctcctaagcagtgaatcagtgaataagaaactgttcagtggcctctgattcctgacccttttacccttcatggccttttttctattcttaattattccttgagtaattgtgtgttcttgtaaaatgcaaaatcaatttacatgcaatcaggtatggacacaagaaatgcttgtgctctcgatttcaggactcacagataccataacagtcacgggactgtagttcactcagtattttttgttaataatgtggctttgctataaaataacttggtgtttcctttgctttggtactacaagattttaaatgttgcagcaaatgaaagaatgaaaacacatttgaaagctggtgtcaaaaatcatcagctgtacttataaaagttgttgtgcagcttctgaaatgtagtttattgctgtaaatatgtacaatttatgttagctcgtttattctgaaaacacaaataaaacttttttttaaattacaaatgcctacatataaaaagcttactttgtactacgttttaaaacatgcaagatttcaggcatatctttttataatccttaaaaatgtttagaattttgaatctatcatttgagaacttttattacaaaatttaatacaaagctacatccctttatttggaagaaattcatttcaggattactcaacaatcaaaaaaaaaaaaaaagataccagcacatttccaggagcttgtgtctgtaccactttgatttttttaaatattatttaagatgacaacatgccttacaaacacttaaacatatggtgtgtttatactagaaaagaagaaatgaacagtctccttgtattcaaaaataatgcctaaaactgacttattggcatccctttgtgaggtgtattatgtcaaacttctttgaaaatctccactgtaaatatgaatattagagttggcctatttgtcagactttcctaatttgaagacctccaacttccaaattaattctctcccttgagaaagaatgtgttgacaataaaacaatgaagagacc

SEQ ID NO: 1785 - DNA, 150 bp, Homo sapiens
atgccttaaacttatgagtaaggaaaataacgattcggggtgacgcccgaatcctcactgctaatgtgagacgaatttttgagcgggtaaaggtcgccctcaaggtgacccgcctactttgcgggatgcctgggagttgcgatctgcccg

SEQ ID NO: 1786 - DNA, 500 bp, Homo sapiens
ctcaaaaatgtcttagaaaatgaattattttataaaatgaaacccatttatagttcatgaaattagagatcagcaaatttgggtcatgttcaccttgggtacaggaaaagtattacacatgtcttacttgcatttctttttttttttgagatatggagtctcactctgtcacccaggctggagtacagtggtgcaatctcggctcactgcaagctctacctcctgggttcacgtcattctcctgcctcagcctctggagtagctgggactacaggcgcctgccatcacgcccgggaagcagctccacaactaccacatctccatgaattgagcggtttcgagccttcatcccgtggattaggatgtcactgactaaatctgtgtttggggcagcacagaaaaaacccataaagccaagggaatggcacaccagtgaggcattccgcgcatgatatactcgaagtctaatcagtactcctgcaagtaaagctttttctttt

SEQ ID NO: 1787 - DNA, 537 bp, Homo sapiens
gaacttttcactttcctgtcctttcaagcaacagaaatcaactagcaatcagagagtaacctacccatcctcttgggcaaaatttctttggttcatgaaatgctgcaaatattacacaattccatgtttcttctttttctaaagagggcagcaactgagtaggcattgaggttgagtgtaagaaaattctcccctactccataggtgctttcaggcatcatggctaatcagctagaggccacatttcccagtctcccttgaagcttgttgtggccatgtgatcagcttcttgtgaatgggagcttgagtagaacacatgactggttaactcttaaatcgtgctagacaaacctctccactgaagtactaatcaacttaaaatatcaacgtacccatggagccaaagcagcttggggagtcagaggaggtctcagggaaatagcgatgcttcaagagagttaaaggctataccagcctcttcccagagccacctttgcacaccttcatttgtgcacaaataaatctattatgattata

SEQ ID NO: 1788 - DNA, 1738 bp, Homo sapiens
gtgtcctgctcgctccatgttgccgcctctcccggtacctgctgctgctcccggggcttcgggaaatgcgagagtctgagccggggaggaggaacccgagcagcggcggcggcggccgcggcggcgggagccccccaagaggaggaccgggatccatgtgtctttcctggtgactaggatgtcgtcggaggagaacaagtgcgtggagcagccgcagccaccaccccccgaggagcctggagccccggccccgagccccccagccgcagacaaaagacctcggggccggcctcgcaaggcgcttcccctttccagagagccagaaagaaactatttggagttttcctggtcttactggatgtcactctcgtccttgccgacctaattttcactgacagcaaactttatattccttcggagtatcgttctatttctctagctattgccttattttttctcatggatgttcttcttcgagtatttgtagaaggctcatccacaccgctcagcacgaaggccttgttctcaggggcctgcttctcaatgaggcggatctgcttgaggttggcatggggcccaatgcccaccgggatcacgatgaccttcttcttcttcaggccctggacgtagcggacaaagttccgggacatccgttggggctcctggctggccatcaggagcagggcgatgcggaaggcttcagggcggtcgatcttgctgatgatttggaacagtgtgtatttcaaggcctcgctggtggaggccacctggctgcccgcatacttcacctggctggcaacgcgccgcagctctgacggtcgcttccggtccttgagcccgatgtaggcgtgggagccgtcgtggtactccaccacagccacgcggacccacttctaggagatgcgcagccgctccatcatgtccaccacaaaggccttcagcacttcaaactcagcctcggacagcctggaggagccatccagcaggaagatcaggtccagtagcctgctgcagtagaaatcgtgcaacagcggttctgagatgtcctccacatacagagtggtggggctcaccggggcatctgtgggaggtaccaccaggcctcccggctcctggcaggcttcacaggtgagggtgacaccatcacagtggctgcagaaaagagcgaagaaattaaaatggttcagaaagaacctatggacacttctgagccctacagtgtatgactacttccatattcccacagaatctcctctgttccacctgaacttgagatcccacggaccattccacacccaagtgagatgtcactgtttaacatctgtccccaaatagcatgcccccccacttcaaaacacacacatagccgacttcctttgattctagaaaccaaagctttagcccatcctaggatatgaaaaaatatactcgttgttctaggccatccacacagccactcaaagctgatttcttttcaacctacatctttagcaacatgaatacttaattataatctaagccttcttacaagtgtctccaagaacaaatgttactaaaatgtagacgctaacctgtgcttgtacatgttctgttgaagataaatgctttacagtacatattctaacagaatgtaaattgcatgagttttaaaacatgtttaatacgttgggccctaacgaagagagaaaaaattggagcaaaaacattgtggaaagatgaataaagattcaaaacccca

SEQ ID NO: 1789 - DNA, 633 bp, Homo sapiens
ccctccagtccggcgccggatcgcggttgcccagcgcgctgtgccctgccgggggcgggccacgtttgatctccgggcccgcagcaagggatcgcgaaggtattgatctaggcgctgctgtgaagggaatttgcagatgtaattggcctaaatcagttggctttaatatcaggaaattgtcctcagtgggcatggccatatggagcccttacaagggactgggctcttcctggtgaaaaagatttgaatcacgagagtggctgatatgagggaaattctttgctgttgccttcgaagacagaagaggtccacaaggcaaaggatgcagacagcctgtaggagctgagactggctcctggctgacagccagcaaggaaatgaggacctcagtcctccaatcatgaagcagactccgacttctgctaacaacctgaatacacttcaaagaggattctgagctccagccgcctacacattgatttcagctgttgggaccctcagccgagaacccagctatgccgtgcccagatgtaagacctacacatctgtgagcttgtaagtgtgtgttgctttaagccactaagtttgtggtaatatgtttcactgcaatatgaaactaatacttctgtgtgc

SEQ ID NO: 1790 - DNA, 11799 bp, Homo sapiens
ggacacctcgggggtttcctgctttatggcgaaggacacatatactcacagaaatgagttatttaaagaagacggtccagattccacagtccaaaaaaaaaagaggtttgccctgcttctgaaggagtcagggtatgaatgcagaggtcttcctgttggctcacatatcagatcttcaacgtcaacattaaatgcgagtgatgcttccccctctgtgaatgtggctttgggtatggctaatccacaccctgcactctggccttcagaagcccagggagagaagcctcccagaagcaaccttccagaaccttctccatcctcccaccgacctccccagcccctgtcctctctttgaatctcgttgtcaagttcttcccgcagacacctggctccttgaggggaggtgcagctttcatctgaccatgcaggcgtgctttgcagtgggtagagcagtgctttcctcctcccagctgcacactggaatcacctggagagtccagaaacttcccgcctcagtgaaagaacatcagtgtatcagcacagcaaatattccaaatgccaggctggattccctccaattaccaggacctccaggcttctcctcctttcaagaactttctgaccctggatccagtctaaatgttggttataaactcacctgacatccacagggcccttccaaaatactgtcaaggctgactgctggtgcctggaacctgcacaccctcctgggactctgcatctctgctggggctggtttctcctctgagccaccttaaggaatcccaccctgacccggtcagagctcaccatgcctccctctcctacttgctcagcattttgtgtctatctagactgaagcctttgctttctctctgtgattatggtgaaagttcagtttgctttcctatctctagaatgtcagcacgaaggcagaggcatggtctcctgagttccataaccccaaagcctaactccctgcctgccacactgaggggcttagtagacattgacttactaaattgaatagttgagtaataatgctctttgaaataatttggagttagatcttgagccttgtgtggccagaggatgggtgaggacacatcataaaaactaaaggtaactgagcatgccagtggttggggtgagaaatttgcatggagcactccagacacagaggcagcaaaacccaagtgctgggaagtcagagtgagagagtgaaggggcagtgagtgcttctttaggagctggatcaaaacctaagatgatctggccacatggtgcagactgagcacacacttgggagagaaatgggccaggaggagaggagagaggttcaccacaggacagtggatgactgggaatagaagccctccccatggtggaccaagaagtctgtgaagctgagagaaagacaaaagaaatcacgacttctgtaggtagctgggatggaaacctcaggggtgacagggtctttaaaggaaatctcaaggaaggcatcatgttctgggtgtgctccagggatgctgagtaagaaaagaccagcctttctgtgtgtgtctttactctgccacaaggcacctgggctcctaaatgaccaatacacatgtgctatactggtgccaagaaagaagggtgttttgtaggaaagtcaaggtgagaggaggtgcccaggacttggctcctttctttgaagggtgacggtgtaaattctccatgctggggatcctactgatggatggaggcatgtcgatctcatcatttcacagagtggggagctatggccacaacgtgcctatcacacaagtccagcctcacgtcagctggacaccagctgttctgacacttgtcagcacatggggcacccggaagttcatggtgttctgcaaagaacgccacaaaacagtgagctcaacttcttgaaagtcataatgtgttgctaagtccgatcccagatcctaaaaataatatgaggtagtggccattgaacagaaaaaatttacatcttaaacttgaagataagtacaagtgtacctttttctaccactgttgttcagttttattatattgacaagcacctctgcccaccctgtggggtaaaactgtttgaaagtgtttatgaaagttttatataaatattggttgatcaaatgtacaaaatatgcatgatggcaccatattgtgtataatagtgacaaatacagtctatgtgggtggagaaacaagctcggtgttgtgcatgcggctgtggtttgtgttcacacttctcctttagagtgtagtagacagaacatgcctgaactgcctggggctgaggggtctcaggcgcagagtggcccaggaattctgagcaaggacagaatgttagagagaatatcctgagctgagcagagaggcctgcccatgctagctggcagccacctgccttcagtgcttcattcttgggggaccttgaggccagttcttgagtggatgagtcctgccgctactgctgctgcccacttggtagctctgtcctcatctgggaagagccactgtgaaccccagagacctagtggtgctaggggctgatgcaggcaaatgactggctgcccctggatcttatgtgaaaacaagaatgctggaccaaaaggtctctacagggctccatgactacccatgacccgtaacttcagtgaggagctagtggccaggaggggctcatggttggacactggtattcctctactcagaccttaaaccacaggttgcaagaacagggaggtcacatgtcagtgacctcatgcctaaatagatgcatagcacagagcagattcctggatagcttacaccctactttccccagtgcatcgattatgacttcctttctagcaactgtgagtacagccgggactcatcaatcacacctgtaacttcccagctgcatttctcagggtctctgaaagcagggccttctctggtctttttaaattacccacagacctaggacagtcttctgcacatacttctacattttaaaggcttacttttagtatgtttatgtgtgtgagatggggaatattgtattcatgtgtgcatgtatatgtctgtgagtactgtggtctgtgtgtgtaactgggtatgactgtgtgtgtcatatggatacaggggactagaatgaggacagccaggtgtccaggctataagatctaaggaggcacttgctctcagggccaaccctgcccttgcgtgagcctgagagagagagcctcctggaattttgcaccttgagtgccttcctgcttcaccctaatccccccggttgtctgtatgtttggatgtgagtgttgtacatatgctgtgtatgtgtgtgcatgcatgtgagtgtgcatgggtgtgtgtctgtatgtctcagcagctgtcactgggcttcccagtccctgtcagcaggcgaaggaggccccttcatttccttgggtcctgcttatgcagcacaggccacagcaaaggctccctgggttgggtcagccctcactctaactcaacatgccctggaagtcaccacagggtcatggaaagagtcctggtgatgagatggagtgtctgctctgccacaagggctgtgggaccagggtcggggcatacctctctgggtctcagtttcctcactggtaagatgtggcaacagaatctcatctgtgagccccctctagccttgaacaactctggatccaggtagaccagcataatgaaagcctatgaagcttctgagatgtgcgaggcatacattgtcccaggtactcaagtaactcaagtctggaagctgcgagccacagagatcaagccttctccaaaaattggactgcaaggcatgccgtacaaacagagtgctaggagaccttggggaggtggggaagaggaagaggaatcatggacagcttcatggggaggtggctttggagctgggatgggtgaggacagctggaatgtgggcagcacgtgaccaagtgctttgcagacatggcatggcccccagccaggccctgaggaaaggagagtctcaggacagcagctatgtcactgtaagcaggacccttgaaagcaggtgccacctgcaaaagggggagccctgaggcccaggcaggcctgtcacagtgtggggcacctgtctagacagccccatggccagcagtgggggtgggccatgggccatggggaccttcctggtatggggtactgccatgtccccagggaatatggggggcccaggaaggtccccaaggctcgaaggacccaggtcttttcatactgccaaagagatgtaaggcctacagaggggaaagtttgcatatctgtgaaggcatggagcctaggcattggaagtgtccagtaagcattttcatttggcagaagtatctccatggcacttctacctacagccctgccacattttgccacaaactgtccagcagccctgagatggagccccagtgtagaccgtcatggagcacactggctctggaacaatgaggagcagactggagaaagccagatggggtttacctgtcaacagccacaacatagttgtgctggggtgactgttcaagaaaaatgaactttggtgctcctgccgaatgggttgttagtgttcagtccttttcctaccactgagttgttttgtctgatcattcttcctcctggttctgcgggtctgccttcttgaaagggaagagcaagactccagctccctgccctgtagaggtgccttctaccttgctcagtgttgaagcaaaggagcaaagcaaagcttaagtcagagatttggtgctcagctaatcacagagacttttaaatgtcaaccagggtttgctatcaggccaaagctggattattattacccaaagtagaaaattgtgagacagaggcaggtggggagggagggagagagaagaaagcagaaggtggaggatacgtggatttaattttttaaaaataaatatatgattccgtgtcaattaaaaacaagtaccccaggcaagtcttcctgcagtcctgtcttagccgcacacacagcataactgcaaacccacttgagctcatttttgctcaaagaccaactctattaaacccttagaatgttctggatttcaacacacagtccacagacagccattctatcaaaagcttagtgttttccctatgactgggttttctggtaaggtgaactaaggcatccttttccatttcaggctgtggtaacagcagataacagccgcagaggtcatagccagcactttctatgcgtcccttcatttaatcccagtactcctaggtggtagatctattattttgtccacatgaattattgaaaagtctgtcctaaattttaaatggaacgaagtactgggttgcaagttactggtggctgtttcacaggaaatactacgacaatgggactttgggaatgtgttctggagactccactccttggtgactactacatggagcacagaaaattgtcttgagtggcagctatgtgccaggtgaggagacaggttttactcacatgactccccagaagccctgcagcatccccatattttataaaggggaagtacaagcccagagagacatctgacttgactaagttcacacaaaaacagcaaggtctgggccaagatggaagcccgggctttgccttcttcttctgcctgcagggcaggggctttcatcctggcttcacgctgatttcaaaagcctctcattctcttgacacctcatggcccctgagtttatcccaagaataataagttctactgtcctcctggagatgccgaagaatcaaaactgcaacacacagagggcctgggtgtgcgcgaacactgtagtacacaccgatgacagcagattaagccatttctctcttaggtgcgtcacccaaccagctcctggacccttctgctgtgctgccctgacagtcacaatatgtcctagtggactaattagcactaactacccatgtcaccccaaggccatttaagaagacaaataaaaaagacaaaaccaatgagtattgtggctgaagatgacgaaaaaaagttaaaagcagggaggaatgaattattttttctttctcaatctctccctctgcttaaaccaaagagaggttttcatctgagagcccgggagctaagcagctactttctacatgaaaaagtgaaaacattaaaataaaatccctttctttcaagctaacgttctaaaactgaacctctgcagaggctccaaaagagaaatgccttgcttttaagcccctgagtgagagggatcctgaggaagtggcagaggggatgaacctaagctttgggacataacaaccggcacctccagtggccaccactcctagctatgctgcctgtggatggggcccccagtgctggcccctaacagcatggggaagcctccccagccactctgaagctgttcgcatcacatccaagatgaacctaggcagggaggctgagtgtgcttgggagatgccaagttagggaagtaagttccccagggtccttcaacttgtggtgcctgaggatagctgctttttttccagtgcagatggagacacggcagccttggggggatgtgtgaaagtaaggcctccctccctctgcctttccaagtggctgatcatctccttccttctcatagctacttctaggagaggcatccaggcaggaaccacttctccatttcacagatgggaagactgagaaccatactggaaaggggtgtattttaattaaactggagagtggggaacactgatgaggaaagcaagctgatagacggaaggctctgcctgtcactgccagcacgggcacttgggccttcttatcaagggttctgatgggagtttccactaggattccaggtgtcgatcatctagtagccgagttctgatgagctggactttgggtggttgaggtagggagcagtggaaaggggaattggagtcttatcaacctctttgaacaccagttccttcccctctcttctataaaaatgtcgtagcaatacctgcctggcagagttgtgagaattaaatgagatgatgaatacatctgctctcagcaccacaccacacctgtggcagtcctcagagagaagaatcacagctttcattcattgagagctcactaagtgccaggtatgctcagctcttgtgcagacgttctttttctttggatgtaaatgtgacatgggcagagcaggaggagctgtgaggctggcttggctgagccacagggattgctggcatcttatatggcattcaggactatggagggtccacgggaagaaacacagaaacagaacccaagtatccttcggggactcttggactttcttccccttgatcttagacatgcctcagtaaacagatgctggtttctatcgagactcattcctggggaaggacccccaccagccaagcaaggtaaagcccagactcagttacatgaattacaggtttaagacagaagccttcctatgaatatttttctggccagtggcttatataagagaaatttgctcattgtatttctatctggccaacgaaggggtctagaggggctttcagcaacccaaacagtcttgtcagccctaactctggacctaaggaaataattatgaatcctcaagatccatttaaaagtgtcattactgtagataaacaaagacgagtggatgcttcttcctactccacctcactgcagagattccatccatcccagggtcactgaccactgactggatgaactaggattggtgtggcagagtggagttttcaggagccaagagactcctggattgtcatgctctgtactccttccccacgaaaggaatgtctagaactcctgctgaaagtagtcattgcctgcatttcctaggcagaatgtgttagctccctccccagaagaacctgggcgaagaaggtgttccaatctgcatttggaaagaatccctcccgcaaagaactctacaccctctaagagaagataacgtgagggcatattctcctctcttagagggtgttttcaatactaaattctatctctgaagagaatgaggacccgaaggggggcagtgcaccaagttttcaactaaaacaaaagcaaaactaatctgcagtcttgaaggtgggctcattcattcccctgcccccactttttaaaacattttttttcttaaatgaaacagtttcttttatcttttggcttctcgtgtactcagaaccatagagctcaaagcttctcagctcaacggagaactcagcacttcttggactgataaatagagcagctttaaaatgcttagaactgaagacagaccaactgtggcgagagaaagtaaacacatccatgcaccagtcaaccctagcaagctcctcgctgagattacaaactgcagttcctgcctgagccggagaggatgctggagcaggctgggggaccagaaccacaaaccagccctggcttagctctggcttagctagctgtgccccagaagagctgggtcctcagggagtcttcttgcggcccggtttggatgttcctaagcatagaagactctgccagtgtgtccctcattcgtttcacatttggaaatgtaccaagagaagtgggaaccagctttactctttgatctagatgggaatcctttcctttgcattcaagctctctgtgtacaggtgtaacttgccagtgagagacttgggatttctcacaaaatagaatgtgataacgacataatttgatatgaatatttgaggaactttatctctggacaatatatactttaaacatccccctccccaagtcacacacacaaattgtttttatgagaaccaattaataaatgctaattcattgaggcatatcttcactaaattactgtttcatttaattgcagggaattttccattactaaactctcccttgctgatttttttttgcattatttatatactctttcaatttcactaatagtgaggttggtatgtgatattatctgatgtttgtacgtcttaaatttatttttcatttaaaatatttcctcattcttgcagctccacataatcagggagaaacatcaataaaagcaggcaagattttacaataaatggttgaaaaaggcactggctgaaattaacctgacaggaacgcgtcctgtgtgattgtgtttctctcattccagacgtgcgtgtgtgtgcgtgtgtgtgtgtctctactttgggttaatgtgggaatgctttcctatatcaataagtcacaagtcgatctgtgaaaagattgtgcatacaaaatggagatgaagatcacaggggctttaataataaaataaacataaacaacactcgaatctctttataaatcccagagcacaatgtgcgttttcttacttccttttcatggaccccagataaagactttgacagccagatatccaagatccggatcagccagcttcctaaaattctcctctttttttttaaggggtagaaaactgggggtatcccttggtggttaggggttgcttagagactgtggtagagatttggtgttaacaaaaatgtattttgaaagcaggatttcaattttcttatattgaatggcaaaggttccatgcacctggctatcttcatttctgaaatgaatgctttcattttattctctccagctaccttctccctttctttcctttccacccccattgcctcctttcagtgtctttctttttctccttattctttcactcctttctctctcacagcaaaatgttctggaggatgtgaatgattaaactgtttactccaaggtttaggtatgaaaaggcaagtcactgtaagtaaagtttcacctttatacccaactccatcaataattacagaacaaggatgactattagtaaatctttcttacaattggctcttacaaaaatgatttcattttttctgggcataccaagtttgacagattttacttttcacaaaaattatttacacagcagaggaacctgctccaaaatgaaggaagcatataaagggccgttgagtgtatccataggaaaatgaatacctataaaatgcatctcaataaattagagatttgaggccataaatagaacgttttgacatattatattagtagatgccctctaatttaaaccaaagtgtcccttagtaattaaaattccatgagattgattttttatttggtttccttcacttcctttgtcttcttcaacaaaattaggcagagtccttttgggggtagactgataaaattaattaactttccttccacccccaaaaagttccaaataaatgcttccaatagacatcaaaaaagtgtcaattagaaataattacttcttatcaatcagtggggcaattaaagtgacaaagcttaaaaagatacttatcttaaaactaattcacaaggtagctaaattatctcctaattaacttgcattgtggagggtgggggggaaccatcttgaaacaaagatgaattgatgaaccccaatacctctttatgttcctcaaagttgcttccatcccctgaaaccttattttcaacccaggcaggaaacctgggaagaaaacagatcctttccaaatgcatttattccactttcctcaattctaaaaccaagagttaggaatggggctttagatctcacatcagggaagttagagacatcgtcctctgccttgtcttattttaccacttgaatgaactattttcgggactggtgggagtgggctgcgacaagttatttaagataacttttaatgacagccagcctgcttgcttttacaaaactctcttcctcattggtacagtattgttttcacttttatatatatggggcatttatcgtttcttctgcatctttgaatttttttaaaaatgtttttgctttagagaatttcgtccctgatgcaacaaaaatagcgattttaaggaacgttcagcccatcgctgacctgcgcacgttaaaatgattcgcgttcaacattcctgcagaataaagctgtaggaaagacaacgttaagactctctgcaaggcaagaccagccaacgacgaggcgaccccgtggcaggctgggcggcggaggccgcgcggggaggttttctcgagcgtccccggttattgggaagggtgcgctcggcctcgctcccgcggaaagccgtgtggccgcctgcgtcccgggctctgctcacagaaaactcaaggggagctccctaagcacggccggtctcaggaacagaggtgcctggggaaaagggggaacctgctaaaacccgagagataatgggcttgtaaaaaccagaggggtccgcttatgagtttagctccggttatagacaacagtgtcaggtaagctgatcagaaagacagacggcctctccctcaggtttgccgagggagggttcagaaaagaaacagggagcgccttcagcagtctatgcggttataggccattttcttgttttattagcgtttaaattaaactatgagaagaaagtctcatcttccctccctcgccactttgtctatttgttttggaaagagggtagaagaagcccctctgtcttcccgaaaagaagaaaggggaaaaaaattacctggtaggtccaggggcagagggctccctcccaaaacccaagcgcgatttgcatccaagctagtgggaaagcgcgcatctcatcatctgggactgttcctgattaaaactacagtaaaaataaa

SEQ ID NO: 1791 - DNA, 572 bp, Homo sapiens
cgtttcccctccttgtgcttttctctcgtgtgccatgtgaagaaccttgcttcctctttgccttccaccatgattactcttaccagttgttttaattgctaagacaacccagttctgcatgagctacagccaacttcacaaagcttcaggtgcctggatgttgaggggcaaataggactgttcactgaaggagctagagaatggaagagaaggttgtgtcagatagaaataacagaagctttctgaaatgaaaacagaaatgttacaacttgcaccacagtactggactgaaacgaagatgtaacacagccataataatttaaattaatagcaaataaataaagaaaaaaagaacttcattgtgaggaccatagtcatgggatagctctgtcttttcggggaaagtggagtagagggacagagtcaccccaggagaaaaaatgcttaaattaagactccctgagagactgaataagagtatgattagttcagccttgctttcatcctccacttccccctcccactgtagacttcagttttaataatgattaaagaataatgcctgaatccca

SEQ ID NO: 1792 - DNA, 545 bp, Homo sapiens
ctctcgccccgtcgcgtttatcgaggagacaggtgaaaactgaggtttagagagggtaaataacttgcccaaaatctggaaaagtttgccaacccctggtcttactcctcattaaggtttcccttcctctccaccattcccaaatctgagtattccagaagagctactgtttttttaatgatatggtaaattaatttctaaagggattaaaatgaatacctacctgttgtaatgaaaataaatgtataacataaagcaatctgcaaaatagtaagtatacactcaaaatctgttagccattattaccattgttattatttttattttcagtccaaccaacactgatactgctgaactcctttttttttatggagtttatggcacatgtttaagttaattaattatgtaagatacatatatatatgtacacatggtaaggtggagcggttgtgataataccacaagctgcctgaaggggcagcccaccctagatcctttcctaactgaacaagattccaaaacaccagtacctctggtaagtggaa

SEQ ID NO: 1793 - DNA, 2319 bp, Homo sapiens
aagcaagaagggacttgccccattgcacaggaggggaaaccgggactgatgatgaagcagttaggctgcagctgctggatgtgtctcctgatccctgagacccactcctcccatgcatcctcagagtccctcaaaccccacatccagagccagacaggatgaagcgactaagacacagagcactgaagcaatctgcccctcagaagtcccccagaggcgcgtgaaccctgagctgccccccagactctgggtttccccttcttttccccaaacagccctagctccccccaggcactcgcgttgctcagacctttgtgatggactctgagtgttgtgtgtgcatttctctgtgtttgttcatgtacaagcgtgctcgtgtgtgtgtgtgtatagatgtacacatgtacatgggtgtgtctgggtgtgtgatttgtttgcatatttgtgtgtggggcacgcgcatgtatccttggctgcatttgtgggtgcgtgcataggtgtgcttgtgtgtgcatttgtatgtgtgcacacatgtgcgtgcatgtgcatggggggattgcatgcaggcatgtgtgtatccttgtgtgtttgtgtatgtgcatgtgtgtgtgtgcatgtgggaatttgcatgcatgcttgtgtgtgtttgtgtatgtgcatgtgtgtgtgtgcatgtgggaatttgcatgcattcttgtgtgtgtttgtgagtgtgtacacgtgcatgggcgtgtttgagtgtgtacatttgtgtgtgcacttatttgtgtgcatctgtgtgggggcatctgcatggatccttgtgtgcatttgtgtgtgtgcacacgtgtgcacgtgtgtgcattcatttgtgtatgtgtgtgggtgtgtgcatgtgggcatgcgtgtgtatctttgtgagcatgtacgtgtgtgtccttgtgtgcatgtctgtgcgtgtgcatacatgtgcgtgtgtgcatttatgcgtgtatacttgtgtgtgcacttgtatgtatgcacatatgtctggaggacatggccttgccccagggtctggggacccttccctgcctgccctgccctgccctgccctgccctgaagtctggggaacttggccctgctccggggtctggggaaccctgccctgggcccctgcctgccctgggcccctgcctgccctggcggctcaccttgctctcgggcctgctgaatggaatctgcagccgctccatggcctcgatcatggcccgcatggacacgaagatgttctggtagaccaggggccggaagcccttgcgctcctcctccgagtagccggcgccgtggatgatccgcatctgcttgatgaagatgagacacagaggaccagagaggtttagtgacttaatttgggtcacacagcaagtggaaccccaggggagtaaacttggggtcgtgtgagtccttcaccaacaaaatgggacacggccagtcgagctggggaaataaatgataatcctgttgccacccgcgacacagatttgatgactcagggatgggtcatcacccgaagcctgaagagctgcgtgagaaccccctctttgcaatccattgctgtcctgaagccacaaaggattctgggacctctccattgccccccgacccccagacatcccccagctcctggatagaaatggtgggagtgatctgttttaggatacccccaaaggccatgcggcccagacgggaagttcctgcttcctcctgggcacggaggaggacaggaggaagtggaaccggcagatgccaggaaggaactgggttaaccgtgccaagccccagtcatcacaaggcaactggagccagctatgtgcacagagtccagcaccaggccctcacaggaaacgcagctgctggggaagtggggagccaggccaggcagccgcaggggcaggaggctcggcctctcagtcccgctctggctcaaactagctgctgacccccaatcaatcctgctgcctccttgggcctcattttccccatctggcactggggttctgtggtgtttctgtcccccaaggcaggcgaacagggcagtcaggagcatggactttggaaccagaattctaggtgcgagtctcagctgtgtgaccttgggcaagtcgctctgcctctctgagcctcagtttatcctttgggggaaactaggagtgcctgcctcaaagtgctaagaacaggccgggcacaatggctcacatctctaatctcgtcactttggggaggccaaggcagatggatcacctgaggtcaggagttcgagaccagcctggctaacatggtgaaaccccgtctctact

SEQ ID NO: 1794 - DNA, 4951 bp, Homo sapiens
gcagcaagctttcgtcaccttcagagctctagcataatgataaaggagcactagtgacagccttgctgtatgcaccaagctccaccctgggcagtgcctttccctaatgtctgtcctggtgtgaaatggagacttgaagaccggtacccacatgtaagagaggttaacgaagggagggtggcagagagaggagtcatgtgaaggaaagctacctttagtcctccatcgcaatactgtccagtgtctccagcgtgctagaaactgtgctgaatgctgggcacatggcaggggtcaaagcagacagaaatccctgcctcatgaacccactttctattaggggagacagactagaaacacaaaaaggacattgaatagtacgattgagagatgagtgctatggagaaaaatccagccagaaagggagatgcagaagatagcaccagatcttctcaatgttgttttcatcatggacaggtgcgttccttagaagatgaagtgttagtgattcctgagtttttctcaccttcacgtcgattgatctgaatttggagagtctgttttctgtgtctggctctgcactcaactttgtaggggaccctgtcgaggtccccacactgtggcttcaggtagacagagcagatgggagcccatttcagttcattgtcttgctgaccaatggggaactgtggtcaggtgagaggaggcagcttttacaatcagacttcattgaatagtgtgggctgctgtttccttgtaacaaaaccccataatgatggcagtttccggatgtgtctttttaggacttcagaacttattatttgaatagaagtttaaagcatctggatgatgatgctgtagctaaaacagctgcttgtcagaagagaccctatttaacacttctaaacttgtttcagaggtggaggaaaggataatctgggaaggcctccctctcaagtccacaggttggtatcagctgtgttcatcccccaaaaggaaaataaaatgacaacaatattttggtcacagaattcctgagaaacctctgtttctatcttcatgtctttaagatagggacatgaattccccatgatctgggtgatagggttagggtggccaggacactgttactttgtgtgtgacacaggtggctcctcatgacagttcctccatgccttagaacatgttgtctgtctggtcatccctgggggtagagctgagtgacccagcagtgggagatttaacaactggagaagaagatgggatgtgtttaattatccccagaggtagggccaatttgtcaccctttaaatagacttatttgcatataaactaaagcaccttagggcatcattaccgaaagtgtctaagcaaatgtctgatatagttacgtgcctgcattaaaagaaagcagcccccttatcttgccttaatatccttacagtgttttaataagttcataatgcatcctgtatgtgcattttttggtataaaacaccgaaaggtggagaattgacttcagttctctccatcctttccccttaagtgttggtggcgctgcaggggcaacgtgcctcccattggaagtggtgacttcctctttgatagaggtttgcctgtctcttgaaaatgaaaagaagcggagattgatctctggagtcccatggtccagtttggactattgggaatattttttatgggatgttaaaaacaatattagagacgtgagatagtaaatttgtggtaataccggatccaggaagcttacagtgaagagtatgaacttaacctgaaaagtatttctctgttctataaatctctcagtgacatttggattaatcaagcataattaaatgtagttagatttttgtcagattgtagttcaaaataatattcatctatggagagggtaatatattatgtagaaattttattaagcactttagttaagcaaacactaaggagaacaaaatcaacctcaggaaggttaattactaaaaaaatcacaaagtatagtagattatgtaaatcattttaattttgaataccatggcttgagctttaatttacatagagacgtattttggatttgtttttcacattatattttctagtacaggattgcaattgcattcttgaaaagttctactcattttaggattccattaagtttgcttaacttttttcatgttataatttccaaaagcaaagaattacaattgtattctagctaattattttaatgtttcactaactttgtgtgtattgtaagaccatatttttatttctatacaaatgatgattttaagagaagtatcaggagagagaatgtatatgaaagcatcgcgtccacgcctggctttgcaataagtgttcatttaaaagaaagacatttacaaaggtaaaacataagagtttagactatagcgataaatctttttattttagtaatttctttaaagggaaaagtaaagagatcaaaatgattttatatgtattttttttgtactcagagaattacattttcactacccccgcctgtctcagggaatagcctttgataagaatcccatggagatctctggaactctattacagtgtgttcagatttgttagttcatatgtaaatttcagagctagagcttcaaaactagagtattgtaatctcaggaacataagattatccaagaagcctgaaccttgctcttttcatgataaatgacatccaaatttcctttgtctaggagataagcatagatcccttttatcatgcttctctgagattttcacagaacaaccctgcaatttgattttgtttgataattttgctttttggcttttcagtgaggactctattttccattggaactgactcctttggggataataagctttcacttaaaagaacattccattagatagttctaacttcaatgaacctaaaagtggcttcttaatttgaataatctggataacttttgcaaatgggtcaaaacagcacaagtatcaacaatcacgtatgtactgagtaatatttgccctccagttagcaaagtcaagaaatgtctaactctggcacacagcactggttttaactactctttagttcatctttgccttccaaattggttgaaaatggcaagcttagaatggaatgcatattaataacagaaccacttaatgttttaaaatattcataccttgagattctttttgagagaaaaaagaaatcttaacatccaattctagttgttttggcttttcacatatgctagacatgaaaaaggcagttacaaaagtgaaatccgattggaagtcagtggtgtccgccattgagccgtgctaaatgtcgtgtcacaaaaggagtttgtgaaaacaggatgagtagaaaatgttatactgttgtttctatcgtggcaccgctttcttataaattccatttgctttttgtcatctgaactgttacaaccatgggaaacctcagtccatatttttaaaagcactatatacttacaggaaaaaccgacttatgccttcattgaaaaaatgttgaagttaatatcccaaatgtttaatgagcatgttttagaatatttacagctaaagtctgtcactttagggatttgacaaaacttgagactgcctgccaccgaagagggaccaggcagaatcttctcagccttgtaaccagcgttaaaaaaatataaggggcttgatgagatcctagatctgctccttttctcctaggtgcctgggtaactcctggggaaagcatcatattaagtccttttcaagcaaggtgtgtgattttgaccaatgaattgagctgatatgtgattttgaccaatgaattgtgcatctatttaaaaattaccaagtgtatcttgactcttgagtggacagtcaaggcaaagtttacttaggaaatgtaaagtatggagtgttttaaaaaattcaaattgagtttattcactgttggaggaattgaattctattgcctccctcatttccattatgttcattgttacaattgtgctgctctgttctcattgtgatgcttagttctcgtgtagaactgagtgctacattgtgattagaaactggagttgtgcttgagtcagtcctggaaaacaggacccatttttaagaagaacggaacataccactttggcattctggctgaccctaatttctgcagagttccttggtgttaaaatcatttgaggtcatagttgctgcttatggtttatatacacaccatctgctgctctaagttcacatcctctcaaaagcatgcaagtgcttgaaatttaaatatttcccagatctaaaacaacttgtgactacctaagaaatgcttgaaccaaataagaaacagcactgtggaataaaatataccattgtgaacatatctgatgctgcaatgaaatgtaaagttccttactttgctgatttttcatcataactccttgactcataaaagcggtgtctaaactgggaacagctgctaatagggtaaaagtattatacatcaaataaaagttcattacaatatttgtactcataagtcaaaatctgacctggttcgctttgtgcctctgtcagcctacttacagtgataaatgtacacacaagtccagtgttgccaaggagctttgtttatagaaagaagcttggtcccctcagttctatgctgttgtgtggcctggttggtacatgccgtcatgatgaaggatgactttggtttgagataatttgtcactccacattccatggagaaaagtgtttcattttgatgttggaaaaacatgaccagagaagcatgtgactcagataatgttccccggaagttgcagagcaatctgtggtgtctgtcatagcccaactagtcctggagcacatggacaattctgtaccccaataatcagaacaataaaatggtagttgtgattca

SEQ ID NO: 1795 - DNA, 2930 bp, Homo sapiens
gtatttttaatagagatggggtttcaccatgttggttaggctggtctcgaactcctgacctcgtgatccgcccacctcagcctctcaaagcgctgggattacaggcatgagccaccatgcccagccctcaaatttactcttaatgctcagttaatataaaggattcctaacagtttacaatgtggttttcttgtttttgttgttgttttggttttttaagatgtgaggtctcaccttattggccaggctggtctcaagctcctttcctcaagcaatcctcccaccttggcctcccaaagagccacctgtccaatgatttatcctgtttcttaagaactgtctttaccttcttagacattttgtcataccattctagaagtcaaattccaagtgcagtgattttttttttccctagtccattatagttaatcttcttgttagtgatcaaataccaaaagagaaaagcacaaccagaaattttggctatttgctgcaagttgtaggtcttgggctctatactaagaacttgaaatttttaaattagtatccctgcctaggtgaaaagtttttaataaatgtgttgaaaatcaactttaaatccatttaatttagactggagtgggcgtgagaaactgcaagtctatttctacatataaggatatattattatattgtcccatcccaccactacctttttctcaatttctatttctttgtagttattttagtaaaagccatttggattctgagaagcactaattcttagctgtgataggtctatgcaagtaagacagaatcattaaatgaagctcactaaatgaagttctcatttctctccaacagactgtgctagcaaacttcgttttcttgattgtatttaaataatttagtatctcactacgataatagtttttaactggaagggtgtgatgtgttttttgttttttgttctcagagttgtcttctgagataattattaccaagtcatttgtggggttgtgtttttttcacatcatgtgacagaaattataactcataagatttaggcataatctggttttaaaaccttgattgaaactgttgttttttaacttagcaggcagcctaggccatggctgaaaagaaggggtaagtccttcattgcatgatgatgtgtgcaggttttcctgattttctaatttttatttttgaattcacatgtgtaatttcacatcaataacttgtgtttctgaaatatcctaactaacttgttaataaggaaagaaaccagatttgcttaaatctgttcaaggctgacattctgaaattctaaactggaaataacttcccagagtatttggaaaggttctaagtacaaggatcaggcctaaaatagctccttgggaaagaaatttcctttttgatgagaaaacttaaaatattgtttttggtaatgtaagcagttaaaaacatgactttagaaagacagcttaatgcgtattcaagcaaacctttgttttgttgcttttgcttttgtttgtagaagagagaggaagttattataccaaaaagtaatagtatatgtaactttgagtgaggctacttatatcttagaatgggtatccttgaactatatctaccccaccatggcttaaaaaaatcagtggtatatattgagaatgtcagtcatgagcttagtgtttaagtaacacatcccacttacagttgtttgcatgattagtcttgtgtatcatgatgttcaactttgcttttgctgtgccagttcaaaaatatcttttttgctaaaaactcttaaaattcatgacataagttttgttttgatcacccggttttatatagtatttctgggaccaaaaaatttaaatatacctttttaatataaaacagaagtttgaagctggaaagatagtgtttatggaagatttgtgtgcttttgtgttttttaaacccgtcaggctgctggtaaggcagtttctagggctcacttttcctccttacctcttgactagtgtagcatgtggtatgtttaaaatatttcattttctgctttgtaattctaaagtcaacactatactgtatgtagacaggagagctgatttgtatattttagttatttggtctaatcaagcataactaaagggacttcttttttgatacttttctcaaattaagtttaaatatagtatacgggccacatttcatgtctttgaaagtgttgtacattactgtaaaccaagtactctgtctacaccagagggtgctttaactgcaaaatatttgagaaacaattcagtctctcaaacattttggcacagttcatcactccagtttgttactttcttgagaatagtccattttttgtttttgttattgtaccgtatgttctggtcattggaaacagaacagctcatagttgggtgatgtaatataataacagtaatataacctagtagtcattttgcttcaagtaatttaattagatagcaaaatcactgcggtttgtttattacacttgtagggctttttatcttactcagtgaccatcactacgaatgtcttacattgaagcacagactgcagagcacttgttaacttagtcctcctgcataatgcactcgtgaaaagtagtgcttgctaggtgtttgaagattttatgatccgtgtgcttgggctcgttgagttatttgtaaaataaacatttagtttgagttgatgcagtaagttttttggactagtagtatccaggtccctactctactgaaaatataatcttcactatctccccttaactcagaggagatgtagcatttagaacaccttgagacatgacattgtaaaatagcttgttttatgttcctgaagctatcttgttctctgttaaagctactaattgtctcagtgtaagttttaaataaacatatttctttaaa

SEQ ID NO: 1796 - DNA, 498 bp, Homo sapiens
aataatgattcacttcagctctagagaaatgtatgaaggaagggaggaaaagagttgaaattcagaataagagtgtgattccattacctgaagaggcaaaagagcaggaggaaattggacaatctaggctacataatgttgaagtgtacagaaaaggaagctgagattgaaatactggagtgtgatgaatgaaacccagagaccaatgtcccaaacatagcccagtctgcatctcccacatgaaggaacccaaggaatggtcacgtttccatatatccccacttaagtgacatgagatggatgggtttccacaaggatcagctggaggagtttcacatccatctggcaaagctgcatgaagataagcctcgtgttttccagggaactgcattgctctacagaggcaatgccgaattattcaattgctttatgaatatttcctcccattaacctctctctgaaaatttgctgatacgcattaagtgtctcttaaccaaa

SEQ ID NO: 1797 - DNA, 2639 bp, Homo sapiens
gcaatctctctcccccactgcaaagccctgtagcaatgatcctttgttccatgctttaacaagtatcattgaataatgttttctttaacttaagttcagagttatcaaatgagttatgttccgagttgtcagatggtcttgaaccagagaaaaagagaagagctttttctccctgagaaacatcgatttggaatcacaactagaattccacctctggtacataacaacgtgagtcacaatgaaaagtcatagttggagattcctcatccggactgtagaaaaggtcatgtccctaactccagaatgccaatgataaaggcacacgtacaggcatgttagaaagatggagaagtcagaggaagatgtgcacaaagttaaatcgctctgccctttctactatcagatcatcaccaaacactcgtgggatcacactgagaaggatcatccaagtcaagagctgcagaagaaatggtgcacatattcaagagtctcacctttagcctttcctctacagcagaatcactatgctacattaatttccttctcatctgatgacttcttgagagctttttagtttctgcatctcctatttctagccaatgcaataaaccagctggcagattatccccttcacatccaatgaccaaatcatcacatctctccaagaggttcagaggtgggtgtttttatacagaacctgtcaccatggcagcttgactctcttcagtttctgaattaggaacagtgacctacttatatttctactacacccataatggaaacaggttagtaatatcttccaggacttgacattacggagcttccaggtggcaatgcagataaaggcaaagaatacacagagtccagggggctcactgggaagcgaagtccatggtctgaacacacacccccgatcacctttgctctatgccacgacgaagtcatcaggcttccccacctccagtccccaaaatacactcaaactactcagatgatggaggagcacaacccattgcctccttcacttactagaaggcagaaaatgcagaagaaaaaccatgttgccttttacagatatgacttaatctgcagttgggaaagagattaggtataactttggctttgtctactcatcccacttatacaacaaaccatgccagttttagacatttgttcagtgcaactggctttcggaaatgccagaaaattgattcttccctacccccgccaaagcatattgacttatcctttggcaatttaactcctaaatcattatcctcgactatgactaaaatatcacataaggtgattcaggaaccaaagctataacctcctatatttgccttccatccccagggccccctggaaggttctaagtctgagtttgtgtgcctcactcacttgcttgccttttgttacggcgacccattcaactgcatttatatacacataggatgaatattctgaacgtgcagtaattcatgcttggggaaaattattcaattatgggtcagtcatttcacaaatatagaggctaagccctgttacaccgtaatcaggtgtacatattatccaaggatctcataaacttccaagaggctggagatctgtttatttaatagttcacaaagcagttataatctcttccctcagttttgctaagggatccagactttctaactttccatataaagggacttgccatatgccgggcatttggcgctacccacttgtttctttctcaaagggttagattctttgggacagtatagtagacactatattgctccacccagacgtcctttttagggccaatacacccatccccagctgctgatggttcacaaggaaggtcctcagccagctgcaggacacagcctcacccaaagtgatacccccagaaggggtggccagttgccaggaattagctgatgtaggcaaacaaaagtccagccccttgctcaaatggggacagctctgaagaaccatccagcgctccccatagaagtggctggggtctcagacgcaaccacatttgccagtcagcttctcctctgcccaatcttgccttgttccttccttacaggtgtctcctgagagctcacccccaaaatccttcagcaccccactcctggtctcagagtctgcttctagggaacctaatttaagaccagcagcagttttctaagataactaatgcagagcattatttttctaattgtacgaggaagtcacaggctccttcagaggccctacaaaggctgataaccgtctttgaaaaatactcgtcatacagccactcagtttaaaaactacacatttttgatattcagctcagatcactttctgaacaccaacccagtcaacagggacaggagttaatgcacaggaatacagcaagttcacaagtaaaggcggcgagacctagcaaaggtagtgatttgcttgtcccaacatcatgtggcattgaaaactgccaccagagcaaaggaggccacatctggggttcccaaccttaaccatcagagtatggctgcccacaaaagacatatttactttataacctcaaatcctagcaaatcttcattctaaagctacccggcaagaacagttccacctaagtatgaaactgagtcctg

SEQ ID NO: 1798 - DNA, 1497 bp, Homo sapiens
ggatgtgctgggcctgaccagccgcccgctttcctcttctcttgcctctgcctgccccctggtggacagctggggtaaagcatgggagtgcgcctttggggtctcagtggggctgaaatacgactcctcccctaggacagcctgccttccccagccttgttctccggcaaagtcaatttcctggagaatcgaggctctgcctcagatgttcggagcctccgcaggatgaacacctccatttcaattccaggggctttgatcaacctgtgcctcccttgatccccaacttgtgggcaccttcccttgagcagtgcccccacgaggtacacctttcccgggaaacaaaaatcattccttctttgggtcctgcaagctgtaaagaaccaatacagcactgtgctactgaacatgttgccactatagaagccccttgtgttttgaagagtacatctctatagccattcgtttattcatcagaaaccagctagaagccaggccctgtgctgggcgctggagacatggaagaaactgggctgaggctcccgccttgaagagcttgtggcccagggaagggacagttcatctgtcattgattgccacgtgacagtgtctatgatgctaaaaagatgccagtgctgtgctgcaggagcaaaggccgtggaggaagaggctttggctttgttgcgagtccttgccagagccaggcaaagccagtcaccgctttgttcagatgactcaggtaaataaatgaggccgcacaggctgtcctgacaccacacacctctagaataccctggctgtgctgggagctattggtgtcagctgagtattttcatccctgtccaagtcacaatgatctgactgtaccagcctgtgtggatgttgctaagaggaggcagacagcaccatgagctcccttagatgacgatcggcatgatgttcctgctgtggcagcgctcagctcttgccaatgctcttctctgctttgctcactttaagcctcccttaatttttttgaagcccagtttccacattgctgattcacagatatgcaagactcaggcaggaaaaaaaaaagtgtctccttttccagacttcttagaggacttggaaagaaaatgaaatgacgttgaacgaaatcaaagtaaattgagtgatctgaaacgatttgatgtcagcaagaattccccatacagctcacagccctaccccgagcacgcctccctcttgggtatgctctctgcaggcccaaaccttgcagaagccattccatgtttcctgagcaggaaaagacaaactcagaccgacaaccttggacttcaaaagactgcacacaaggggaggaaggactgagagtaccaaggcgtgagaattcagaatgctgctatctcatttatttttaccatttaggaaacgttttgatctgcattccttttcccttccctgatttcaaaaaataaaaataaaaatgcttcggttctgaggagtaactctcca

SEQ ID NO: 1799 - DNA, 566 bp, Homo sapiens
ttgtggggcccgcttggatctccttgtccaaagggtctgggcgccggggctgcagtctctgggtgaggaggcggacgcgggaaacctgcttcggtctccatggttacgagccgctcagcgcgcaggagggggattcaaaggaaatacggaagctaaaaggaaactgctgaacagaaaacaatgtcaactaaaaatactacaagcaaaaaacatcactgagaatgaaggtgagaaaaagatgtcctcagaggaagcaaaaaataagagaatctgtacctatcagaaccactctaaaagaactaaaaaacgtctatcagaggaagtggaaatttgcagaacgaaatttggaaaataatgaaggaagagcaacagaaatgtggtctgttttgagacatgagttcggaaacttacactgtgtggagcctgacaatgaagccaacaatatggaaggcgggacgaagacatggagaaacattcctcccttgtgatgttgtttgagcccatgaatcagcctccctggagtcagtcccacatctcttccttgaactcgcctgagccatgacact

SEQ ID NO: 1800 - DNA, 894 bp, Homo sapiens
ggagactctaagacttctgaagagtttcttgcttctttcctgtggggcagtgactccacttcccagcagtaatggaatatcctgaattagctacattaatgttagaaccatttggacctcacccaggacttcaactacattatgagtaactcctggacgattggcacagaagaaggcacaaggcaaatacccatctctgtacaccctgtgctactgtgtcatgtgctgctccaggcaactccaatggattggccaccctggccaatgtgtgagttataaagcaatgatgtgtagctattgaacctacaatttggttaaagttaaactctcaagttttatatgtttacaagcatattgtccttttgttaatttcctcccagtactcatttcttgacttcttttagttttactatgtagtaatttttaaaatgttagtcaaagttagttaatttaattcacttagcagattttcctgtaattttggttaaacagtatcctttctgtacaggccctccaaacaccagcactgagtagaaagaggctctgattcatgaaatgtgaatttatgacagttgccactcttaaaaaaaaaaacaaacagacagaacttgagcaatacatgactgatgcattctcagcctgcttcctgtgttccatctgtctttctgccagtgcattcaccctccaggtttgaaagtagtcgggcaagaaagtactaaacatagagaaagggcaattccaaaagaacaaatgattgcttaatttaggctgacattacccagttgctgggggtatgggccatggggatgggccatgttcaccacttaggttgggcaaattcccaagatgccttttgacatagtaatgagggggaatacatcactcatgcccact

SEQ ID NO: 1801 - DNA, 488 bp, Homo sapiens
agaggtccctcagtgccagggcctcccctgtgtcgagggcggctcttagaatccatcctgggaaactcaccgtcagggcaacggaatgagaacaacttcatgagacttattttgactggatcatctgaggtcaggagttctagaccagcctggccaacatagtgaaaccccatctctactgaaaatacagaattagccgggcgtgcctgtaatctcagctacttgggaagctgaggcaggagaattgcttaaacctgggaggtggtggaggttgcagtgagccgagactgcgtctttgcactgcagcctgggcgacaagagcaaaacttcatcaaaaaaaaaaaaaaaaaaagaaaaaagaaaagaaagaagtgggtgcagaggctgggctacagaagaacacactgattcccatggctgaatactccttcgcacaagagcagagcctctgtgagggataaggactccttgaagatcacaggggtggt

SEQ ID NO: 1802 - DNA, 409 bp, Homo sapiens
gataacgctagggcatatccgcccgcctccagctgttcccgtggcaacgttcaggagcgttgcctcgacttccgaagaggctggaagtggcggcccagtggtttcctaggtcgagtagttcgctgggactcgcttccaagtggacccgggagaggcggtggtgtagaagaccaccctgagcctgggctttctcccgccaggagggtgcgagggccatctttgacctctgttaagcgccctaaggaggtaccgacggttgtgaccgcagtctctgacgtcttcagatgtcagtcctacaaagtcgggggtggaggtttccctccaggctgatcggacatgctcaaccgtttatttacctttgaatttggggagcagaactagccagggtgacactagtttctcccaataa

SEQ ID NO: 1803 - DNA, 605 bp, Homo sapiens
tgcccctgaaccccagaacaaccagctggatcaattctcataggagccacagcgcggagactgtgaaacatggttccaaaactgttcacttcccaaatttgtctgcttcttctgttggggcttctggctgtggagggctcactccatgtcaaacctccacagtttacctgggctcaggggtttgacgtccatcagtaggaaccagctccaatgcaccaatgcaatgcgggtaattaacaattatcaacggcgatggaaaaaccaaaatacttttcttcttgcaacttttgctaatgtagttaatgtttgtggtaacccaactataacctgccctcataacagaactctcaacaattgtcatcatagtggagtccaggtgcctttaatgtactgtaacctcacaactccaagtccacagaatatttcaaactgcaggtatgcgcagacaccagcaaacatgttctatatagttgcatgtgacaacagggatcaacgacgggaccctccacagtatccagtggttccagttcacctggataccatcatctaagctcctgtatcagcactcctcgtcatcactcatctgccaagctcctcaatcatag

SEQ ID NO: 1804 - DNA, 405 bp, Homo sapiens
ccgtttgtgagagaaaacctggtatctggcttctgacgtttcagtacaatcttctattgtgcatctggatgacatcactgttgtgtcctttgcagagatgtgcatacagggccctaactgtccaggagctgctacggacagagcccggtaatcccgacgacttagtggatcctgtgcctcccaagggtggcgcccacggtgactgcacacttgtcacagactggcaggccatttgtctgctgcagcccaccaaatcccacagatccttttggatcctttgcagcaggcttttcataccttgagtcttacttaatgttcacatgaaaaagcaactgctgtttgctgtgctcataaaagtcttgttagaaattaacaccttgtgtgaataaaaacatcaagtaagta

SEQ ID NO: 1805 - DNA, 580 bp, Homo sapiens
gcgctccggtactcgctgctcgcggctggccggctcgggattccgggctttcttcccgagaccgcgtcccccagctgggccgaaggtggacgctcaggggctggaggctcagcggaatcccctgcgttcagtagccccgctctcccctgtcccgaaggattactctgcccctcagcggttccagtgccctcaaagcaatctgtctctgaagtactggctatcttctgagcgtgtgccagaagatccagctttgttgaaaagcgaagccgttagtcccttaatacaaaggagacaaattgatttatgcctggggcaccatcaccaaaagaagaggaaatggatgcaagccttcccagaacaacaggcgtgccctgaattctttcttgggcgagatccacgaaccgtctcttggggtctggattgggacccctttccggtaacaagaagaagtgaaatgtgcacttatgagcctggatcttcagacacagagctgtgcctccttcacactctcttttcccttccctccatctagaatccatatacttttatcatattatgcagataatgacaatgcagagct

SEQ ID NO: 1806 - DNA, 2442 bp, Homo sapiens
aggatgctgcgaggcgttgccagcggagggaacctgccgccgcctcgtccccctccaccctcggagcccggccggggagtcgggcccgggccggggaggaggaagttgcggcccagctgggacagcagcaggtgggaagctccgcgcccggctgttgcggctgcctgattgcagcctggccttgggcaaagcttcctactccgtctggagccccacacacttcccggttcccccgctcttgggccgcttgccctgcgtgctcctcgaggggcctgcgaggtgccagcgccgggtagagacctttgccgcaggggcaggattgttcgtcggtcccggcgcgtctccctctccactccctctctgccggagcccctcggcccttcgaagccccccgcggaggctgcagcgcccggagaagccactgagtcaatggggcgagggactggggcgggcgcgcagagcccccaggattgagacgcgcgcaagtgcggccactgcagcgccgcttggctgtttgttctcccgactgttcgcgaattacttacaaggcgcctaggcttctccgaagggtggacggctcgttccctctcgccttgtccgccctcagtctctccaccaccgcccggcacgctttgctgatctaaaatcagaacaattagagagtaatgattttttttggaatagcaactcctacagacactcagatctgccctcgcttcagcgcctcccagccctccttcccagcagccaggcgagagcgcgcagacccctaaaaagcaacttcagtgttaaccgggtctggatcctggaactttataaactaatccgtgtgtgtgtgtgtgtgtgtgtgtgtaaaccgaagagtaagtgcctattatttctgagtacttcggtgtcctaacgaagctttgctcctaaaggacaggatatattttaggagtctttctttccactgagttttttaaatgtttattttctcgagcgatcaaatgtgtcttttgtgcagtttatttaaacctcgtaaggcctccttgagtcgctgaactaattcagcaaactagctggtattgtggacggcgcagtcggggtggatttttgtgtgtaggagaggtgaaactgacaattcaaggaaaggttctgtgcgagtccccacctcccatcctcatatccacacgtggcccctaggaggtgctggtgaaatatgcttgcttaggtttcgcagatccgcacttactcctgccttaacaagtgtgccttttttcttagcactgagcaaggtacttaaattaaaagggtgtgcaagagatgatgcactcggtgtggctgctctgatagccaaatggcgatgtggtcccagttaatgtgttgagattatactgttcaccaagccctgttacgaactctgttgccatgcacgtgggaataatgcctgccccaagggaggtcttctttaacatctatttagtcatgtgttatttataaacagcttgaattaatactgtaaaatagacggatgtctaagaatctaggctgtagcctaaagctaaatgaacctgagggtagacaagttcactctgtattaaccaaaggataatgaatgagttcaccgctcagttcaataagcttcttctgaaatatgcttcctcctggacttctaagaaacaggccaaaagtttaattatcccttaaaacatgttaagcctaaatagaaaaaggaaattaatcatttatagattttctcttctttattatgattcagttggtgcatctgtagatggctaagaattttccaaaccacgtgaattcagagaggcaacacttttgttgttgttgtttttccaggtaatgagctcgctttgaaaaccagtcactcggaaagggatggcatttttatgcaacttggattgaaatggttttgctttagtattctactctaattagaaagaatacaccacaggccgaaatagtttcatatgataggaaaatctttaaagaaaggaacacagagttattagattatggttggctgtataaatttagctgggcagcgggaggaaggtcataataaatgtatcctgctctctctcatcaattatcagcagcacatcccccaacattctctcctcccaaagactgaaggatgtgcagcaaagcttagatcttgaaggagaaggttcgggaaaaattaatgattttaattagaactttccaatctaagtagaatcattaccttaattagctaaataaggaagtatgaaggatgaaattttgcaaatgaaattttgtaaatgtatggtagcgtagaatacccccattgcttcattttaaaaaaagaaaatataaatgcattttaattaataaatgacttttcatcatgtccctattaggaaaattctgtgtgccaatgctttcagtgtttgatttaatacatcttttgaagtg

SEQ ID NO: 1807 - DNA, 456 bp, Homo sapiens
cacgcaaggggaacagccagcgcagaggccacggggttcaggaacagcaagaagatcggggacactgggtcctggaaggccctgagaagggaagtcgggaaggagggagcatccgggggcagatgagtaaagagtaaagaagccggaggacagtcgcagaaaaggtaatggaatggatacaaggccacgcttgcgcgtgaggggacaggaccaggttccagtctctaaatttaactcagcacagggccggggcgaacctgcgctggcggaacctgacaccgtggcccgagcgccaggcccttgccccggcgatgctgggtcggcctcggtcggaaaccgggagtggcgctggcagcatttgtgcgcccacctgtcgcggcccgtttcccgcggctgactgggtcaggctggggcggcctggagagtctgagggacgggggcgagggggagaggccg

SEQ ID NO: 1808 - DNA, 373 bp, Homo sapiens
agtggactcaaggacaatctcactttcacatccatctctttgtgataaaatgacaggcatttcaagagacaagaggcaggctgctgcccactcaaaagtacaattccacccatcaggcagagctcccaaattaaggatcatagcaattacacacaacaacagcatggaaaagaagccagtgctgcagaggtgatctggatccaggaagaaagggaagatgccttcaatcaaaaatacattatatataatataaattatacatattttatatctgtatatattatatatacatataaaaatatggggactgggcacagtggctcatgtctataatcccagcaccttgggaggctggggcaggaggatcacttga

SEQ ID NO: 1809 - DNA, 1477 bp, Homo sapiens
gagctattactaacttctccatttgattttttatggatgtgaaaaatgctgctacttgtctatgttattatgtggtatttgttctcttggattgaaatttatgcccacagatttttcttttcatttgaaaatgaatgtgaagatactgtttacagcttttgttaattgcacttttcatcactctgatcaatttcttgtaaagtgctatgggaattatttttcctgtgaatattaatgattttactactgcctccgaagttttaaaaaaggttctgtagacagaaaacagttgttgcaaccaaaaacaaccaaaaaaagaaaaaaagggaaaactggcttacctttctcagatgaattaaatgattttaataacttcccaattaccagggttataacattgctttcttcagttattaatacagtcaaattaattttaacaatataggcacaattcatttacaaattcagtacagtagtccagggctacatgtaagtggtctctttattttattctttacatcagaaaaatcatgaatgtcagttttgccagtattttacaatgaggcttatcgtttaaaattttatagtgtatgacatgtaaataaaccagtatttattgtaggttgtttgattcaggcatttcaaatggatataggttaatggcaatggaatcctatttatttggtagttggttttgtttgtttttgtttatttacttttgctatttgttttgtattgtctaaactttgcttcaactgaagacagtgtaaggagttgaaaatacaatcaacatagcaatggaaagcaatgcaaagagggtaaatcttgttttaatttttttaactttttttttttgtaaataaatagtactgtgatactttaggtgtgacctctattccacatgatagttagaaccagaaaaacacttttgctttctagttatactattggttcattgtaaatgcattaccaaaagacaatatgaaaaagagcaagattaagtttttctaacattgtccacttcaggggcaagcatgcttggtatagagctctagcttgtgtataccttaaactgtaacttgcaggtgtttttcagttgctgcactttttatttaatcttgctcagtcccagtaactatctcaaaggtaattgctggaatatgcattttgaaatacggtttaaaaaaaatctgtgtattgtttcatctaaaaagaaaagcactattggaaacactaaaaacgtgttaaactttgtagttattttgcattcctgtactttacaaactgtcatcacagcaaaaagtttaaaattaggtaatgaaatatttttgtaaataaataccgttaagctggtattttaaaaaatgtattataaattaattaatgtttctggaaaatgttcatatatatgtatatgaatgtctctttatgctgaagggctctgattgggcaaaataaaatactctaatctctcctg

SEQ ID NO: 1810 - DNA, 629 bp, Homo sapiens
gccctctgcatcccgtttctttctccaagagctgtttttctacgcgctcgagcctttgagctgtgtgtgcgggagaaaaagatgttaagaaagaggaagtagaggtcgggcacggtggctcacgcctgtaatctcagcactttgggaggccgagatgagcggatcacctgacgtcaggagttcgagaccagcctggccaacatagcaaaaccctgtctctactaaaaatacaaaaaaattagctgggcgtggtggcaggcgtctgtaatcccagctactcgggaggctgaggcaggagaatcacttgaacccgggaggcagatgttgcagggaaccaagattgcaccactgcactccggcctgggagataagagcgaaactgagtctcaaaaaaaaaaaaaaaaaaaaagaaagggaaaaaggaggaagtagaaactgcagaagacaaatctctgttttattctcagtgtaccatggaaaggacaatggaagttgctggccatgcctctgaaaacacaggcagctctgtgtcacattattgaggaagatgatattggatgtggctgatttcacatacaggagccttgtcctgggacatggaggagtgttgagggtggtcaccagattgc

SEQ ID NO: 1811 - DNA, 356 bp, Homo sapiens
aattatccaaataaattgcaagcattctatccaaatggagctctttctgagatgaagagaattctcaatgtcaagatttgaacaagaagagaatggaatacacaatatggacatccataaaaattcatcagagagcattttactactgagctgcaaagggaaaaacttaaaatggatatgaaaagtgaagaaagtgatcataggagaaaaccatttcagatgacaagagcacctcaaaggcagcagcctcaaggagcagccatggccccagacttgtcgcacggatgcagaaaacttaatggaggaggctgaggtcagaatgggaagagtttttaaaaaataaaaaggggagctaa

SEQ ID NO: 1812 - DNA, 384 bp, Homo sapiens
ggacagaggccagactgcaacttaagctatctggaatcttacctctgctgtcttactggctgtctacatggggctacattttaactatggcttacagaaatcattgcctgtcaacagcctccacccccacctccccacccccactcttgggaatggactctgacaaactcaccatcaggaaagttgatgtttcccatctaggatggaagaatgggattctgaactttgtcactgtttctgaaacgtcatcagctcctgtaattgcatggttgggacagatctatttaaattgctttgaagttttcccaggaaattcccacaaaattgtgcaacccaaggaattgaggtggaaaaaatggcactggcatcaatttgcttctcacc

SEQ ID NO: 1813 - DNA, 206 bp, Homo sapiens
ccagccaggatcccccaaagtgtgcagagggctcagcagagaacagtatgggaccccctcaccaggcctggaacacctccagccacaaagaagccaaagattaaactccttacagaagttaactctgcagactgagaagacgtgaacagagagagtcaaggggagtgatgactatttcagagacaggaaaggacagaagagatgac

SEQ ID NO: 1814 - DNA, 1059 bp, Homo sapiens
gtatggggaaagtttaaggcggaagagccctcgtttgtcggctgcttgggaagtctgaggattactgggactaacaggacttcagctggggcttcaacgtgtggtgtgggcttcctgacaccacggccactggtttccaagagtttcaacaatattttcatcatatttattgaaggcctcactgacagacttctcaaggcccctctaccttctattcgctgcctggccccaaagccagtgccacacattttaggtttttaactgcagcagcacctatgatgtttccaaaatctgtatcattaaagtttgatcagagaagcaaaaccaccttgagcaaaacaaggaatttattaaagagattaggatacacattgttatgaaagctgcaacctgctgcccctgtgtccagaagtgggcctgaagtcagcagggctggcaaatggatgtgcagtgggagagagtaggcgtgagctgcacctgcagggaggagatggaactcctgtggatggactgaaactgatgtcttccacgtcagcctctcaggcctccaacactccagcgctgatgatgaagatgacctgcagaggagctggtgcccttcaccatggaattgctcataaacccaagattcagtgaagctgaagaagcagttctggtgggagctggaggaactgcaggcacagctgctgccctgtaccaatacattgagccagtggctgcctggcattgtgtgtgagccaccacagcgcctggccctacacagactttgactgtaaatatgactgctgtttcacttctgccttccaaattttgctcagattttctgagaaacatagttcagcttaggtacattgacacagtacaaagccaccgcagtggctggttagggagggattatgaatgcaggctgagaatgcacgggaagcgtttgtctatttatagagtaggtaccattcaaggatttatgtgaatcaggtgcaaagaactcacacaaagatggggaaagttagtacttagaaatcagtgatactagataaccaataaataaaaataaactta

SEQ ID NO: 1815 - DNA, 774 bp, Homo sapiens
cctttgctgttctcaaggctggcactgaggttggtaaaagttccaagcagggctccaacaccggaacaaacctttctccaatccctgaagctgtacagctatactttaccggttacgtctagactataaaggaccacagtgttccacctcaggcaggttcagcgacctgcaagtagtgatacagctgggaaagttacagagcctgcgggaagctccggctgcaacttcagttctgaccagaggttctgtgaaccttcaggatttagcaggtttccaggaccggtgggtgaatctacccggggaagttttggtggacaagagctgctcgccagctgtcggagtgggagaggccagcgtgctggctccatccacttcacctaacacctctgaagtgtctgccctgcagtgtggcaagcgtggtgctgagcgcttctaaatccgtcgctttaaagatcattagtacaatgttgtgagagggttagctccatttgaaaattattttcccgtgattacaaaagaagcgatgctgactgcagaagttagaactgggagaagactcatcacccccatgatcatgtcaacaactgccctccttcagttttggtttgttttgtgtgtacactctgtcatctttccattgaggaaactcaggctagaagaaggataaaaacaaaacagaaaacaaaacaaaacaaaagtgccctgtagggtcctgtaggtcagtgtttctcacattttaatgtggttgcggttctgatacagtgggtctggggc

SEQ ID NO: 1816 - DNA, 2848 bp, Homo sapiens
atcaaaaagcacaccttgcatgtcattataggcttcatactggagagaaaccttacaagtgtaatgagtgtggcaagaccttcagtcagaagtcatcccttgtgggccatcgtagacttcataccggagaaaaaccttacaactgtcatgagtgtggcaagacctttgctcgaaattcatcccttctaattcataaggcaattcatactggagagaaaccttacaagtgtaatgaatgtggcaaggtttttaatcaacagtcaaaccttgcacaacatcagagagttcatactggagagaaaccttacaggtgtaatgagtgtggcaagaccttcagtcatatgtcatcctttgtataccattatagacttcatagtggagagaaaccttacaagtgcaatgagtgtggcaagaccttcagtcatatgtcatcctttgtatgccatcatagacttcatactggagaaaatccttataagtgcaatgagtgtggcaaagcctttagtgggcagtcatcacttattcatcatcaagcaatccatggtatagggaaactttacaaatgtaatgattctcacaaagtcctcagtaatgctacaagcattgcaaatcattagagaatccataatgaagagagatcttacaagtgtagtaaatgtggcagatatttcagacattgttcatagcttgcagttcatcagtgaactcatactggaaagaaacgttacaaatgtcatgattgcagcaaggtcttcagtcaagcttcatcttatgcaaaacacaggagaattcatatgggagagaacctcacaactgtgataattgtggcagtcatttttttttcttttttcagatgaagtcttactcttttgtccaggctggggtgcagtggcgtgatctcggctcacggcaacctccacctcccaggttcatacgattctccttcctagcctcctgagtagctgggactacaagcatgctccaccaagcctggctaatttttatgtttttagtagagacagggtttcaccatgttggcctggttgctctcaactcttgatcttgtgatccgcctgcctcggcctcccaaagtgctggtattacaggcatgagccaccacgcccagtgtggcaatgtctttactttacattcacaccgcattagacatcagggaatctatactggacagaaatcttacaaatggaataggtgtggcaatgtctttagtctgaggtcactccttgcagaacagtagaaaattcatttttgagataattgtcccaaatacaatgactatagaaaatgacaaactttaattgacattagagtcaattctgcattgactagagtttgagttgacttaacattgagttcaagcattaattgacataaaaagtgtttacgtcaagaagaatgggcagggtgcagttgctcacacctataatcccagcactttgggaggccaaggcaggcagatcacttgaggtcagcagtttgagaccagctgggccaacagacctgaaccagtttgcccagcctgttttttctttccttctttctttcttttcttttctttctttcttttttttttttttttttttgagacagagtctttctcttgtcgcccaagctggcgtgcaatggcacaatcttggttcactgcaacctccacctcctgcattcaagcaattctcttttctaagcctcccaagtagctgggatttcagatgtgtgccaccacaccacatagtccctctccacagagatggttgagaaggctgatggaaaagccagatacttgttctacagctttccctgacactagtatatcatccacatactggagcatagatatacactttgggatgctcatcttttctaacacctcctcaagaatttggccaaacaagttaggagaatctgtaaatccttggggtaagactgtccagcagtattgttgttttcacccagagtgagaatcttcccattcaaaagtgaatatatcctgactatcttcagctaaaggacatgcccagaaggcatctttcaggtctatttctgtaaaccactgatggtcatatggaattttgctgagaatagtatatggattgggaacaacaggatgagtggtttgaacagtttgattaatggcttgaagatcttctacaagtcagtatcaccaatctgactactttacaagtaatattggagtagtatagggagacatgcacagttcaagtagcccatctcagataaggctctcaattagaggttttaaacctaatctaccttctaagggaattggatattggtttcttttcactgtttccctgggagtttttaactttatgtgaattggaggaacttgtagcttccttcaatttccctcccttgaccactcattagcattgatgtagctttcttctgctgtagtaaacaggtttaatgaagtgaagaatccttctgggcttacacgcaagcctatacctaactttgccattaggccacttcctaacaagtttgtcccagccttaggaagtagcaaaaatttaacattggttgatcgggtttcaaatctgacttctgttttttctgagactttggctttaaatccttcccctttgactcctaaaacttgaagttcttctaataaacaatttatattagagggcacaaaacaaacagaggagtgggaagctcctgagtctattagaaaagtaataagttcggctgggtgccatggctcacacctgtagtcccagcactttgggaggccaaggtgggcggatcacctgaggtcgagagttcgagaccagcctgacccacatggagaaaccccatctttact

SEQ ID NO: 1817 - DNA, 246 bp, Homo sapiens
gggactacaggcgcccgccatcacgcccggctgctttttttgttttagtagagaggaggtttcaccgtgttagccaggatggtctcaatctcctgacctcgtgatccgcccgcctcggcctctcaaagtgctgggattacacgcgtgagccaccgcgcctggcctgaagaaagaagtcattaaagaagcaacccatggcaaaactagttattttcttaaaacagtaggaagaagaaaagctttttg

SEQ ID NO: 1818 - DNA, 2284 bp, Homo sapiens
tttgtctcaatgatctattaatgcactcaaaccacactaaattagctttgtcatctggtccaggttaggctgggcaattctgctggtttcatttaggctcacccaggcagctgaagacaccttggtgcagcatggtctaagttggccttgcctggcctggggtagctgccgttggctgagccgtacatctccagcaggctagcctgggctcctccattggatgcagccttcccagagcaagccacatgtgcaaccgcttcccaagccgctgcttacattgcatttgctgctgtcccattggctaaagcgggtcatgtgaccaagccggcggccaatgtaggagaggattacacaagaggggtgtggctcctgggcactcatggctgtaccaacctacgaccaattcccctgagcgccaggctgtttcctgcctctgcaccatcgcccaagctttccccttcgcttgttatgccctgctgggcgatctcctactcgggcaagtcacaagcttctctgtgtctcagcctcctcctctgtaaaatggggatcacatgagtttaagttattctgaggattaaacaagttaacacacaaacatttaaaacagtgtctagcacgcagtaggtcctccagagatgccagccatcaccatcacagtggtgattcttggtatgacgacccctgccctcttcaaagccccgtttaaggaatctcctctctgaagctgtctctggttctctccaggcaagcatcctcccccaggcctggccctataattatcttttcctcatccacctactccatctacagtaggatccagagggaagggaatcccagggcccagcccagggagtgcgaactatctgatttcctctgcaattagggaggcaagacagtcctcggtggccccatttgacagaggtgaaaactgccgctgtaggagatgtgctgatttgcccggggttgcgcagctggtaggtgggtgagctgggagtggagccaggttgggctgtagcagctgtgtttgccctgcctcactgtccagctcccacctgggccgggtgtcggggtctcaaagagaaggcagataccggctctgccgcacagagctcacagtttggtggaggaggaaggctcaagcagagagcaggaggtgtgagtagctctgtgggctgtgggggccagatgggtcctcgaccctgcggggtcagagctggctgcccagaagacatgaaatggaataagcagagtgacatgctctgggccacaaacagggtgtgtggccgccctgaacacatcactgcagccacctccacagccacagccctagccctgtgggtcatggggatgtgaccctccccactacctcccatcactgaggacacacctcctgggcctccagtaactacccaggcctccacacctgctacaccatgatggtgcagcccgcctccccaacgccttcagccctgtggaaattttctctggagattctaataccccggcctccttgaggtcagtgtctgcccagagcctcccggcaggagagaagaaaccccacagctctttagggaatgcctgcctgtccaaatggacaaagacaagctgtgcagaaacctcccctgggaggactgagccatcacctgaggaatgggagtctgtggaaacgtgagtcacctctgtgggaataaagcctttcatctggacatcgaaatggccaccagctccctgagtgactttgggcaagtcatgccccactccaagcctcagaaagccgacctgtgagatgaggatgaaagtaaccccctcatgggcctgccatcccaccaccatggcgcactccacctgaatgaccttgaggactgtgaccgttgctgtgtgcatctgtgctgcttcccgtttcattgctgagtggtgttcctgtaaatggatatgccactgtctgcttcttcactcaccagccccaggcaccccgccattctaccgactgtctctatgaatgtgactaccaggatcaaggaacttcataccagttgaaccatacagtatttgtccttttgtgactggcttatttcactgaacataatagcctgaaggtttatccatgttgtatgatgtgtcagaatttccttcctttttaaggctaaataatattctattgtgtgcagagatcaattgtctttatccattcatctgttaatgaacacttgggttggttccaccttttggttattatgaatagtactgtgatgaacatgagtgcaaatatatctgtttgaattcc

SEQ ID NO: 1819 - DNA, 2187 bp, Homo sapiens
catcagcccagcctgcaaggaggcgccaccggacctgcacactcaggagcagactcagctagattggaagagaggatgggaagacaatggatgacctacctgtggagagaaactacccattccagaacctcctctctgctgaaagctgaacactcaatgggaagacctgtttgcagagaggagccagccactccagggtctccgttctgctagaagctgaacactcgttgggacacccttgctgtggaaaggacatccttactgtggaaatgagctactaactgcaggagctgaggagctgcacagcaaggttaaaagagctgtaacacaaacagggctgcaacatgccccttgctccccacagggagagaagagctctggccctcggagaagcccagacctgggagctccttgagcccgggctgtgactccctctttggggccctggttggcgtcactgcattcgccagtgccactgttggaagctgcttgtgatgcgcctggtccagggggaagctgtttgttgtgtgcctggtccagccacctcatggagagcctgtgctggcacctggagctgcccaacctgggcagcagcttgtgtgtgtgactgcacagtggccacgcttgctcacacacccctagcacacccctctgctccacccgtctcaatctcccttggatccgggatccaggttggtagcaagtgcgagtgggcagaagcagcccagtgggcccagagcaaaactcaggcaaaggtgccactagactggccaggaaagcgacaccctaaagatcccataatgctgatatgttaattctattctataagcaccacacagaagtgatagcttttatttcttattttgtctagcctggagacagagctaaggattccttgaactgcaaagtcttttccagttcttagtttatacaatccatactcaccttctgcctaactaagcattgtcatttttgtgccaaatgaagagtaggactcctacgattgtcctcagactctcttggctcaatcctcctgctttaacctttcctacttcaaaaactcctgaagttttgcttccccttctatagaatggaaatatatgtcgcaatacttactgcaaagaaaattatatattttaaaaatagactaaagagatgttgtgagacatcagacatcaatcagatgttgtgagaactgatttctgcatcagaatatctccttgactttacagctatcctttaatcctggctcaaagttccagaagaaagatgatccaatataatactcctatttggactttgagtcatacacattccttcttctgagaaaacgtgcttctgcatgaatcctcccttcattattttcagctcatctattattgaatctgaaaccccaggttaactgactgatcactctcatcagtggcagattttggtgtaacataggacacatcactcccaattcaggtcaagtcccaattatcttgcctctcaatatgacatgttcaatgttgtatttcattctacttcattttaatgtaaaaagtcttttctggtgaagtcagtcttttattttctcataaaaattcaccctttgggtttttcatagggtattcccataaccaaacacactttacactttcctagtacataacccaatactttcttctttccccacagtccttacatgaagcctactcagaccgacatcactgtatcatttttttgtattctgaagtccttcagcacttgattcctttaagtttaatcttggtattctattgggaatcatatggaaatgtacaatgatatttattgaatgaacaggaaacagggaaagacattgaccagaaaaagtgtttattcatcaagtctttaaagatacaaaaacacgtgtcttctgtggagctctgagaacaggactccagcaaagcacttttcagccttgtggtcttcaagcatttccaagatctgtgacattggaaagaaaaaaaattaagacagatttgggtctccatgagcagagagtattctttcccttagttctgggtagcatagtgcccaaggaaacctaatcagtacagtgggaaaccaaatctattccaaatcattacccataagcaatcctatggactctctgaggtttgacagagtcagcggccctctccaataaatgtgtttttctat

SEQ ID NO: 1820 - DNA, 792 bp, Homo sapiens
tctggaaaataaatttactatattgactgaaataccactctttgtgtaggtatttgtcatatatttaagaaaaagctaaaaagaatggaaattgtatgacaataactcaagtctttctccaaagtgcatgcagtcttttgcgatacctcattcagccgagtatttgtgctcttcctcattcagtataaggcagctttcagtttgcttagaaggcaacattggaatgttagagttcatcagaaacatagaattttaaactgtgagttccactgaatacattttaatttctgtaggaagaatcaaaacacctatttaaagatggcaatatataataatcattttaaaagtatttgattaaacctgataattttccagaaatgaaaaaaaaaatcagctctaaaaccaaagctgattttagaaaatttgaaaatgtaaatcagccctatccataatatagtttctctaaaactttattttaaagagtcattttaaaataatataactattaaaaaatgtaactgctatcttaatgttctgaaataatttaaaacattttaaaatatgaatactgtagtataaaagaaagaaatggtgggaacgaaaagcagagaaagaaatgccaattccagtccaaagttttatttgccaagttttcttagaatgaattttaccagtttatgaattattgtaaacagaatgtgtcatggaaatactgaaagatttttccctagagtggccttattgactgctggtgtgatgccactgtaatgtaataaattattaaattgtttc

SEQ ID NO: 1821 - DNA, 557 bp, Homo sapiens
aacagtgaccttgccatcagagagaacctcatcaggaaggactttgagctcttaaggaagccacccctttggagaggctctacttggacccaccaaattccaatctgtaggaaaaaagctacagccaattttcaggccgcttccaaatactacatgagctagtttggtgtctaatgtaacagttgtacatgttttagtggctccacagttagacttgttggacactaaggaagccatctatcagagagttggggtaaaagctgacttggcagaagctgtctgatactgtgggtcatcctgaccttgagactgcgcaacgtgccctggcagattcagagtgtgtcctgctagaacccatgtgctggactcatttccagagagaatgagtgaaaattagcaagtaagatgactacattcattgcctgaatgctagaaagtgccgcatgcccccagattacatttgtggagtgaaggctttgatctctgcttcctacatgtgtctgcgaggattggtactatgagtgtgcctgcagcatgcattcattactgcatctgat

SEQ ID NO: 1822 - DNA, 541 bp, Homo sapiens
acagtgcattgtccctaaacgacccatacttgcctcactgacaccatgtggcccacttcccatctataatctatgtctgggtgtgaagcccttcccatatgatcccccgaatggaacttcacaagttcgaattcactgggtcacagtgtgatagcgtgaagatgggaggacgttaagggaaggctatgggtgagttgggaaatgtgttaggcagggtcagagattaccacatcctaaaaacaacacttaaggcgggagatgacaaaacaatcaatgaataacatgactttttccagtgaaagtgccatatctaatccttttccatttttgttctctgagcttctttcttagggaagatccttcttgagaagcccctgctgagtattaggaaaatgcatttcaggacctctcatcaacacaccctctttctttaccacaaccacatatatgggggcataactcaacatgtgtaaaagacaatcttctgcttttcactgaacctccaggaattcaggacaataaacctctacatgcagaccaa

SEQ ID NO: 1823 - DNA, 1798 bp, Homo sapiens
aaaacccctctgcttccagccgtcagtgagcgccaccctctccaggaacagatgtcctgcgttctaaatgaagagtgcagagcccacagcaaacaactgtccccagcagcccggatccctctgacatcagcccccaggaatgtgctgcagaccctctagcacgttcaggcctcccaggggataccctcccctcccctcctccatcccagtgtttcactggggacaggcctctgagctgcagacggaggcccacggagggtggaagacagcccaccccgctccagacctggagactggaggagtgactggagtgagtgaggcagccttgagtggagtggagcgggaagcctgcctgtgaaagaggcagctaggccaatagctggactgtaggaagaacacggagctggactgattcaaccaagagtcctaccgaccggtgctccccttgccaagagtgaaggcagatgccgtgggattctgccagctgctgagtacatctatttccatgatgctttccggaagtggggaaatagcacagaatgggtttcagatggacgtaagctaaaaacccataagcccccactttgatgttctgggtctcctagaattactgtcagctcagaaccagtggccagtagtccaaaagatctgattatttccttttctccaatgcacgctcatcctggtgaaaggtgtctttggagaactgggagaaagaatacagtatagatttctggcaggctacgagggtgcttccttgagggtacccagcctttccctcattcaagagcttccagtctgataaaactggctcaagtacgggaatggattgaggggtcatgactctactctgcttttatgatttgggatagacttttgtttgcttgacctagaagttttctgcttatacagattaagtacgaacttagtaggcttcctgtctatttcacttcgaggaacatcatgatcaaccagccaacaccacaggtctgcagcagtcagactgatttctgctttgactccactgtccaatagggtcagcacgtccaccttgcctttggtagtactacagccacggggcccccgccaccctggagccaattactccggtcgcattcaggttactggttcagtggctgctgttcctgctgtgaggtctggccttcagagaagagtgatcacagctcctcaaggaggctggagctcctttcatatatttacttctcaccatcaaggtgaaaggcatgtcttcaggagcttcccagcgtgggtgaggaggtcttaaagggaagccaaacatgccgcagaccacgcgggaattcttggccgtccagtgcttgtcacagatctgcttccaggtcttgccctccttcacctccacgtagccctccatcactggggtgcgcttgcggtaggttgagaggatggctcgaatccgaatgtcctccacctggatattcaggttctgggaagaaagaggcgtggaaggagagggttaccctactggcctggctgcagagacaccaggcaaccagtacttctttagcgactatgggccaggcctgccgcgggcctgcctgtgccctcaggccctgcagtgagctctgggcaaccccgaggggcacacggcccaagctgcagttagaaagcgctatgcatgggagatagtgaggctgaaaggacccaacagggagtggggtgacctggaacagtcagaaaagactcagagaccccatgggcttctcctacatccgaacctaagatcttggagagcaaagggcagcagcctcctcctgca

SEQ ID NO: 1824 - DNA, 1613 bp, Homo sapiens
tatacaacttgtgaggttatacttgttttcagctacttttctatagggattgtgggagatgggtgctgagaggggtgtttgcctgtgctgtggggatccccgttcttccagggtcttggcagcctcctgcaacaaacttgctggggcctgctgtgtgtacacactgtatcaggctgggtgtacctcgttaagcacataggtggtaaaataagtaccacggtaaaattatggcttagggctcagggtaaaattataaaaaaggaacagattacatcccactgtgggcaataagaaacactttctgcaggattctgagatgggcctggaagaatggatgatatttcaacagggggtaatgaggaaatgcagtttcggtgtgggcacctgaacggacaaaaggacaggtgtcatggaaaacaggttctgggaaacctgcatcacctaattcactggagagggataatagtgatgctataaatagcaaatgaagtcagttgggctcttatatgtgttgagcaccaccatccatctgaatagttgcttaagccagaaactggggagtggccccagctgcttcttccttcccttcatccagaaagttagcagttcctggattttcctcctctagaatgtccctcaaacctgtcctcttttgtcttttctcatgtctgccacacttgtcttagtcattagcgaaatatccacattttatacttctgttttgaaactgacggaattgtcccagaaaactgatgtttatggtttcttttaaataagtacagaaatttaccctcccagtcttaaatcttgagaaagttacatttatcttatctgagttcctttttcaggaaaccaatcatcagtcctcccagtcttaaatcttgagaaagttacatttatcttatctgagttcctttttcaggaaaccaaccatcagtcctcccagatagtatcaaggaactgaaactttccagatcacagcatcaggacagtgagacaccacacccctcacccaacatgattgcctagcccaccacctactgcctgttggctaactcctcttccttaccctttcctggtcttgttttcccacatgtcattacgtttctttcctgctgtgtaaatccttaattttagttggcttaggagatggatttgagactgatctcccattctcctctgccgcagtacccgaataaagcctggcaatactctttgtcctagtaattggcctcctgtgcggcagcagtgacacctatctgtaccatacctttgacgctttgggggcagttctgtgaaggtgggaaaattgattgtggaataaagtgatacatttggtttggggcatgtttctatcttattaatagtatatttttcctcatagagatgtctactacacagttagaaataaaggcctaagctgggcatcattgcccttgcctgcaatcccagctactaggtaggttgaggtggaaagatcgctcgaggccaggattttgagactgtagtgtgcaatgagcatgcctgtgaatagccactgcgctctagccgggcaataataatattaatatatagatgccctgtctttaaaaaaatatagaaaagaaaagaaa

SEQ ID NO: 1825 - DNA, 418 bp, Homo sapiens
acagttactgaagatagacagtagggggcggaagggcccacgcttctttgatattggtggctttggtttttcagtgacgggggacactttgacttcagttcctttttacgacttttggtagtgaagagataaagttcattacaaaacatgccaggcttaagcaattttccaaagggattaacgaattgcagtggccgcaggctatgtaaaaatttttaaaaggtggtgtctctcatattcttcagcataacttgggtcacagaaacccaggcataaaaattcattgtgaactcatattctaccatggcctgacactgactcaatcaccacaattgcaatcaaaagacggctttagttggaacctggaacgtgctaatcctgtcaggcagcctgtgattctggaagtgaaggaacaaaa

SEQ ID NO: 1826 - DNA, 4618 bp, Homo sapiens
ttatttttaatattatgttgtatttgatgtgctatcctattcatttagtataagcacatttttctttatgtcttcagcataattatatgctttttcagaattttaacatcaggactgcttccagggtagctttattgccctttgtcttaagtatggattatagttttcattctttgtatgtcaagtaattttggattgtaacttgaactttgaatatactgtagaaactctgaattctattttattcttctaaaacaatatttctcagcttcagcactactgacattttgaactgggtcattttgtttgtgttgttgtgtgtattttgggagggtactgttctatatgcattgtggggtactgagtattatcctttgtctccactcactacttaccagtagcataactctctctcctccccacatcccctgccaaaaaatgccttcagtcctttctaagcgctcttttttatggtgttggggccaaaatcatgcatctttactcactctttctcattgagagctatggctataaagggtagtgatacttttacttatttatttttaaggcaagcagttaacttagctggattcaaactccaggctgcctcgtgtgctgtgggaagcagcctacgctctattcagttcttttcttttcatattggttgggttactttgagtctggcctacatgatgggcagtttagaggtcaaccaaaggatttcagcagaacttatacacagaatttcattcaggcttcccgtgtctgattggctacagtgtgggaatttcctcccacttttcagccactactgaggatgcctttcggcaaaattccttgaaattggaaacttacagggaaattcctttcctccaagagtgcgctctcctccagtgttggcttgcttttggttgttctccgtggttttagatagctgtctttatattaattctggagtttacagttgatatctgttgggggcttagtttgataacatgtattcttctattactagtagccagacctgtatgtcttacttgacctgatggagaaaagtttcaacttatgagacaatactgtgctagctagttttactgatttgtactctaaagtacccaagcctaaaatagtagagctgtctatcccacatgaaacttctctgattttcactgttttttataaaaagtatacatgttcacatttctgtaggtttttttaagcatcacaatttttataaactttctatatttccaaggtctacctgctttgtattttgcctagtgagagttttgtattcatgtaggaataatctcttggtgtgagtatctattttccactcatccaaaacagatagagcattgatttcactaagcgttatgttctagtttgctttggtattattattagaaatacctggtgattaatttgagctaagtattcttctctaccctcattcccagcattatcacccgcttttaccacttccaaggggtggaagcattctccacaatgcattttttcatgccagagaaaaatctagaaaaaaatgaataaaacgaagaaattctttccccttggtatctgtagctaacttgcctaagtgttctttcccacagtttaagtcttcagtccatagttcataagcaaaggggtgtagcgagctctgatcttgccagaagagagaataagtgagctaccccacggtggacattctggccatctgaaatgagtcgatgcatgtggcttttgtctaaaggctacaaataaaatgtaaccactttcttctttgagtagttgatatagcaaatagttgaaacagaagttttgattggcaaatcaggatgtggtagatactttaacaaagagtagaactattaccagttttatgtgttgctgtttgtatctctttcacagttttgataatatcacatcctggaaagtgaaacagaaaattattattccattttaaatgactaaatttgctttcatggtatttacagtgaaagagtaaattagaaagtgaatggatgactgttcatgagaaaaagcagggtaaaaagattttatttaattaattgaaaatattagggtcaaaacataggcttatgttatgttttgtgaattgtgctgtgttgtagacatttgatgagtcctaacatagaattgatctagctcttgaaataccatttttgattgagtataaatgggatataggcaccttacaacttcagaattcgaggaagatgatgtgaatcttccaattttatctatttgattcaaatggtatgttttttcacatttctcataatttccacgtcaactcccatgatgatcatgcaggaaagcagcatgattgcacttcttgtagtgcataccatcactaaaacatagttactgtctttctgtggtcttaagaaaaattcagaaacagcataccaatgtacatataagataaataagcttatgtggtacagtaagtgttctgttctgagaaataccttgattcgtatcctaatgtctgatgttattggtagttctcaaacttccccaattctgctttcatctaaattcatcttatctatctattgttaaataatctatcagtccatttttatctatcatctatatatctgtctttatcaatcattcgtctgtaatctatctgtgccgtttggcataagagacagaagggcatagcagtggaaactcaaaggagttacctccatgtgaatggacagtggtgatggtgatctgtgaggtggtgatgtatagaaagaaaaactagaagagagcatgccctaactcagggaccttgtccagcaggcactctggccttgttatactgtgcttgaatatgaaaaaaaaaaaaatcaaaatagtgctgacattctttgtcttctgggtctgagaaaacttagagtagatatgatgactctgccatttcagtcttttgtatttccacatttagagctcagttttaattatgtagaattatttctccagcctgtgttaaactagaccatggattggcaaactttttttgtaaattgccaaatacacattttcagttctgaaagccttgtggtctttgttgcagctaatctactctgctgttgtgttatgaaagcagccataggtaatttataattgaatgagtgcgctgtgcctttcttccaataaaactttacaaaagcatcctgtgggctggagtttaccctttgggaaaccagagcattggctaaactggaacctgaaaaaataatcacatcaactcagccacatggtaataatatttagagtattatttcaacattttcattttcataaaaatttttttagctcttttgccaaattccatctgtgagtgatacaaatgactaccacgtgccattaacatcacctaaacagtgcaaaacaagcatagtagaagtaattggaatgatataaaccccttgctgtaatagttatagttgataaattatgtttcaaaattgaacctatttcttccaaatttcatctataaagttccaaggagttccaaaatcttgcctgccttcttttcccagttagcagtattgtctctgagcagccatggtggtatccatcctccttggacaatgaatttagcctattttgacttcatttgagcagttgtaattgtttcaccacatcagagtaagattactacatgccagagctattctttaactcagcttgtaaaaacatgatagcatcaacaatatacatagcaaatgaatgccatctttaatccaattaaatggtttttacaaatttgctcttgtttgttgatgctatctgcattgcagtaattaaaggtgaggtaaaaagaatgaataaactgccaagttaaaattaaatttgggcaatttctcttttgcagtaatgtatgtatatttactcaaaacatatgccaaatttagtgttgaaaggctcattcaaatcaattgggaaagcacgtaaatgaacaattcataaaagaaaagcattgcaaatggccaagagcatagaaaatgtgctcaatcttaccagtcattataaggaaataatgaaatttgtgtatatatgaaatacttaaaatatatataaaataaaacaattatttgccttttttcacctatcagattaacagattatatgtgttaacaaggtggggagaatttacaactcctgatatgttaaaatctttcaggaaggtagtagaaaatatatgtaagatggaaattagcacttttgaccaacaattttagttttagatatttacctataaggatataataggaggtgttcaaagatgcatgtaactcaatgtagtattaattataattgtaaaatagtaaataacatttttgtcaaatcataatgttaggaaaattagtgatggcacatttaaccaattgaattatattcagttctgaataccgtgatgcatgttcaaattaattgatacaaaaatccaacaactttagcagtttgtttaccagttattgagtaccaactgtgttcaacattgttatttcactcatatgaaatgataaatgtatgtgcgtgttatgatacggtcaataaaaccacttttataggaagaatactcacaaaa

SEQ ID NO: 1827 - DNA, 784 bp, Homo sapiens
aggaaaacagcctgttcatttcatggaaggacgttttggaaaaatagatccagacctacatagaaaggtatgacagctaccttaattcatccatcaagacctttcttcttaattgtgaattaccaactatagatcatcagagaatttaagaaaatcgacaaactaaatgcaaagaaacaagctaatgaaatagaacaaatgactaaaggaaacagaagtaattcaatgaacataagaaaacttaaaaaatattctaattacattctcagaaagatttgagtgcacactacatacattagaagagaaaaataaaggaaaatcagactgctatgaaaaccaagtttcccacttcatgctaaaaagtggtaacattgcatgtcagactgaagaaagacacctgagtctatgttgagttgtgtttggccccttgcaaggttgtcataaatgattcattgttttggcttaaggggctttcagctggatgacaaagcataaggacaaaaaatatgaaatttgtcattaaatgtcttcatcatttagcctgtttaattgtgctaagatcttttaagaaacaatgaatacagagatttccagattatacttccatgaaagcctaaatcttctcaggtattcacagtttaaaaaaattgaagtataccaaatgatatccaagtttactgtgaaagcaaatggcccataaaattttgcatttacatttgaattttaatctagagagaaggagaccacataagtaaaacacaatctatctcataggctgaagcgt

SEQ ID NO: 1828 - DNA, 581 bp, Homo sapiens
agactctccagccggccgctctggtgtggggagggagcgtcatctcaaggacactgaaaaagctgtttgccgttttgctgtttgcctccttgtcacgacctcagcgacggcagatggagccagtggagggagagagacagacggcaatgcttgggtagccagggctccctgccggccccactcctcctgcagacacgagcacgcacacacacacgcgcgcaaaacacacacgctgcccttcgccacacgtagccaagtaaaatacacaaaaagcaactgagataccattcgcacatgaccacatggaaacacacaaatgaacaaacgcattcaggcatagccacatgccagtcacacagatggatagacaagagcctggggtacaaagccacatggcacaaagccacctggatgtatatgcccctacacacgcacacagaaaaaaacatgcaaacttaagtacacacctatccagacaagtgtgagtgcacacacacacacactcacacactctacctgacacgttagtgcatccccattgggccccagtttctctcagcaaattcagatcacccagcctg

SEQ ID NO: 1829 - DNA, 2835 bp, Homo sapiens
tgcgaggaaagcaaagtctgggccatggagatgagcctagtcctgctgttcctgatccgcactgccctttttgcaccccagggagctgctgctgagccccacagtctttgttacaacctcacggtgctgtcccaggatggatctgtgcagtcagggtttctcgctgagggacatctggatggtcagctcttcctgctctgtgacaggcagaaaggcagggcagggccccggggacagtgggcagaagcagtcctgggagctgagacctgggacacagagactgaagacttgacagagaatgggcaggagctcaggaggaccctggctcatatcaagggccagaaaggaggaagaggagataaatatatgaaggtgctgtttggcacagaatttaatagggaagaaagagacagtataactcaccagtgctgggtctcatcatcctgcaatttcagaacaactatgaatacaaaaagaattttaaaatcccagtcctgcctagaaaggggaagtcatctctaaatatggtggccctggggcagctggcctccctgccaggcctcttccatgggggccctttctgcagtgactgtggtttcttcccattttactctgtcctgtgtcctgactgaagcgacaaggtgtgtctgcagctgtgctcacacctggaggaaacctcaatggtgacatgatgaccctagcagcacatcctctttcctgtgtcaagaagcatcgtccggggaggtgagaagaagacagtcctccctagaattgaagaaccagggagaaccagatgggctgggcagatcaagcacaaacctgagatccaactgtccctcttatgcgcctgggtttcttcactggacaccagtatgagtcaactttcctgtaaagcagaacaagcacgagattggaccatgttagaggaggaatggtgtcatctccacttctggagagatcactgtccccgtgtttgggggaaggaccaagcctcactcccatgcagagaagaagctctgactgtaactgcacctgtggagagtggagagacaagaagtgtgagctatttataaagctgagcacctgactgccacgggagtgatagtgaccacacacagcaagacctgggacatggcagtgactgtgtccagaactgacagaactaatctatcatattagaaatcaagaaagtgtctgctctagggttggggagggtgatttatgaccaagtagaacccaatggtgtttcctggaggctggaaatgctattccttgatgtggctgctatttacctgagtgttcactttgtgaaaatccacggcccacttatggtttgtccacctttctccatgcatgttgtccttcattcaagtatacatttctgatgttttgaaacaattctctctaagctaatatagaatctccattactgaaagtccttagaaatgctgcattggaaaaaattagtccaattattaaaaatctatgaaataaatgctgtgactcagacattaagaggagaatctacaacaagagcagtaggcttgggagctaacgcaagaacagctttggaaatggctgttgagccaggaactaggaatcaaaacccaaaaaggcccatgcaaggtggagggtgtgaaatgatgccccagtagtgcatgaatgaatgagtcatgggcagtggctcatgggttgcttggtcagtcaggaacttgagcaaaataaagttggaaaactgggggatggaagagagaggtatgcacagacctcttgacatgggcagagcttcagaagatggtggttgcaggtttccccaaatagagaacatcaataaaaaggtagaaattttacaaagagaccagataaaaagtttggagctgaaaagtgcaataactgaaatgaaaaattcactagaggggctccagagcaaatttcaccatgcagaatggagaatcagcaagcttgaagataagacaattgaaattctctagttcagtagcagaaagaaaaaaaattatgaagaaaaataaacagaactttaaagatctgtgagacaacatcaagcacatgcactttgggagtcctcaaagaaaggagagagagaaaggagaagaatgactatttaaagaataactccaaaccttccaaatttgatgaaaaacattattcatccaacaaacttgacaaattttaagcagcaaaaaaaattaaatttaaagaggtccacaccaagagaacattataatcaacctgtcaaaagccaatgacaaacagagcatattgaaatgaataacagagaaggaacttttcaggttcaatggatcctcaataagattgcagcccagttttcttcagaaaccatagagttcagaaggcattggaatgttgacaaatttagaggtcagaaaaaaaaagactgtcatgcaggaattgtgtgtctggaaaaactctccttcagaaataatggattttatatatatataaatatatatatatacacacatatatatacatatatatacatatatatgactatacatagtactacatatatataactatatatagtactactatgaaattatatatatagtactatatatagtagtcatactataaaagctagtagtaatatgtatatttttggtgtttatatgtgtgtgtgtgtgtgtgtgtgtgtgcatatatatatagtactatatatagtagtcctataaaagctagtagtaacatgtatatttttggtgtttaattcttcctttgtttttcctatttggtttaaaagaaaatgcccattgactaatgaatgaataaacaacatgtagtgtatttcta

SEQ ID NO: 1830 - DNA, 2447 bp, Homo sapiens
agtaactacagacgcgaagctcagcctctcggtttgggaattttcttggaggccgaggccctgcgcctctgtctgcacccaaggcgaccgcccagcttacccccggctcttctgagcacagggaggcctcccagcaaagcctgaaccctctaagtttagctgcaggcttcgaaccccgaccgtccccgccgagccttgggctgctgaggtggggatgaactgggcgaaagacacttgggagttaggaagaaacaaacaagcagggaagtgaccaggagacaagatgggcgtccacagaatgaatacaggaatgtctgtctgcctgtctgtgtatactctgtgaaggaatataccaacattacatgctgacccaaggatagccagtacgccttctgcaagaggaaagtttgtgtttcaaaatccatcaagtgaaagagaacagaaaaattcagagggcgtcattcacggtatcatttgaggatatgctgcagcaaaatgagtgaataaacaagaaagtcaaagacatgggattgaggaaacagtgacttcagcccaagattggaatgacagggagccccaggccactgggcagcagcacagacagcaatctgttcagactgcagcagaacagcaaactcctggagcaggtatgtgggagctgggaaaagacggttgcagagatggagtagtatccttgaggatatgaagctactcaaatatgtagtaaaggcaaatgatggggggaaaaaaggaaggcaattagaaactccaaaaaaattacacagaaaatgtaatctgggtcctgcaatcaactattttaatacaatcataataaatattttactgattttctatgtgtagatcaactgactacaaagaaaaactatgattacagaatacaaagtagatatttttaattctcagcaatacaaaagtacaagtgataaaaactgagaagcaaagtaggagttagagaagtagaagaaaaaattggggcactaatatcttcatttttaaaagtatcaagaggtggcgggggttccaagatggccgaataggaccagctccagtctacagctcccagtatgagcgacacagaagacgggtgacttctgcatttccaactgaggtaccgcattcatctcactggggcttgtcagacactgggtgcagcccacagagtgtgagccgaagcagggcgaggcatcgcctcacctgggaagcacaaggggtcaggaattccctttactagccaagggaagctgtggcagatggtacctggaaaatcgggacactcccaccctaatattgcgcttttccaacagccttaacaaacagcacaccaggagattatatcccgcgcctggctcagagggtcccatgcccacggagcctcgctcattgctagcacagcagtctgagatcaaactgcaaggcggcagtgaggctgggggaggggcatccgccattgctaaggcttgagtaggtaaacaaagcggcctggaagctcgaactgggtggagcccaccacagctcaaggaggcctgcctgcctctgtagactccacctctgggggcagggcatagctgaacaaaaggcagcagaaacttctgcagaattaaacatccctgtctgacagctttgaagacagtagtggttctcccagcacagtttgagatctgagaacagacagactacctcctcaagtggacccctgacccctgagtagcctaactggtaggcacctcccagtaggggccgactgacacctcatatggctgggtgcccctctgagacaaagcttccagaggaaggatcaggcagcaacattggccattctgcaatatttgctgttctgcagcctccactggtgatactcaggcaaacaaggtctggagtggacctacagcaaactccaacagacctgtagctgaaggtcctgttagaaggaaaactaacaaacagaaaggacatccacaccaaaaccccatctgtatgtcaccatcatcaaagaccaaaggtagataaaaccataaagatggggagaaactagagcagaaaagctgaaaattctaaaaatcagagcacctattctcctccaaagtaacgcagctcctcgccagcagcagaacaaagctggacagagaacaactttgacaagttgagagaagaaggcttcaaacgatcagtaataacaaacttctccgagctaaaggaggatgttcgaacccatcgcaaaaaagctaaaaacatgcaaaaaagagtagacgaatggctaactacaataaacagcatacagaagacctcaggtacccaatggagctgaaaaccatggcacgagaactatatgacacatgcacaagcttcagtagccgatttgatcaagtggaagaaagggtatcagtgattgtagatcaaatgaatgaaatgaagtgagaagagtttag

SEQ ID NO: 1831 - DNA, 568 bp, Homo sapiens
gaccccgagccaggcctgtcccaagtcctcccgggcccgccagcccgcggccccttaccttggcctggcatttccgatgacaggagaagctgcagactgcaagagggcgagacacagaaagaaagttttagccgcgaggctggagtgcaatggcgcaatctcggctcaccacaacctccgcctcccaggttcaagcaattctcctgcctcagcctcccaagtagctgggattacaggcacgcaccaccatgcccgggtaaggggctggctctcagcaccaggacctggcacagcatctgacccagaggacagctcagttcatgattgccagatggctgcacgcagcgcggaggagagccccctgggtctgaaatagaggctggagaggaggactgtgagtccagaggagggagagtgatggtatcccacacacaagccagcgtgtctaggactcctatctgaagacactgcagaggtgagtcctgagtgacagagactaagccatagaaagacagagagaaaaacagacaaaatgagaccgagtcagaggcagaaagccagagaggca

SEQ ID NO: 1832 - DNA, 356 bp, Homo sapiens
tgggcttgacaattataactctaggatgtttcatataccatacttggctacatctgttgtggaaaagagggatgatgtcatttttttcacctctttctgtaaatagaatttatgtagcacatgtgggcttcctcaagagaaatttaaaaccccaaattgatgggatggtgagacctaccacctctctcaagcatgtgtctctccaagtgacacacataagacactatttaaagcatgtactttggatgtgtgagccactgctcctggccttgcagtttttatagtataagttgtctcagtccgttttgtattgctgtaaagcaggggtccccaacccctgggcctattaggaatgg

SEQ ID NO: 1833 - DNA, 4059 bp, Homo sapiens
ggtgcaggagcgctcgagaaagcaggacgcggcgagcggttatgtaagcgcaccccccgcgcaccgccgcccggcttgtgcccgccaggcagcagcagccgcagccctaggagagagacgcgagaggccggagccgggggaaaagtcaaaagccccttcacgcacagcctgtgttaaccatgtacctcagtcccggcgcttcccccacaaactgagagcgacagggagaatttccgcacagtttcatccttggacacttcaggactgagcgggtgaggaggcgatctcgccagcctgctttatttttcggtggagaaggatgggctgagatgaaggcatttggggactcctacccctacccaccggcccccgccagcgcccttaggccccgagacggctggctgcaccagcctgacctctgctagggctgcagcctgagaccgcggcttgctctactgctggcgcagtttgacccttgggcttgtaccctgctccagcgggcttctcctttccactccggacacagcagtgagcagacccagccctcagcagaccccaagtggccttcttccccgttccagcttcaatagccaaccccactcccaccttccatccttctagagaggaaatggtgaaggggactccagagggaaggcgacatccatggtgccctccagtatacaaaggcagagacacagagccctcaggtagaacggggttccctagatggcatctcctacctccagagctcctgggtacccatcgagccccctaccttctgcctaagccagataggagtgacgatttttatactcagcgactttcggcctccttctgagagtgatgtcaggtcatcacccatagaagaaaggaagtgaaagaaaaagttcatgccttcttggagtgcagatgctcagagtgaaagaaacaacaagacttgagacagatgggtgccattgagcaaacccgaacatgcatgtctctctcatgtgagtgagtgcatgagactttattctccttatttccccagtgcagtgaaatctttctggataaaagaagtgggctaatggaaggagagacagaccaagtcccaatgacattgcctgaccattttcaccttcgccatcagcagtctccctcacagcattggtgtgggcaggtaagaagaaagcaaggccctgaaagaatatacattggaaaatgagcagtaatttgatactcttgtggaagagcatgactcttcgccccagaaaggccaatgacacctttactacagcgtaaagatcaaagccagggactgtgaaactgcctcatgatgtttctcccatgagacctgtgtctggatgtttatatggaacaaaacatggaacagaggcaatagtacttgatgtgtcttcagctggggctttggataaactaaactgatctatattcagggactaataattagggtgtgtggttagagcgcgtcctctctagggcctgttttggactgtggctgggccaccagcagtcctactgggcctttgcttcccccacaaattaaatatgttacaggggtggcaccaaggggtgacttgggaggcctttagtcccctctacctctctataatctccattagatcttctctgttatttgctattgatgcttttcagtttcatataggacgctataagaacacagcttcaaggcctcccttccgccacatactccctactaggcccctctacgtagtcactgcctctgggagtggctagagggagaagccataaactgggtcctttatgcagacattggatgctggatggagctgatttaccactggctcttagggacagacaagtgactcagcctaaggcagtttgaatttaagtttcctatcacaactagaaaagtcctgattaacacgcccagccctagtcaatgggctgattgagagatcgtcacatatcccaagaaaatctcacaagactgggaattttgtggatctgctggaaagagaagctgccagaagccccacgtgaaagggaactactgagagtgaagctaatgggaggaaaagtagagccaagccacggagggaaagacagatcaagttccaatgacattgcctgagttcctgaattcagtcatgcctgacatcatcctgacctctgcaggttttagctataggaatcagtaaattatgtcttacccaaggcagtttgaatttgggtttcctattacttgcaattagaaaagtcctaattaatacagtgggttttgcatctctgacttatgtggactatttcattttgaagtttaatggagattgatgaatcccgagctctttgtaaagaggggaaaactgaaatggtgaggtaaaataatgaattccccagacctgctcctccaaaatcaaaggagaaagtgatagttctgagtaatcagccaatcaattagtctttatcctagtatatactgaaaacctattgtgcacctttaaggtacacaaagtttaagacatgatttctcacctgttctatgtcccatctaattaggaaaaatgatttacaaactaatgaatagcaagacaaagagtagctaagagctaatgatgcgacacaggctataagcactgtaggagttcagacaggattgctgctccagtctctactcaaattgtatagaccaaaattgcaaacgcgtagctggcaggctgaaaatctggcttttctggcttcaaccttaaatttgtttttctaaaaaagacaggcatggtggtgctcacctgtagtcccagctactcaggagactgaagcagaaggatcatttgagcccaggagttcaagtctggcctaggcaacatagcaagacccccatctcaaaaaaataattgtagaaaaaaatatttttttaatatagcaaagatttcatataaaaaaatctagatttcaaacttctcttttaaaaatatcaaagtcaggcaacattgggcatatgtaatagtcaggataagctaggttttgctgcagtaacaaatatccccccaaactcattggcttaacaaaagaaaggctacttcccactcacacaagacaactgtggattgaggtgattctccagggcagctgtcttatagatgatgcctcagtatttataccttcatatcaacaagtgcatttacagccaccatggcagagaaaaagaagtagagagggccgaacactagcagtgaaatctttcctcctgaagtgacatacatcactttagcttacgtttcattggccaaagcaagtcacatggccatccttaatttcaaagatgcaaggaatctcagtcctcccatggaccatggaggagaaaggaaccagaaaatagcaaacaattaatatctgccacggcacgcgcttccttatggcaacaataggctggagcccattagaagctgccccttgaaatgggacttaaacacccagtttgacagtctccacccagcctgcctagcccttgggggcatttgattttgcaagtcctggtaaagataaagccaatctcaatatcagtctttcagatgtccctggtgatccgtggagttatcacacagttttcaaaaacaaatgttttgctctgcttgagacaaaaacttatgacatgcagaattcttacaatgaaaagcaggatggtatcatgaaatcaaacatgaagttgaaactagctgttattgtagtctgcaaattacataaacctgtttatggtgatttcttcctgttgctcttccctccatcaatcaaacacccaccaggagaaacaagcctcccaagctcttccctggagtggtagtgacttgggaaggggggcggggggatgtctaatttaacattttgaagcatttatatatatatatgaatatacatatatatagatgtgtgtgtctatataaatattcaaggctaaaatatttgagaagaaaacttgtgagctaggaatgggaaggcttctcttccaatgaccaccaatgagaatgttataaaatatgtctaaaggtttaagaataaatcagcatccatacaaatgca

SEQ ID NO: 1834 - DNA, 1417 bp, Homo sapiens
tgatgaatttgtgtgtgttgtggctgatgtgcattttggtgctttgtatgcaagtttaagaatatcttagcaataggaaaggaagatttatggcagtttaattaatgaatataatgaaggctaaaacttgtagataaatttataaggtgcttaagagctcttcaatttgttaatggaaagaaacaccatttacaccggatggctacaaagcaaccttattctgagagagaggatctcattctgtcacccaggctggagtgcatgatcatagctcactgcagcctcgacctcctgggctcaagtgatcctcctgctccagcctctcaagtagctaggactacagatcttttctcagaatagcagtctgtaggctgtcacctaaagtgtcctgttttcagtgctgcacctgctctgagcttcatctttttacgaagacgtcatggtgtgctatctgtactgggaaactttccccagcatcagccatctcctgaagataacattgtctgctagagattgtcatgtatgtggattgaatctctttatcttcatggatccagttgaaaatcaggcattgcatccagttatcatggctttaatcttaatgccttccctgcactgttttgggaatatcttaatactgctatttttgaagagtccagctcagttattctgcagaatgtctgttgatttggctttgctgtttcctcataagtagatccagattatacgtttttgttgatgttgggttcttctcagtgaatcacatccgatgatgtcagcacgaggcctgatcatttggtttaggtagctttcactagactttttcattgtaaaggtacctatcccttttctaattaataagtaatatgttgggtgatagtttgtgtgtgaatatccttttctccagtgacctttcatccaatggtttcagcattttaaatgatcctgggctgagtcagttttcagtggtggctgcagacttgtggttttccaattctttcatcacttttacatttattaattggcagtctatgacttcttatagccacataaagataattcaggaattatctgaacctatgaatgttaccttatttggaaaaagagtctttgcagatacaattcaattaagaatcttgagatgaggagattatcctggattatccaatgggccctaaatccaatgacaaatgtccttggcagagggagatttgagacaggagaagagaagacacgaaggagggaaggaagtgatgtgaccacagaggcagcgattggagtgatgtagtcacaagccaaggagcaccaacagccaccaggagctggaagagcccaagagtatatactaatacctggatttgggacttgggacttctggtctctagaagtaggaaagaataaacatctgttttttgtt

SEQ ID NO: 1835 - DNA, 207 bp, Homo sapiens
tccactattcaactcagtagagcattcataaatgccttgtggaaactctgaagccacccaacaacacactttgaggttatcttgattgctctaggggaagccagctggcatgggaagtagtgcagtggagaaatgcacatggccagagactaagaccaatcatttgaatgagtttggaagcatcctacccaccactgccaccagtca

SEQ ID NO: 1836 - DNA, 612 bp, Homo sapiens
gtaggcatcccgggggacaaacgctgggtcgtcctgagtcgctcccactcgccaggtcccataaccttgaagactgccagacttccccagccgaagcatcgcaccctggtgctcgagaacttggtcgaattttctcctctgtcagagaagagactggctggcagagcaaggggtcttgctgtgtccctcgggctggagtgcagtggcaccatcacagttcacttgcagcctcgacctccctgggttcaagccatcctcctgcctcagcctccagaggagctggactacagatatggagtcgcctaagctggagtgcagtgacatgatctcggctcactgtaacctctgtctcccggattcaagcaattctcctgcctcagcctctggagtagctgggattacagctgggtgcggtggctcaggactgtaattccagctacatgagaggattgcctgaggccaggagtttgagaccagcctgaacaacataatagactgggagctccatgaggtccgagacaacctgaagacgcccagctcagcagagactggctacggcaatcactcagtaactatttgttgaattggacataatagaagagctgaagaatt

SEQ ID NO: 1837 - DNA, 861 bp, Homo sapiens
cgctcgcgcctctccctccacacctctctgcaagctgagggagccggcttcggccttggccggcccagaaaggggctcccacagtgcagcggcgggctgaagggctcctcaagtgccgccaaagtgggagcccaggcagaggaggcgccgagagcgagcgagggctgtgagggctgccctcatgctgtcacctctcacctgggtctggagctgcagctgtgcccagaagtgtgggctcccgctggccttgtggagcgcacaactctggccacaccccccacttcagccagtttcttctcagcagccactccagagggaccacctctggcatcttaaatacattaccagctctgctccaagattttttctccctgggatcaggctggagtgcagtggcatgatcatagctcactgtaacccccaactcctgggctcaagcaattccctcctcagcctcctgagtggctagaacttcagggatgtgtcaccacacccaggtctaagtcatcagaaaagaacattagaacattctcacagagccttacaatctgaaaacccactgcctttcgaaaggatcaggcaagtggttggactaaattacattcccgctgacagtacgaatttggaatagagatgtacaaagacacgagggaaatgcttggaagctctcaagtgcggagaattctttgcacagactccctctctctgcacagatgaacaccatgagcttgctggaaggggttcaaagaacagcccacagcagcactcgagtttgctaaagtgactgacgttggcttcagtttggaatccaaaggcgacaactgacaaggaagagcggaagggaagggagaagtgagattt

SEQ ID NO: 1838 - DNA, 703 bp, Homo sapiens
atgttggaatttctgatgaatctgcagtcagcattttgcatgaactgtgtgtggattcattgcctacattggatgatgaagacttgagtgttgctactaagcagtgtgtccccaagaaagtgtcagagcctttacgtggaccttctcatgaaaaaggaaacagaatagtcaatggaaaaggaaaagggcctcctgcaaaacatccttccttgaagcctagcactgaagtggaagatcctgctgtgaaaggagcagtacaaagaaagtatgtacagacattgagagcagaacaaaccttaccagtggctttagaggaagagcaagaaaggtgtgaaagaagtgaaaagaagcaatcacaggtcaaagaaggaaataatacaaacaaaagtgaaaaaatacaactatcagaaaatgtatgtcatagtacatcttctgctgctgctgacagattaaccaaagaaagaaagattgggaaaacgtatcctcagcaatttcccaagaaactgaaggaaaagcatgatagatgcatcttaagacaagaaagtgaagaaaaaacaaatgttaatatgctgtgcaaaaaaatagagaagaattagaaaggaaagggaaacaatataagaaagaagttgaagcaaaacaacttgaaccaactattcaatcactagagatgaaaccgaagactacaagaaatactccaaatcag

SEQ ID NO: 1839 - DNA, 583 bp, Homo sapiens
atcccgcgtcgctgttgtcgctgttgcagccgagttcagccgggagcagagcgaaccgcaccggcccgagcggagcgccgcacgttcccaaccgcgaggccaggtggggtctcactctgttgcccaagctggagtgcagtggcacaatctcgcctcactgcaaccgccgcctcccaggcccaagcaattctcccacctcagccttctgagtagccaggaccgcaagtgtgcaacatcaagcctggacatctgactgttggtgtgagaccagtgctcctggtggtgtgccctgagccatggaggcgcctttgcagacagagatggtggagctggtgcccaatggcaaacactcagaggggctgctcccggtcatcacccccatggcaggcaaccagaggtcgaggaccctgcacggagctgtatggagggcaagagcttcctacagaaaagtcccagcaaggagccacacttcactgacttcgaggggaagacatcattcgggatgtcagtgttcaacctcagcaatgccatcatgggcagcggcatcctgggactcgcctatgccatggccaatacgggcatt

SEQ ID NO: 1840 - DNA, 75 bp, Homo sapiens
gtcagatgatttgaattgataagctgatgttctgtgaggtacaaaagttaatagcatgttagagttctgatggca

SEQ ID NO: 1841 - DNA, 803 bp, Homo sapiens
gtgagggtggctttgtgaggatggctttgtgtggctgcacattgcccttggccaagccccgctgccaggagaggcagctcggctgccaaacctcctgaacccaagttacctgagcaagcagccctatcccctcgcctgcttctcactgcctcgcctgccttgggcctgcccgacccagggggtcacatgccttgttccccatcagtggagaccagggacaagaagacagttctgtgggaagagccaggaggaccatttgggaaaatacaggttccaggtgtgtctccagaccttgagagttggtgtctcctgggaagaggccctgatgagatctggggagattcggatctgatgagattcaggaagccctggcctctccgtacttgaggagacgggacacacaggacaagctgcaggctggtgagcaggttcaccttctattttgaagacccgcttcttcctcaggtacctgatcttgaaaacgacctcccctttcaggtcttgcttcccctcaacccagacaccgactcgcccaagggtcttccagctggctgagttggaacctgcattttttaaccacaaggaaaagaagcccagagctaccaagaataatattttattgacttggaatgagttttggaatctgtatttttaacaagctgcccagtgaaaaccatttcctcctcgtcgtggcgcaggtccagaggctgcgcccatctctcccacgtcaacagtcctgtgtccttggcgaaggactgttctctcattcagtgcctttcctctcttcctgggccaaatccctg

SEQ ID NO: 1842 - DNA, 3620 bp, Homo sapiens
attattgtaccagggcccgccgaggcacgaggcactctattttgttttgtaatcacgacgactattatttttagtctgatcaatgggcacaatttctaagcagcgcagtggtggatgctcgcaaacttttgcgcaccgctggaaacccactaggttgagttgcaaaacgtaccgcgtagacgcccctggtggcgccgagagaagagctaggcctgcccagcacagagccggagagcgtcgggccttccggaagggtcgacgagatgagttcctacttgacctctgagccgaggtgggccggaaaccgaggcctaggccccgccggggctgcaaggaaaaggggaaactccgagcgtagcgtcttttccttgtggttcctttctccggcatcccggactgcgggccctgcagccacctggaccggcattcaaaggattctgcaagtccagcttcacagactggctttcccagacgctccgaagcccgcaccacgaacagaataaaggagagacgagagatcgcaactagatttgagaatcctcgttcttttccccaatcgttcgggcagtaaactccggagccggctacagcgcgcatcctcccttcctcctttcggagaactgtcgctttcccgaagctgctcccagctgggttttctcccgaagtttatttttctcattttgcaaaattcctgccctgattttaatactgcaacaggacagcagaggttcctctttaaaaagtcaaaacccaaaccaaaggggcccattgctgttgataatttttttcttcaccttctccttccgtttttaagaaagacacttccaaaactacccattgttttcctctcaaaagagaactcgctttaaaatgcatccctttctatttctctccggatatgtccccacctgacccggtggcaacttgtggggcgtgggggtagtgaaaaatagaagtgtggacggggctgggaaaatgaataagaattataacaatagaaatgatgacaaaactaaactttgaccaattcaatttgcaaaagaaagggttggtctgagggtgagacattccctggtttctcaagggggtcactttccctctcaccgagttaaatctggctctgttatattttttccaggaacacagtatgtctcttcccaatgttttattcggtttctggtttccccacttttgaccggaagtatgtgggaagaatactggctgttattattatgattattgagtgtccaatactctcctccaatatttccaccaagaattattatcgctgctctcctcattcatgttagtgttgctttgtgtgctttagatgacaatcgtcctctttactctccaagtttggagggtgagggttttttgttgtggtggtggtggttgggttcttctttgtttttgtttttttgtttttcctgttcggggtaatgaaatgagaactggaagagaggatatcatttcgaggcccagctgagaaggatcccaatgcgaaaaatttacacacttcaaagagcagaaaggtggaagcgagtggtgcttggacacaaggatgccactgttcttatctcctccaatttgggaagtgcccagcctagaaaggtgagggtcccatctgggagaccatggagtacccccagggtcacactgagcctaagaacttcaaccatcctgcaggtcaaaacccactgataggtctcccaaaatgtttggggtagggggaagaaacatagggcattccaggtctgtaaccctgcaagagagagactcaaactaatatgtctaggtctggggtgaaggtggggggcctgtctggatacctcctccctcaattgaagggctcgttggaaacataggaacccactgctctctgggactctggaaagacaaattttctttggcaaacggaacagtgtcgcgctgtcgacagagcagactatttttcttgttccctcacaaggtgggggtggggggaaagaaaaggaagcaagaaagaaagggaaattaaatccacacgtgttaagctcgctcaaagggccagagtcaaaaccagagatgaaacttcgactccagttctggctgcccgcgggcctctttccaaccagccaggcctcacagagcaaggcatccccactggagagaattcgatctgatgtttcataaagcgctttatttaaggagaaggggcatgggtctgtctccaagtctgtgctgcagaaatccagaatttgtagcggcaaagaaaacaaaggagataacaattgtaatcataatgaccctctttatgaaaactcatcttgatgtcctccaaatcaaaacaacaattcaggcaatattcaagcaatggccaaaatcatccaggccattaaatcatccaggccattgttttacaaaattcctaaggtctgatcaggctttcggacttgggcctagctgggtcaagagaacctgaaatgctgttgtcaagagactctgaaatcaccagtttaatcaggacagctaatctctacatccttgaggcctctcttttggggagagactttcttgagagaggacactacaggactcagctacagagctctgctatacatgggtgggagtggaggccgccaccccacctggaactgtgagtgaaaactctagtaatgatcttgaggaggtgaagggaggtaggtgggggtgtgggtgatgagggaggccaaaccccaatctggaaggatctgtcactgaaacaattgcttggtcgagacctctaatttttcttcctctccagccagtctcctgtggctccctggtgctgggtttctggcctttggtgacatcctaacagaagggtccggaagcagggaccccagacaccttgctccctctcccaaatcacacccaaaacatactggggtgaaacaactgacagagggtctctgtggtgagcaactgactgaagtttccagtggaaaagttcctgacgattgtttccgcagggaccttgaatttcctggtcaccatggcgacctggaagtcccaccgaatgctctcaacaatggggtaccccgaggacattcgtgcaattggctgcgcagtctgaggcctgaaaagcgtttctgccaatcgttcttgactttctggagcctccttagtgggttcaacggagcagggatttttaaaactgcccccttttttaaacaggggagaaaattgagatttagtaccaggtgggttcaggtcctgagcaaaagccccatctttgaattcagaatgctgaccccagggccgatcgtgtagagcctatggtgtatcttaatcgaaacccgtggcccaaacatctcagccaggaacctgggactttaggtgtcacttaatctcttcacacctgttaactacacctatctgcataggaggctccccacatcagtccaggcaacttttttctttgcctggggccatttcttctaaatggaaggagaaaagtctgagcattagaaattgtggcattaatgtctgcaagggctaatggagtgaaaagaatacattattctccttttcttcttagaaaaaaatttcaattgtggatgtaatagaaataccattaaaataatatttctgattgc

SEQ ID NO: 1843 - DNA, 2969 bp, Homo sapiens
tgtcgggtcccaaaatacgtggtctaaagtcctttgggctcctgccgctgccagcactgatcatatgctcttgaccctggtcgggtggggggatgtctggatacctcctctgtggaaagaactggccacacatccgcagaggtgactcgggctgagaacccaggctcctcctccctttggtgacacgcccctcggtccctcactggcacttctccctccggccacacggcggcgtctcgccatagcgcagcggccgatggtacagcccgctcccccctcgcgctctcggacagtgggtccttccacttgtagaaaagcattgtgggacggaagcctgtcctttcttccttttggtgcgagcttgctgtggtttttgctctgggtcctctgggatggcgcctggctgtggccgcgtggtctctcacgcaggggcgccgggcgggggaacgcggccaccctgagtctggtgagtcgactgcggcggcctgtgtccgaagtgtccggggccgtgaacaagggcagcggcctggcctcaggcctgcgttcccacgtttggaaacggggagcttcgtcgatttgtgtttacatcatcgactatgccagggagttctccagataagcctggttttattttcgtcagtgaaaaggccttaccgtataactgactttatgcttgccctgcccccgtataaaataacttaaaagcagcgtgcctggttacagctgtttccacgtgcggtgctcgtcgggagtgatcacctaccctacaggtggaagatggatgcctgaagtgtagactgctgctagctgaataccatctgggagcataaaggtgacctgaaggatgtccttggtgaggattttgaaaatttgatcttcacaagagttgcctggatcatttgaaatttctgggagtctgaggagtactgacataattacctgctggagtctgtaaatacacatttaagacagtgaggatgtgaataaatatattaatgcactttggcatttgtgttttaagtgattaactgccagaaacagctatttctaaaaagttataagggaggaggggttcttttttgatcagtattcactgctgtcaccataattaatagccttaaaatagcttgtgtttggcccaaagagaaatgtactttcttccagtgactcaaaaatcgtggctagaactagactgatttctagtgacaggtgtgctttactgcactcaatgcgtatttttcctccaactaaattgtacatttaatgttgccatatcttctgcctttgctttgcaggaaacgacaaataatgtatagaggtattcaaaaaatttattgaaagcactgtactaggagctgagaacacgatgatgagcacaacacagttcttccctttggaaacatagataagtggagggaatgtcatcacaaatgtaaaacttcactatgagatgagttccgtgataggattttcttagggaaacctgagaaagagttgagactaaaggtatgtgtcatatttttcacaaggcaaaactgggggaatgacatatacagaggcttgggctagaaaaaagataccgttagtccacttacttttgagacagttttggctgctttccctcttcagtgccctgttttagaactgagtccttactgaggcttgtaagatggctattatgggaggtgagagtgttacaaaatgaggctgaagaggtaggtaaagaagccagaccacttcaggctccctctggctttattaaagcaagataaatccatggtggaaaatcagatttgcaagaaaaggtagttgaactaggttgcttattgttgtctagacaagagaccagcttggactagtaaaattagtgaaataagatcgtttatagttggatgacagagccaactagacgtggtaatagtggaggtgtccataactgctaggtgtccagcttgcacactgatgagcataatgaccctagattcagctggggagcagcatttaaacagctgaatttttaaattacctttgagaaacccaaatggtctttttgcagtagcacattactcagtagtctaaactacagaaataaaccttaaggccatgggtataaatgagatctgctggtggtagaggaagagggcctagggtctgaagtttgagaaactccactaattaatggcaaggtaaagcatgataagccagaaaggatggtcagtggtaggagcaaaataggattatattaaagaagcaaaagaatgtcctaaaaattctccctgggattaagtaacacagtgattgatattagtggagtagagggaaagatccatgttagagatagcttaagatagggattagatgaattgagggcaatgactaaagatactgcttgcaagaaaactggctgagaatgagaggaaaatcttagttgcttggcgggagggggtttgtggttgtgaaagatagttttgtttaatcttagtcttaaatttaaaaccaagtagcaaggatctagctgagagaataattgaatacattaatataggaggacagacaaagatcctgaaaaggctgggagaagagcatccaaagcacaggtggagagacaaaaaggttagggctgctggcagctgtggagagaactgtacgtggtaagggggagatataagatgtcctgcataagtattttccctgtagattgcaaagtcatctatggagaggaaaggtacaaaatagtcactggggagagcaggtgaattagatggccaagcagggtggatggatcatttgaggtttggggtgacagatcaactgagatccacttacacttctgaaaacgcaagaacactttagaaattaacaacacttaaagctttttacatcatttgtaaataactggtggaacttaacaccacaaaataaagtattataaagaactttatatgaataaaaatatatgcagtctgaaa

SEQ ID NO: 1844 - DNA, 137 bp, Homo sapiens
atccaaggtgattccctctccaaggggacatcagtgcctctcaggaaagtagcagcttggaatagaatctggcatgcctaaggcctttggggaactgggatgcttatttcctctgccttccttggctgcccacatgg

SEQ ID NO: 1845 - DNA, 542 bp, Homo sapiens
gccgccgccgcagcctctgccccactcgtgagggatccgagggctccgtccttgtgctgtcttcgccccggctcccaggggtcaaacgagggtcgggggtggggacacgcagcctagccactgtcctgcctgggatccggtctcccccgccccccggctgcagggtggataaagaggaagatgtgaagaggaggcagacaaaagcaaaaggacatcctgtcagtaggaaacggccgaattacaattcagatgtgcaatgtttgcataagtaaactgacacgggactattatatgcagaaatccacgtgcaaaaattttcagacacacctttgtacctcttcctaatcctgccctggtaaaatggcggttatcagtgcaagtttgaggatacatacagctggaaaatggacatcaccaaactggactccagaaagttctgtctaggattttattagactgctttttttctcaatatacctgtattggaagattgagacaaaaaggcacaaactcacattaaataaacaaggtaatctaatcaa

SEQ ID NO: 1846 - DNA, 634 bp, Homo sapiens
aaagatcctggaaggtgccagcaagtgaggttaggtttcccactgtagatgtaatggaaacatggtttccccaccaacttcgaggcttgagagcattcagaaaaagtttggtcaaccttgtaggggaaccagcccgctataccacccgcgggttctccccttcccagtggagacgagggaatgagaaaagaaataaagacaaacacacaaagttcaagagttaacaaaagtgggtccaggggtccatcgcaatgtggaaactgcgacagccctgagctctggattccactgatatttactgaataatccttaaagtccaactaattggttaacagaacaggacgtgaaagcagacagcccgtcagaccacaggcctgtgcatcaaaggagcggtccactccaagcaccatcagcagggcagcagagctctctgcctctgggaacgagcgagagatagaagactttccccttatcctcagaggacttctcctcttttacaagcaacctcctgctgttcccttctggggaatggagcaggggtcgcttcccttcccacaagacctttgttcagggactcaagtgggaggttgagcaataagcaagctttcttgcttagaggctccgcacacttcct

SEQ ID NO: 1847 - DNA, 436 bp, Homo sapiens
cccggcctcttcggggacgcacggttggaagttgtaccgtgacgtgatggtcagatcggatgatagaattttgaaacctccccagcattaaggcaagaaaggtgtctctgttttttccgaagtgtgcctgcttgactcctttgatttttctctgggattcttcatcctccatcaagttgatcgatccctctggatcttggtcagtttcctgacatctctatgaagttcagtgacccagactgagtccacgtctcaaataaggttctgactaatgcagagtctaacagaaagattactgaacatgtcatgcactattaataactcctgttatcgaggatttttttttcacaataggaatgaacagagttctgactcactctaggtttgtggtaaattgcagatcactttctgctttatttagcgggagtccctgttg

SEQ ID NO: 1848 - DNA, 854 bp, Homo sapiens
gcaaacctttcattggagaacagtcttcccccacaccatcccatagaaatactgttcactatatctggttcaggaggactgactctcccaactcctttctccaggagtggatacatgatccaggactggccagaattctacatcaagcagcccgtaggcacggaggagaatacaaattagaggatcagccagcaaacttgatgggtgatgagaactgttcaagacaaccctgaagatgttgcttatttgataaggttgctggtgctgctgctactgaagatagaacaacagttaagctttctgtgtatgtgtgtgttttccatctgtttttctttgtaatcagtcggtataaaagtgagcagtgaagaatcggggggaaataaatgtactttttaaacatgttaaatttggaaaatatctagagctcagaagaaaagtgtaaacttaagttagagatttgagagttagtgaagctctaagaggggcagagtgtaaaggtgagggcaacaagtatatgtgcacacacaatcacacacatacaccggtggcaggcaaagaaagattaaatcccttcttagcaaaacttcaattctgagaagatttttcctatctgaatttgttgaacaatattagagattttttttttctaaccacttcataaataataaaactgagcaacagagaggatgggtggctgacttgttaaggaactcctaattagtgctaaagagtcttaaaacctaggtttctgggctcccaattccaggttccttggaagtcaagagaagacaaaaacatacgatcatttactttatccctaacttcacttgaataaaacattccataagattaag

SEQ ID NO: 1849 - DNA, 2586 bp, Homo sapiens
gcgcccgccccgcgcgcccctgtactccccgcgccgctcctcggggtcccgcggcgctcgcaggccgcgccgccctgccgcccctctctcgtggcttttacggcccgcccgcccctcagcagccctggggtgcccggggcggccctgcaagcgggagagagcggcgaggcggcggcgccgagtgcggggggatgcggagccgtgcccggccctgtcgcatccctcggccgcccgcccgcgcccggccccgcccggccttgcccgggctgcacgcacttctcccgcggcccagaatccacttgaccctgctgggcgctcccgcgggcggcggacccgggtgggtgcgggggaattccccggccgcccaggcgcggggagagtgagctgtgccgcccgcagcagcgccccaaacaaaccgtttaaggtctctggagcccgcaagttcagcgaaataaagcggcggcgcggaggaaacctcttccacccggacctgctctccgttgcggtttggcctccagtggtggtcccacccaccctctagctggccagccctggaaaccaacctcctttctttttatttctcaccgggaagggggacaaactggcctctgggtgtcgacttcaaacttgccgcccgtctccggtctggaaaggcaggtgatcagctagaagggtgataagagtatcatcgtggctcctaaagagtaataataatctccctcattgtaaagacagctcttccccctggcttacttttttagacatgctgagaagcgcatgtctccatcagggccctacctctgcttctccacagttggcctagaaccggaagcccctccaaggccccctgactctcctgacctcttggccacagctccggattctcaccagggattccccagaattcctagagagcagctcagagccctgcagttgtgcctcaccacgcgaaccaaacctcgcactccccgccaaaagggagtcccttccagcactctcccctttgttcctttttctgggcaagaaccgctgactggggctgccagaaatgtaaaccctgggtgcaagtgacgggatccctccagcgtcaagccgaagagtcatcctctcacctcacccacctccgaatgaggattaacaaactcaattcaggacacaggtagaagaccaaaaggccaatgagacttctttcctatttgagatcggatttgagaatgctcagcctggctcccttcttcccccagctctgaatcaatcctttcttcattagcatccataactaatgtgcaaaatgtaaaacgctaaattaagacagagttggcatcaacatagtctgagaaaatgaaattgttattttacaagctgataactctcagccctcaaaaacccctctcattagctgaaggtagcaagtagcaagaagattaggtaaaaacatagagaatatgaatataggaaaaagtacaggtgtgaagggctggctgcccaaatcccaatgcacagtgtatttggaaaaagaaaaaaaagaaaaagaaaatctgtctttctaatatccccttagcatacgccttgttggaaatgtttgctttggcgaaagtgagatcgagacattgagacagcattcccaggaacaaaggctgggggtggagggtggaggagggagcaggaacagcccctgtctggaagaactgcaagttctgaggcctgaacaagaaatgtgtcctgttcccgtgctcctggctgcagctgggaagcttcttcagaaaggagacctcccggccctcaccgggatctggctttccttcccttcccaccacatctgtttatacaaaggagggccgctgaaggacaaacataaccgtgtttactgcgagtcccatgctgggcctggagctcagatacagatttgccctcaccatggaggctgaagataaatagatgatcccagaaaaggaaagagggaaggccctgggatggtatagagctggttgaggggtttactcatgaaaggcctctcccaaaaagccatgtagtaacgggcagatttacgtttgaatttaaactctggtgccttgtgttaatatatgagagtgtgtgcacctaaagcaattgcaaggcgggtatttaaaaatgtttctttaggaatagccatgattttctgtttggggcctctaacatggggatagttggattgattatttccagtgttatgttttcatgtaatagtgtcttggagaatgaggacttttgaggaaacccaaatagtagttgcagatcctgttttttactaagctgtcatggagataaatccaaaatagtttttacaagtaaaatgtagaacagttagtgagagcctttatgggagatctttattatttatctggtttatgaagatgttcctattatcctccagcctctgggtatgcaaaccaaaacaagcacttaatctagttgtcaaaattttaactccttaatacaaagcaaaaaaagggtttggacttttggggattagaatgtcagaactaaaagggaacttttttatgtaaaagagaaagagactctctaaaaataaaaatgttagagtga

SEQ ID NO: 1850 - DNA, 581 bp, Homo sapiens
actgagactaaggtagaaaaagacacttccaaagggtgtcaatgacaagagagaaatagacatagagtggtcacttcatttaccaaccctggaaccgcagacctctgggcttcctggctctaggaatgcagtgcaagacaggcaaggttcttgctcatacagagcttctagaaacctgggatacagagatgcaatcaagtgataaaacacatggatgaaggctctgccattgaacacatggttcttgacaagcccacagagaggcacagctaagccagccctggggagccagggagggttccctggagggagagaagctggatccaggtctgaaagatgacttgaagtcagccatgagcaaggaagagattttccaggccaagcgaacagcctataaagaaaatgggtacggccaagaccatagacctagtgattgtcagatgaacaattagacccacagaaccatccaagctacagaggacgcattctgccttcccttggatcctgtggtttgaggatggaggtctaggaccgtggcaggctttttgtcccatgagggaaggccatggagctgaggaagg

SEQ ID NO: 1851 - DNA, 522 bp, Homo sapiens
aactacagacgcgaagctcagcctctcggtttgggaattttcttggaggccgaggccctgcgcctctgtctgcacccaaggcgaccgcccagcttacccccggctcttctgagcacagggaggcctcccagcaaagcctgaaccctctaagtttagctgcaggcttcgaaccccgaccgtccccgccgagccttgggctgctgaggtggggatgaactgggcgaaagacacttgggagttaggaagaaacaaacaagcagggaagtgaccaggagacaagatgggcgtccacagaatgaatacaggaatgtctgtctgcctgtctgtgtatactctgtgaaggaatataccaacattacatgctgacccaaggatagccagtacgccttctgcaagaggaaagtttgtgtttcaaaatccatcaagtgaaagagaacagaaaaattcagagggcgtcattcacgtgtacaacgtggagggtgaaagaatgagctggaagcaggcatcataaagcaccatcgt

SEQ ID NO: 1852 - DNA, 938 bp, Homo sapiens
acactcattttactcagcattcctggagggcaagagggcaattcctaagggcctgtctatggcggtgcagctaatgggaaaacaggagaggagcctgccactctagcaaagagaatttccagctctgcgtctccagggagtaagaaaagagaaatggaaaatagaaaacaaagctggctgcttcaacagtaactcagtgctctccataacagcaatcccatgcatggtctccagaggtacatctcagttcccttttcaatacccaaagcaattttcctgagagattggaaaatcaggaggaggcaagccgatgacattttgattgcaggccccactcggagaggcattgtggaactttctggttaacaaagttaaaaccaaaacaaagtaaatgacgaatccaccacctcaatctgcattgtattttttgtttttaaagaaaatggtaaaacttttgctgctgcttttagtgactgagattttcaagagtggattgaagaaattattatcagtctgtttggcagctaagaaacctgctttgagatgggtagttgcttattaataatactgctttccacttcagcctcatctgtaaggcactgaactagctgctactgggtcttcaacctaccttcagacttctactgcatgaagtctttccacatctactgtgagatggatcacttcttctccgttcccagcactttttgggtatctctcctatgtcataggagagacattacatctatgtaatagatgtaatgatgttgtacaaggctgagcaacctcagccttgctctaaaattatttacatcatagtttaccattctttgagggtggcactttgcatttcatagaataattgaacatttagagaattaattgaatgaatgcatggatgcagagttggatggaggaatggatacatgatggtagat

SEQ ID NO: 1853 - DNA, 2696 bp, Homo sapiens
catggcggcgtcggcggctctgtctgcggcggcggcggcggcagccctgtctggcttggcggttcggctgtcgcgctcggcggcggcccgaggctcatacggcgccttctgcaaggggctcacgcgcacgctgctcaccttcttcgacctggcctggcggctgcgcatgaacttcccctacttctacatcgtggcctcggtgatgctcaacgtccgcctgcaagtgcggatcgagtgagcgccggcggcggcggcggccgcggaggcccggctggaggggcgacagtgtccccgcccgcccccggccgggtcgcgggcatgaaggacagctggatcgcggcggggggcggaggtggggcggcccgggcccctggactctagacctacgccgcccgggcacgaaggcccagccctggccctggccgcggtctcagcccgggaccccggatcgcgcagaaatgcactgaacaggcccctacaattgggctccagaaactacctgagctcggactacctgttgcctcacattggcaaaagagggggaaaccagaaggagggaattctgctgcggcgacttgactttccccgccccgagcagaaaggcattgacgtttgtaggcggtgacccgccccttctctggccttgccaagagtctcatccctaccctggggcacctctgaccctggacctgcttgggcagaggcagcgtgaagggcctgaacaagaggagaagaagggccttcctagtagaggcacagcatggacaaaggctcacaggggtgggggtgcccagtgatcgagtcctggcttgggagggaaggtctgagttccctgggaactgaaatcggctagcagcactgtgagagaggtgtatttccccctcctaatgacagaggaaaccgaggcttcggggagggggggatttgcccttgacatgcagataggatgaggaggaactgcgtgtgcccctgggcctgcaggctcccacacccctccccagtcttctccaagacctggcatgatgggaggagggaggggaaagtgaagagggaagcatagggctcctagggcaccaagggagaggggcccaagggtagggaatctggggatctcgctttctttggagcagtacagaagatcacaggaaagattaggacagacagctgagatggcagacaggagagatgggccccaggatccctggggagccaagctttcccccacagcctagcctccccaccccacctggagcttcaccaagggcttttcagcagtgaagtggcacaaacctcccagtttggtgggcaagtggggctgatggtggtgtcatggctcctggagacacgacataaccaggagggtgaagggataaacctggggtgggctggggctgagacccatggcatgaccccaattctctctcctcaagctcgacccccccgccatccccaggatcacacaggagaatctcatcctcacggcttggattggtcctgggggcccccggttgtgctgctaactggtgtacaatgctcaagagcagcccagaggggagccaggaagggaccctcgccctcacctgctatccccatttccgcatctcttgcactggtaccctgagggccacattctcagttcctgggattgaaaactgcagcagtctggccagctccagggacagagtgatccaaccacctaccacgtaccctcctcagcaggccactggacccaggtcctgaatgaagctgtccgcctgcctcaccccagaagaggctggacagtggctgcctcgtgccccctgcagtctcccacagccagggcccgatggggtgcctccttgtcccaagtctcctgagaacccctgaccttgctggcctctctcatccgccccaaccctgtccacccttgaccacctctgggggcctgtcagcctgctggtccccccaacagatctctgggggcagcctctgtgggacaagagtgatacagagctggaggagaagaggagtgaggggcctccttgtgtctgatgcacagatgtggccctttcaaaccctggtgtcaccctctgggtgactggatccctagctccagcctcttcctgggccagccaggaagggtggaggaaagttctttgctgattgcatgtgtgatacagtggggggtgcctgagccctccccatgcaaggggctcatcctgggactctggaagctgcttccctactgggagaaatgtgtgtcggagctgcaggggtccctaccctcagagacccccgactgcagggaacccaccccataagagggtcacggatgtccatgtccgcccaccccccgtggcttctgctgtggctatattggcctagaggggctgactggggaggagcagggctaagccctcagcatttgctcctgtccctgccttttcacccctgctgcctgaagtggtagccccgcctgctgcttctctacctcccctccccacctcttctctcccctacagggcccttgctgcgtgatggggtctccatgcactttatttatttgcagtctgttttctaggcggtggagcttctagacaccgaccggaatgacatacgtttctgtgtgtgattcactgtgtactggtcagcacaggctggccagagagatgttcttgtttctggtgttgtcacgtcttcttgttttctctaagttt

SEQ ID NO: 1854 - DNA, 3004 bp, Homo sapiens
atcttctgcttcaccccatgctcggtccctgagccagttctgtcattggttctttcagaccagggcaggaaaagtcaagaaagcaaaagcggattctaggctgtggggtttgctgtttgctagccccctggcagagatgcctgtccttgcagtcctgaactggtggccaagtgtgcatgcatgcacgtgcaggtgtgtgcatgtgcaggtgtgcatgcgtgtatgtgcgcacacacattcatgcttgtacatgtttgtgtacacgcacacttttttctgctttcaatttcaagctgttgcctccctgatgtgtctgtttagtgacttgagccagaaagattcccggttctatgtgggatgagaatgaacgcaggcaggtctccacagaagtgagtaaagtagagctgagaagaaggacattgtctcatgccagcctgtccaatagccactttgccccagccctgcctcaagccccagagagatgacaaggctctctctgtttgtcgactccttgaagctcagaaaggtgggtcaagaggtgcccgtcaagcgtttaggcaagcacaggaccctgatctttactaagtctccacatctctcttgcacagccctgggctcagggcttggtcccctctgggcaggccatccagactaagtgacagtcagattgtgtgtggggaggctagagacatccattcttcatggatcagcctgaatggctggacagatcttgcaaatggattgtgtaagacagagtgtggaagaggaggctgtgatcagtggcttggagagcagagtgtggtcaggcgctaaacctaaggcttttctgggaagagctgttaagattagactgttctcccaaaaagccaataattctgagtgtctccattaatgcctaggtagcccatactctcacccagccggtgcccttcagcctggaacctttggatggaggattggaccttgtgaccttcaagttcccttccgaaccaaatatgctctaacccaggagatggtgctgttgcccaggaagccggtcaccatgacgagagtacccgctcagatgaggatgcaggcggaggcggtgaaggtgctggaggccaggatgctgaggtagctgctcctctccaccagggtccagatgcccatggccaggacagctgcccccctgacctgcaggagaccaccaggttggagcagggggtggcgggggcctcaggagctgccattccttgagtgcccgctgggtaccaggcacttctcgtgcattgtcttattcaatttaggcctcctaagagcctgtgagaacagtgtggtggcctagctttacagatgaggaaacggaggctgagagaggtttgcaggcttgtccaaggtcacacatgtaagcgagctgcagattttgaatctgggtctgacttctgattctgtgcatcttactatggttcctactgcatatgaggcggggagaaatgacttcagttttggggatgactaatatacctgagtcccttcgcctcccctcccctcagagcgctccctccctctgtccacgtttccctgatggatgtggaggtgccattttgagcacctccccttgttcaatccttatatttgcccattggggaagcacggctgggccccttatccctccctgttctacagaggaaggaactgaggcccatggaggagaggtaaatggcccgagttaggggcagggccaggaccaggactcagagcccagggcctgcttgctcagtctcgctgcctccatgatggaagggccactgtgctggacaagttggagctccctgggaccacaggaggagggaggagagccttctttgctgtctgactccctttcagtcctgagagggggcagggacgggacactgctgatttgcaggtctgggggatgccttcttggaaatagagtacctgggaaatgtagctggggtggtggggcttgactgttctttcctgccatgaagctgaggagccttttagtgactgttatcctcagcagagcatagtgggtgggtgcaagtgtcctcaaggtgccagatgggggctgtttggagtgttttcccaggatttgggtcctctgggacctctgaccatctctgtcatttgctcctgggaaggtggacttctgtctcccagtctctctgcccgccatttagggacgggtccatttcctctgatggtcagtagatgcttcctcaaggggtcttgggtgtagccaaagctagagaagccctcccgggctctgttcacatcccctgatgcttttccctgcaagttgtctcccgtctgccccaggaagactctctgtataacctaacctgtcacttcccagttctctgttccggggagtcgcagaccttggctgagtaaatggaaggtggttcttagcaatgaacaggcacctacattactcaactcgcaagtattttaccattttgccattttctcttctgagctttgcaacagctctgtgaggatggggccgggcaggaggggccaggctatccctgtcttgcagataagaaaattgaggcttggagagaataagaatgtgcccaagatgacaccatcagagggtcagaattgaggtgcaaacccagttatttgagggcaaatccaggcctctgtccttggatcccccagagtaggctgggcctgcttctctcttacttctacgtttttaatagacatgatttcttcaaagtgccattttatctccataggtacctccagacaccacccaggctgcagcaaatggaatgggagaggctaacacaccataatttttcaattccatgatgcccattttttctcacattttaacgtctctaaaattggggcacatcttatgattgatggcatcttacaattacacttggcagtactttttcttggtgatacaaaaaaacaacagtgtatcttacaactgatagcttagattcagtgaaatcctagaatacaacaggtttgaaaattc

SEQ ID NO: 1855 - DNA, 4315 bp, Homo sapiens
tttctgtattccgggttcttgccttggtgtaccagaagaatccgatcacccgtgggctaggagaatgagtgcaacgttttattgagtggaagtagctctcatctgatggtggaatcagcagggagatggttttcccctggagttgggcttctaggtggccccgtctcttctctgactgccctggccaaactccaccttgtcctgccggtcaatggcctgccagcatgccagtgcctctcggtgtgctgttctgctggcgtgctcctcttgacgaccagctgcttgggtcttccaccgaagtgttcctcacaatgtccagccgctcgtgtgtctgcccactagggtctcgggtttttataggcccaggattggggcatggcaggccaaggtggtcttggaaaatggtaacatttgggcatgaaagcaggagtgcctatcctcacctagatctgtgggggtggagccctagccagggacccacctttctctacccagcacttcccctcccgctttccgtatcattttacgggaccacactcttcccttcccagcactcccatatcaatagcacataaaacctttagttctactgaaaatttggagtgaaatctctccatagttagagcacatgtactatttggtaagcttacccttggtaattcatgataccagctgaagacatcaataccaataagtgagaagattcttgccaagggtggaaggatttgcttggtaatatagtaagtagcattcagtctcagagttgggtcctgcaggacttccactgggcgccttacaagctggataagtggtactccgggggtcccataaatgatgacgtatggcactcgctccccaacctgaggctcagagcgccggtcataagtcagcattttcctattcgaattcaaagaaaaaaaccacacccaaatactgttatggaagccatctttctcacaaattaagtcagaattaaacaataataaaacaatgaaaaaactacaaaagacaatttcaaaacagaattactatttctttgagaataatatatatacattttgcttagttgacaccaagtgtagatatcctacaagagtttaaaaattactctgtaaatcactgttacctggaaaataatgagttggcagatatcaactagcttaagatgtattttaggtgggagtggtggctcatgcctgtaattccagcactttgggaggccaaggatcacctgagcccaggagtttgagaccagcttgggcaacatagcgagacccccatctccacaaaaaaattagccaccataatggtgcacacctgttatcccagctacttgggaggctgatgtgggaggttcgcttgagcctgggaggtcaaggctgcagtgagctgtgattgcaccactgctttccagtctgggcgacagagtgagaccctgcctccaggggcaggaaaaagatgtattttatcccctaagaatgagaactaactatcattaaatctatcatgaaagataagagaaaatttacctggttaaactatctgattccagaatgataccatctaaatgctttggtagaacaatattaaggactacctagtgattttgatgtgggaaaaacaaatgaatcaaggactgtgtcacaatttctttgcataagtttctgaaggaaagcccaaaagaggatttcctcttcacatcttacgaagtatgagggaatattcactaactttcagtgaggcttcatgtgcgcaggtaaagaaacaattttgtgtctgtgtctatggactgtcttttcatttgggtcttctagacctgtgcagaatctcaggactatcctggcaaggtactgagggtatcattaccttgtaagttcaagggctggcacacaagctcctggtttataagaaaaacttcctctgtattccttggcaaagataaagtcttgtatgctggcctttccttccagaagcttcatacattgtcgctgaacatactgtttaattagacttatatctctcgtttcaaatagcagctttagagaacgctcaagtatcttaaaacaaaaaagatatgcaagtaaagataaaatatctcctagtatgtttcaccattgttattacactttcaattatgtaactactgggtaacctgctaacctacctaaataatctgttacttacaatgatgggataataaaattattaaaaattgaaagttatttgagactttagagagcttgctatttctaaaaatagaatatcatgtagtttaaggaaaaccatgtggaatgacatgcaaattaacatttgtcatgtgataagcaacataaaacacgttaagttttttttttttaatagtcaaagcctctaggtacaagaaaccagacacgatttcatgtattgtttttttatttaccagtatagaaagggtcctgattcagtcacaggaaacacagagaagtttaaagatcaccaggcagtcaaatcaaaatcagcctttttgactttttataaaaatgttgataaataactatgacagaattttctgtgttggaaatttctactaggaaataaccagcatgcagtggatttatgtaagattaattttttttttttttttgagacggagtcttgctctgtcgctcaggctggagtgcaatggcgtgatctcggctcactgcaacctctgcctcccgggttcaagcgactctcctgcctcagcctcccgagtagctgggactacaggcgtgtgccaccacgcccggctaattttttgttttagtagagatggggtttcaccgtgttagccaggatggtctcgatctcctgacctcatgatccgcccgcctcggcctcccaaagtgctgggattataggcgtgagccaccgtgcccggccaagtagattaagttagttctaggtgaaagctctgtgtcttattctgaatactggaaccaatggatatttatacaataagcttattaatttagcttgagtacaattctgcctacagagaaagaaggtactggattatatctcttccagaaatagtgctgaaaaaaatcccaaattcacataatattatatatatgacataatatattgataatattcaatccactatgcttttaatgctctcatcaaacagtatatagaatgctattcccatttataccatttatttttgttttgctatagaaggagtctaggcccgaataaagaaaaagccaaaaaatatcagggttattatggttgagaaatttgagtaatttatagctaattgtttggaaatcttcctaatttgtatttgataatccaaataaatgaaagttcagttaatctggaatggattatgtttctctctttttattttgatggagtctcactctcttgcccaggctgagtgcagtgttgtgatcttggctgtctgcagcctcctcctcccgggttcaagtgattctcacacctcagtctcccgagtagctgggattacaggcatgcgccaccacacccagataatttttgtatttctagtagagatggggtttcactacgttggccaggctggtctcgaactcctgatctcaagtgatctgcctgccttggcctcccaaagtgctgggattacaggcgtgagccaccacaccgggtctgtttgtcttgtttatcctgctctgctttcaggagttgttacactatgacatatatgatctccaggcaataggcaggaaactctcatgtattgctttttagtaatttttgataaaacgtaaggtatgggaggaagtcagaaacttaaggactaaaatcaaataaattgtttttattagaaataaaattctagctactcaggaggctgaggcagaaagattgcttgagctcaggaggtcaaggctgcagtgagccaggattggactactgcactccagcctgggtgacaaagtgagaccctgtctcaaacaaacaaaaacaaaataagacactacaaataaaattctcaaaattcatgtagttactcctatagttatattaattatataggctatagttccttcacctagatgcatgtttaagggtagttacattttcaccagacactttagccacttatttcttacagatgaagacaagatagataaaccttaccttagaaacagcagggcaggaatctcttctgactgtttctattccttttgcatcaaatactgggtccttctgatccagtgtttcatacatgtaacccacatacctcttttttgtttgtaaaacacagggcaaatatacctgtggtaaaattaataaaatgcctctt

SEQ ID NO: 1856 - DNA, 1521 bp, Homo sapiens
tgcgcctgcgtagccggcgggctggcagtgagactgactgcgtcggggttgagactgggtggatgaggctcaccccggcggggagaagggacgaggaggggcggacagcggaaggtccgggagtgtccgccataaagtcgtttgaggtgaccgttgcgtaattgtgagtctgtgagagaagatgtgaagtatggcctcgtcccggtcatctgggcgtgcgggtcccgggttttgatcgcgcgtttgtgtagttttaacttctagtcatggcgaatgatcgcaggagagcacagactggaccctgctacgatctctcttggagtggatcagactgatgatcaccaacaaccaactcattcccggataaggaagaagagagtgtcacctacttcagtgtggtttcaaccctacttctgcatcttaaagacactgtatggtttcagcagtagtgcccctgttcattagtccccctgatgttttcattcctcatctcatctttttcttagcagcattcaatgaatccttcattctagaaacactctatatctttggttttcatgagaccattctcaccttgttttgtcctgtgacttttttgaaaaaaacaaaaacaaaaaaccctttttttctttttaaattctggtaaaaaacacaatgaaaatttgctatcttaaccatgttgaaatgtgcagttagtaaagtacattcacattgtggtgcaagccatcactaccatccatcactagaacccttttcatcttgcagatctgaaactctacccattaaacgacttcccatcttcccatccccacagctcctagcaaccaacattctactttctctatcagtttgactactctaggtacctcatatgagtagaatcatacagcatttatccttctctgcctggcttatttcacttgtataatgtcctcaaggttcattcatgttgtagcatgcatcagaacttcctccccttttaaaggctggataatatttcatggtatgtttagatcacattctgtttatccattcatccatcagtgaacacttgtgctccttccaactttgggctgttgggtgtcctgccactgttgctcctagtgctcaatctcgtttattccctcctaatcaagtgtacaacgttggacactgtgcaggatgatgccacttcatcttggatgctaatctgccatgttgacttctgattaaccccaggcccaggaatgcctcaagatttctactttacttactgttgcttgtgtaagccaagacaaccttgatgttatcataaacatgtacttacctaagtcctgtcctttggcaaattatgggctatgagacacagcattcttgcctttccctgaggggtcaatttcagcgatcctacacattccttctgaagcacttatgctctttctatatggtatgtaagctctcggtctggggagtaacagtgcagagatctacctgtcttgttgccacatgtttctaaactttccaataaatcaccttctactg

SEQ ID NO: 1857 - DNA, 1920 bp, Homo sapiens
attctgcactctggactcctacggaccaagatgatcaactctgaggaagaaaggcaatgaggacgttgcacaagacagtccctgatacccagagtttactgcctaagagaggatacatccttcaaaccaataatctgctaatagcaagatccaatagcttcatggatattgaaagaaactgagaatcaaatttgcatacttctgagtcacttggaaacaaaaaacaagtacagtcttagattctgagggaacaaaaattaaaaatcacattaggaagagaattcctaatgtaggaactcatcctggaagattcttcagcaaaagtacagacaataataataatactccatgaagttaccatcgatattgaatgaattaatgaatgtaaaaacctcaaaaccctgcctggcccagagctttggaatgggtttggatctaccactcaactgctttatgacttcagaccagttatttaaattccctgaagctcagtttccacatctttgagtttttattaatgacctgccgacatcatacagttcatgaaatgctctggatgtgtacatgctgatgatacgacctcagacccagcaagagctcagtgcagcccggagagctgtgagcagtgccacaggaggagatgactggtgagtgaaataagcaagataggagttgaagtgtacatgaagcagagtccaagccttctccttctggatgttcagctggatcatcctgactgctcccactttcatcttggctttcaaaggcaagaggaaattataaggaatattctgagtggctttcatccaggagttctgtgggacccgcaacacctggatggtagatgcaaacagataaagaatattggtcaccaaaaggagttcttttcatcatagatctctgaaggtagacacctatttgcagacttctcaaagggctatatggatgtgctctacttgttggaggattgtccatccactcttcttcctgtacttaccaggacagaacagccgcaacttctcagacagttcattcttcttttcctcacctactaccatctaagaaaggtacttgatgactgtggctttagacaagagtccttttcttaccacagggtgggcagcaccagctcattagaaccatttgtgtgactgactgaagacagctcaccttggaacactgcagaatatggcgtaagtgacattttacaagttccagagcctgggactcaagatgtcttggagattctgtctttgcagtcttataatgatgccctgagatcatcattaaagaaagccagtctggcctactgaggatgagaagctacataaaggagaatgaagattccccagccaacaggcaatatcagtggtcagatatgtgaataaagccatgttgaacctctcggctagacgaccctccagcatatgaaaccagcagatgaatatcccagcctgcctgaagaactgtacaggaaataagaaatcattgttttttaagccactgggttggtgggtggtttgttacattgaaattgttaactaaaacagaaattggtgcatagaggtcaggtgctgtcataataaaaatctaaaacatatactgttggctttggtgatgggagtgattggtagctaaagaggcagtgaaacaatgattagtagatactgggaagttaataaggaaatttctattggagggtggagaaagggccacccttgttatatagtggccaaagaatcagcaaaatgttgcctgctgcaacctggaaagtagaaacttttcttaaactcacggatctggctgggagatttccaggatgcatgcaacaaatgtgaatcaactttgtatagctgtgtataataaagtgtgctgtatttgtccattctgatgctgctaataaagacatacctgagactg

SEQ ID NO: 1858 - DNA, 963 bp, Homo sapiens
acctgtctaattttttgtagagtcaaggttacctatggttcccaggctggtcttaaactcttggccttgagcaattctcccattttggccttccaaagtgctgagattacagatgtgagctattatgcccagcctactttctgagttttaaaagatgaaaataaatttttcagaatagcaggggaaaacatttgtgatgtaaaaaatggggtgcacactaattgaggtataaagaacaataattttgcaaattattagtaactgccaactcaattagagtcttgttaaaaagatactgttatgaagtatagtaaagcattacattgtatattttgactgtatttcaaatttctgttttgtttccaacagttttgttgacttatgttgggtggaacaatttgtgagtgaccctgagattttgcatggcttgaatctggtgatatctggtgtctccccaagtgttttgttgaagttttggataattagaagtatttcttacagaagtaaatatttcagtaaacattgtttcattcaaactctcaaaatataaaatacaaagaaatgttattctctatttatttttataaagattatagtctttatctaactcttcttagttcatttgaactaaatcaatgaatttgtcaacagaacaaaccttaccagtggcttagaggaagagcaagaaaggtgtgaaagaagtgaaaagaagcaatcacaggtcaaagaaggaaataatacaaacaaaagtgaaaaaatacaactatcagaaaatgtatgtcatagtacatcttctgctgctgctgacagattaaccaaacaaagaaaggttgggaaaacgtatcctcagcaatttcccaagaaactgaaggaagagcatgatagatgcatcttaagacaagaaagtgaagaaaaaacaaatgttaatatgctgtacaaaaaaatagagaagaattagaaagg

SEQ ID NO: 1859 - DNA, 778 bp, Homo sapiens
ccatgccgtctcttcccggggagctggagcggctgggcccaggggcctgaccctttcccgtctcccacagcgtgtagcggccaatgggtcggtaggttgggctgatgatttcagggactcgtgagggaggggcctgggagggcacctgagatgcactgcccttgcgaccatagttctccaggtagtcgaccaggtattcagggcagctggctgtctggtagagcccctgcagggtgcagagctccttgcgcgtccgggccagcatggggctgcggcccaggttcctggggtctatccggtagctatctgaggtccggaggctggagaaatcccgggccaggtctgattggctgtccagcttctgggttagggtcaccccctggtcataggcattgatgggcaggtagctgaggcagttgttggtcactccataagggaatccgctgcccccgctgaggccactgcctaaaggccgctcagtaccccgggtctggctctctgcccgcttaccacccccagtgatgtcgggtctcagcagggggcggccccggtcatagtccaggagggaggaggggccataggtacggggacgggtgaggaagctgctggtggggaccggcttgaaaccaagtttctccttctccagtaaggagtatggacgagtcgaaccgggcacaagcatggagctgcgggtgagtcccggctggcgctggcgcggcgcagtgagcaccagctgacgaagagggctccccggcctcggctcctgcctgactctctc

SEQ ID NO: 1860 - DNA, 868 bp, Homo sapiens
gcctcttgagctgcttgcttggcccactctcactctgtggagtgtacatttgtttccataaatctgtgctttttttttcattgttttgtttgtgcatttcatccaattgtttgttcaaaatgccaagaatctggacaccctccaccagtaacaggcattgggaaggggaaggcagaaaagcggagtgcaaaatgaagtggtagtgggtgctaactaacaagagaacctttgaacacgatgggacagaaataaggtcatgcattttctactatctgtcacctgtggacaacttgccacttcaacagttctggacacttttaagctcccccgaggagaagataggaaacttggacaccctgtgtgggattgagaatcacaaaggggcagtctcgcacctggtcaagataaagctgaactgaactcttcattcacaagtgggattctcgtaagaggcaggaaagcagggaccgtctgtcactacagacagcaagaagaggtgaaccttaatgagggaagaaaacagattctattaggggaaaaaaacatttaatcagaaaataaggctctggaaagaaaaggccaattggggctttgtctgaagaaataacagagtatttttctgccagagaaagcaagtccaagggaggaattttcagattgaccaaagagtattggtctacatcattagtactttcagtgagaaataactgaaaataaactagagcaaaagttccccaggtgtggttccaggaccagcaactgaaacatcacctgggaactgttaaaaatgcaaattcttgggctctccgccagaatcactgaatcagaaactctgaaatgggacccaataatcagcagcttaacaagc

SEQ ID NO: 1861 - DNA, 852 bp, Homo sapiens
ggcgtgccgctgcaaactggcctctgggccgggggcgagcagcccccgggaggccgagtgcatctgttggaccgtgcgaggagaagaaaaaaaatatcggccagaggagaggaactaaccgaacattcttcctccctaccttatagaggggagtggtcatctacactaaagcaaagtgttaggcgcgtccgtgcgaagagaccaccaaacaggctttgtgttccttatcacaggaagaaaattttccttgacctttaggtgcttttatattcatctcaaaaacaaaattctgaactcaggacttggcaagctgaagtgcaatggcgcaatctcagctcactgcaacctccgcctcccgggttcaagcgattctcctgcctcagcctcctgagtagctgacattataggcacctgccaccacgcccagctaatttttgtatttttagtagagatggggtttcaccatattgggcaggctcgtcttgaactcctgacctcgtgatccgcccaccttagcctcccaaaatgctgagattggaggtgtgagccaccgcgcctggccagtgtgtcctttcttaattgacagtgacattatatctgcaaaataggcttcatacctactgtgttagttttagtttcctaggcctgctgtaacaaagcaccacaaattgggtagcttagaataacagaaattgtttgatagttataaataaaggtcagatgtctaaaaccaaagtgttggcagggccgtccctctgaaggcactgaaaaaaaaatttccagtccttctaatttcttgtggttccttaacttgtggcagcataactccagtcttcacatgaagttcttcct

SEQ ID NO: 1862 - DNA, 1816 bp, Homo sapiens
tgggacctttcagatccacctgacttggccaggccaccccttcttccctttgtggtagtgatggggggtcttcaggatacacagaaccactgccctctgctccttcccactgttctgggagctctctcctctgcgaggctttcctggaacctgattggcgaagaccgtttctcctgagctcttttctctgagacatcaccatagatggctatgagtcaagtgcccccatcaaccattcctgctctgcctgggggcttggagtcccttctgatggacgaatgggtattgactcaactggctttgtatgctgggcaccactttgcaaacagcttacaggatggactgcagtcctcacaacgatcttcaaagcacgctcggagttgtggccctacggggacccggtgaattcagctgcctgtatgaggtgatgttgttttgccttaaatggtcccctagcctctcccaaagacccctccttactcttcccaagaatgtcccaattcctttcccacttgtgccactcattttcaagagaggagatggcccagccctcttctcttccccacctccctcccccaaactgtgtgaccctcagcacccagggctcagggggctgccagagatggagaggaggcaaacccaagccagctcctggggtcctacagggagggagggcatgtaaatcttgcctcaccctcttccctcccagccctgctgtcagctggccagccccatccctggagccaaactgcttccatgcaggagggagggaagcctgctcagtgggaaaagatgaagctggtccccccgcgtgtcagtgaacaaattgggccaatttggtgtgattagtgaagaattcacatctggccagcagagtcctccccccagccccagcccagcctggctcctgctccccattagaagctattttctctgacggctccatttgtctctgtagtgggggatttgacagctccctggccagcctgggaggcctggctctgagtgagaggcccaaggccaggctgtgtgcccacacccttgacctgatgccacgggggatgccatgctccaaacagggcccaggcacctgtatgggccctgtaggtcccatccctcttctgtgtgcacagatccatagttgaatgggggcctggggagcacagttcactaggctccctgacctgggccccccttgggccttggtcatcttgcacaatgattattgtgttttaagatcaacagagacttgtatgtgtgtgcatggtggtagaggaagcaggggtctggtgtttcctaaaagaaaacagctgggcatgtaataggcgggcctgcaccccacttccttcaccccttcctcacccctcccagagacctgttgctgcagctacccctcaggaatgcctgtagatggctgtcgcacagctggaaggctcgccccgagaagcggcttcaagcagcaactggcctccaggagacggaacccgaagaagtcaagatttttaaatgtctgaaaggacttttggaggaaaaggggaccagcatcagatctctgctcctgctgtcctgggagcctggagctgctggggctggttccccatctgtcctgccctcactctacctctcctccaaaggccccttccctacctcagcctctcccttccccttctctgcccatgtacccagaggctggaggccgggtgcagtggctcacgcctgtaatcccagaactttgggaggccgaggcaggtggatcacctgagatcaggagttcaagaccagcctgaccaatatggtgaaaccctgtctctactat

SEQ ID NO: 1863 - DNA, 1054 bp, Homo sapiens
gttgaacggactcaccaggaaacgtgactttcgtgtccgacctctgctgtatcaggattcgattcttggtgttaaacaagacaacgctgaaggctcggtgcagcagccctgcaaaggtttttccagcgctcttgggaggtgggctgtgccactgcctggcccacctggcccacctggcccaccattacctgaagggaagcatgaacagcctttgacgtgggagtggcgactgctgagagggaactgtctgtacacaagcaatgtagccttatgggacctgagtggagccccaacccacgcagggcgtgtcttcatggcttttcctggccaatctgataccaagatgcagtggccagaagtacctgcacttccactcctgtcaagtctctgcatggctatggtgaggaagagctctgcactgggcaaggaagttggccgtcgagtgaaggaaatggtgatgctggtggcccctttccggcagtcaagttccctatcaaggacattcagttctcggaaagtggtgaaggcacatgcttccctgcatggtgcccgcctctctccactctctagaaatattagaggctaggctgctgctgtatgtcagggctagtccctcttctatgaatccagaataactctgaagaagccgagtaacaggcatgaagtgaagagaaatcgctgtaacaggaagacagcaaagcagatgctaatgaccacactatttaacgaactggaaccaacgagaaaatacggtattactgaagactgcacttccttgaacagagtgctcttctcagcaaatcggaaatgcctacacaaatcgctttacaagaaagactgtttcaaagcagcacctttctcaatgttctcgttcaggtgacaattcttcttggtctcagctccaattttattgtcattttcatcaataaggatacacatctctgccaggagttgaacctgttgcttgtcgaggtggttagtgtttatttcaggcatcattacaaaatgtctgatctgttctagaacactaatattaaaggaaaagagaaagaaa

SEQ ID NO: 1864 - DNA, 499 bp, Homo sapiens
aggcggtgctggggtgcaccagggcagcagctacaggccctgctgaaagggttgacaatgaagactctcaggccaccgtaactcatggagaagccctgagcatctggcccgcttaatgcaccagctggagtcgacattaaagggccccatttcccatttgctgcagaagatgtttaattggaagtctctccctgtccttttaccctctggtgctgggcaccaatgagaagctcatctggccccgggatcctggcaggacactgggagcactatttccatgggcagcagggttgttcctggagacatcactgacccaggacacctagcacaatggcactcgatgtgaaagtggcttcgtacaaatctgccactcaagcctaaataagtgcattccagaagagccgcagcccctctaacagctcctgagagatgacagaagagacatccaggagtagatttcaatgcacagcagcagctgagagaagccagctgtgaaaaa

SEQ ID NO: 1865 - DNA, 404 bp, Homo sapiens
ttgcctgcttgtaatgttacccctgagaaaagtcatctgaaaatgggaaatggacctggacaggaataagcagagcatgctgatttaaaattatggaaattcttcaggcagaaaatgggcacatatggttatcacagaaaagctgttttaaagccagttttaaggtattattatgccgctaccttcaagaagtaatttgcgtgctgtttattggagctgtgaatttaatcatctcaatcccacgctattacaggatgactataagaagatgtattgacatttctttggacacataattttgcctccattgtgtgttgttttgccagaatactgaaggcagtgtttgtatgatggcacatccaaataaaaagcaggtcctccttttgggacagtgatccatttaa

SEQ ID NO: 1866 - DNA, 1638 bp, Homo sapiens
gtttaacggccggtcaggaacccaacaattagtcccttctcgtccgagaggaaactctgtgagaagatgggaccgtgagcactctctttaacaaggacatttccttttcagcgaaagcagcgctctgatttaccaagtctggcggaccgcagcgctttaaaggaatgaggttccagcggtcgcgccaagcagcgtacgcagcctattttaagttatgctaccttcgccacagaaaccaagaacgttgtaatggtccggcaagtgcccacgtataattgttctccatcacttacccactctagttcgggaacacccttgtcgccgccgttccggtaacacctctccaacgctttcgatgcttctacttcttcgggaacaagacaagatggcgcccgatttgtctcacccggaagtaaagaataataacatccgtttgtcatctgaagccataccatctctcatccaggtttgtgaacacgtgattgtgcggattgacatgtttcggcgccattttttttgtgggcaaaaccatctctactctggtcaacaccgggcaactgaaccattcctgcacgttactttttaacgtagctggcgccattcccgacccatctttatagtggccagaaagccaagaacgtaagtgttctacacatagggcgccttcaaattttttactttagcaacgtgatcttcctttaaggggaagtatgttccctcctagaaacactcccgccttggagaaggggttgagttcgcaactccacttacagactacggaggaaccccagggtcaaaccaaaccaaaccaattctggccagttgcttagcgcagttcaagttacttagtgcgctggaagcggcatttcaggcaatccaacttctggctcgaaccttctcggagtattccaaggatggaatactctcacttgagcgctgccgagggtgccgcttgaggaaaacgtgagtttgtgaagaatgtttgttgcagatacagttccaccactgtacattaagtatgtggaaaacagaagatatccttttggttcctgggtctccagaacagtaggagcaaacatccaaatctgatatagcacttccagagagcctggtcttggaggataaaactttaccttgatgggacttttggccccggtcccttaagagttgggatttggggttgtactgcagcacaactcagcctatcctaatacatatgggaatgcaaacatctcagatatttcttcttgggtgcaatttaaaatacgtatgaaatggcttcagaagtgtccatgaaccttcaaaattacatacaagaattagggagatacatttttctgggaacatacagatgttaagacttcccttctccgtctctatattgccagaagagagggccccagaattaaaaccccatccttcctacaacactcagctttctctttcaggaatatcagtactaatatcaccatgccttttatctctaggatatcttcatcccctgtaccttaatttctgcatgacttcatagggagtccatattgcttgatttttctccatatcattaccattgacataaattttccttacattcttagaatgtgtatttcctcaccttttagatttctggctcttatg

SEQ ID NO: 1867 - DNA, 141 bp, Homo sapiens
tgtctttcatgtcgctgtcacctctctttcaggtctcctgacttcccaccatgtgatgcaatgatcatcttgctggatttctgtgatgagagagggatgctgtggtatagaataaacatggaaatgggtcttgggaaattc

SEQ ID NO: 1868 - DNA, 2683 bp, Homo sapiens
ataggtaattatgtcttcatactatgggacacttccctcagatgcatcctctaaactggaaagagttaatttcccaaagcttaaactggttggcttaggattgggctcaggggaagagaacccagaaactcaacatgctgacaaaagggtgaagttttttaccagtcggatttttggcctccctctctctgtgaaaaacagtaaaaggtctcagtatttttaaattttcctcacccctcccagtgtttcattttgatacgttttctaataacccagtgtgtcttttcttgccttcaagccatcaaactccaaacggtcatgcaactggagcctccggcgatggtcccttttgccagggaccctgagataggcctccgagggagctctgactgccatttccccaaaacagcccccactatcagcaggaaacagctgcctgagcaattgtgtctggttcgtgaagtgacttcccattttcatccaattggccctgatctcacatcccaagcccatggatcataccacattgttctttctgcaaaacagttgagaattaccagtaattgggactgtttacattcaatgccatcatgacagaagcagctttattatattgcagaggaatgattaatacatgatggggattaaagattgcactgcagcaggccaaggcaagaggcaataaagattaataattttagatttccactgtagcaagaacgggaaaaaagcgtcatctgaaatgccaacttcaagcaattgcagtgatttcctggaaccctacgtgacaagtccagattcagtgggaaagactgtgaggatccgttagcaatgtttacgatgggcaagtcttgtgatggggttaccctccttgcattagaatttgcagtcttctattaggccattagtctttgagagcaaaaactgtatgtatctcatttttgtagccccagtgccaggcacacagtagctgctccaaaagcaaaggacatcgagtctgaatcaagctgcttgggtttaatggctgtctttgtcgcttactagctgagtggactcgtcatatttataacttaattgtggttcagtttccttctctacagaaaaggcatgagttcctcattcatagagttataataagggttaaataaagtcatgcatatccaaagcttagcatagtacctgagacatagcaaatacttgaggaatgcaggtataaattaacataggagtgaataacattgcaaggaaacagagaaaaggatcctaaacagtcctgctggtatattcatttatgattcaaaaatcctcaattgttaaaatttgggtcagaaccttattattccaggttgttggtaaatgtgaggacccttctgggtttggaagtagaacaataaattgagaggccaaagaagctgcaaataaaaattggcttctctgggaaaatgattttcacatttatacctacctgccttttgtcctcccatgcatttctccagatgtgataccaatgtgatacaattgttgtttattccttctctgacaatagcaaggtagagtgagccttccagtgagggcttaaaatatagctccagagacattcaccactacttcctgcctccatggttacacattccctttcacaaataaaacatggcctcatgcttcatgctgagcttgcattttacatacatcatttggatcttctctgcaaacctatgaagtgggcatggtaatcttcctttacaaatagagaaactgaggcctaagatggggagcaatttccctttaaaaaccttttattgtcaaggtccaaatggctgatgattcatgccatagacatcccaaaccagctggtaggcagagctcttggcattccaaatggaaacgtggaacagacacagatcacctggccacacagacctcagctctaaagacagatgactacttacctgttaaagttccctgtgcactattttttaaaatctagagatagataataaataggttaagttacattttaaattagcccaagagcatttgagaacagaatcatttttagaatcttaattctgagattcactgttgggcttaagtcactgcttctgtgatggttagttttgggtgtgaacttgactgtattaagggatacttacctgggaaagcattatttactctccatgcttcagtagatactgagcccttcccttttctgctgaaagggaaacccaggtggcttggcgtttgattagaataattgggctgccccaggtgtgtccgtgagggtgcctctgagggaaactgggactaaatgaagaagatctgccctccatatgggcaggcactattccaattggctgggggccccagatagaacaaaaaggcagataaagggcagtctccctggagaagagacctgcctgtagacagacatcagaactccaggttctccagcctttgggctccaggactcacaccaatgcgccaccgggctctctgaccttcagctttggactgagaattacaccatagaatgccctggttctgaggccttcaaactcagactgagccacgctacaggctttccggattgtccagcatacagaaggtctgttgtgggatttctcagcctccatgagtaagtaagaaaattgcctctaataaatcctttttcatatgtctctct

SEQ ID NO: 1869 - DNA, 712 bp, Homo sapiens
tgggaactcacccagcgcatccgactgcacggacaatgctgaggagacccccctgactcaaaggaaatagactgcagcactgattggatgactttggaatgaaaaaaagtagttttcctttacaatgaggcttggcccccagggcgatggtgccacaagccagatcactgggaccactcagagaaagggaacacagaagcctggcatgccagcaaaaagcagggtttttgtgagcagtgtcttgcaccaaactcctgtctcctcctgtgacttagaatgcctaacttcctgggaatgcagcacaggtctcagcctcattttgcccagcccctattcaagacggatttgctgtggttcaaatgcttctgacaatattcctcatggtgaatgctggattttgcatgcccgaggccctgggccacactgtatgtttgctttttgcaagggctgtatggctatgactagttatgtggaccctgcattcctatgtaaatgaccctccataaaaaccccagaaatgaatgcttgagtgaacttccctggcttgtattataatactgtgaacatcttgtcacacatctttgctgggggaattaagtgtgtccctatgtgaccgtaatgggagataacacccagagttttgtgcctgctttcatgtggacttcattctatgtgatttttccctttggtgatcctggtctatatcctttta

SEQ ID NO: 1870 - DNA, 750 bp, Homo sapiens
ggacgcgagcctgcttccatctgacgctggacgcttgtccctgccccgcgttgccttttaaattttagctcattccgagacacctgccgtcagacatttatgcagtgtgtgattctttctaaaacaactccctggaagagaggacatttaattcaacaatttattggccacctactgtgcaccaggcagtgaacttggaactggggctactgggttacagcagtgaccaagacagaggtccctgttcttaaggagcaagtgagggcaacagaaaagagcagtcagctgtcatgcgagggcactcaagcagccctgtggaaagctctacgtggtgagaaactgaagcctcctgccaacaccaacaaggaactgagacctacttccaacagccatctgagtgatcgatccatcctggaatcagatcctccagccccagtcaagtcttcagatgactgcagccctgaccagcatctcaactgcaacctcgtgaatgaccctgagccagaaccatgcaactaaactctgcgtggattcatgacccacagaaactgtgagatggtagctgtttgctttgttaagcctctaagtctggaaagaatgtcttaagcagtagcagacaatgaacacaagattattattcagctgttgaattggaagaggaggggaagaaaaaattttcagatcacaaaatattcattgtgtaaaacttcaaaaattctgaaatttaaggaaaaaatatcatttgttggg

SEQ ID NO: 1871 - DNA, 925 bp, Homo sapiens
cgaggcagggctttggctactggagatcgtaggttcgaatcccgtctgggaagttcaacttgtgcacctgtaaaagaagctggcattattggcttgtactcaagggctggcacagagtgtgtcggggtgcggacgccccagccacgcccatcatccgtgcggaagatgcagaggtcatatcggatacccttctgtaccacacgatttgggcagtcatagccgcagcggcagcgggagttgcactcgtagatgggcagcccggctcgaagccgcacctggccctggtcattgtaggcaaacttgtgcagtgacgcccccgggcagcagcctccagtgggtgcccacagacagtcctggcactcgcagcccacagccacctggttgagggtgatgccctcaccaacacggtactcattgatgtacacgaaggcccgcggagggccgtccaggtccacctcattctctacagtgatgcgtcccagatggctgcgcttggcattgagctcctgctcccagcgacggagcgcccgcctctgcttggccttctgcaccaggtagttggccaagcttgggtccaggtgccggggggtctttgaccggtggtgccgccggagcagctccctttctaagtccttgtggaactgcttgaggatacgcacacacttgagattctgccgtggctcccaggtgctctctgagtctggatatccacgccatttcaccagggtcaaaggagaaaattccctttggaaacagatgtgggcagttggggacaagagggcaggacactaacttccttgtgacctgtcccctcccagagcatggtcaccccagactcacgcggatcttcttgtaatcgcacaggtactcgacttcaaagtcatagaggttcctcttagagataccgagggcagggcaggagagc

SEQ ID NO: 1872 - DNA, 497 bp, Homo sapiens
tcttggcagtgagagcagagagaacaaagctaaaggtgctgaagtaaggtgacagcgctttaaagaagaagaaaaaaaaaaaggaaaaagaaagatagctaccaagaaaaaaagtgacctggtctacaaagatgaagaaactgtcgattagggtggaataaacttatcatgcaagaagttggcatagatactcgtctcaccttaaaggtgctttaaaaataaagtggggtcaggcaaggcagataggtggcatagcagttaagctcaagcagagataatgaacagaaataccagaggaattaggattaaaagcaataaagtcttgaatattggcgagaaaagatgaagaagagagtgtataaggaggagttctcactccaaacaacagtggcatgcgaaacccaagagatcagaccttgaaagctatgcactaataggttatttagttttcaaaatcttaaattaataacaattggcaataaagctcattaaaattc

SEQ ID NO: 1873 - DNA, 1558 bp, Homo sapiens
cggggcgccaggtacagccggcgggacgtccagtgccagcgcaggagccgggcgaggccgtggcctccagggttcctgggcggaggacaaggcgcgcagccgcgttggcgcgagttttaaatcggtgccttctcagctttgcaagttcttatcaattgctgcatgccagaggaagtttttaaaaaatggcccccagctctattgcggtgtaattgatggatagaaattgtatttatttaaggtgaacagctggatgatgtgatggaggcacgcagggtggaggggttaccacagtctaggtactctacacatccagagcctcccacagttgacaaatggattttcctaatcagtttcgtcgtgttttgtacttaagttgaggattccacaccgtgtggtactttcagaagagatgtagtggtgaatcaatcgcaacggttgtgatgttttcctaattaggtattgagaattaccattggtatttggaattagattgcggagcatttaggaaccgttctcgctatgttgcccaggctggtcttgaactcctcagctgaaatgagcctcccacctcggcctcccaaagtgctgggattacaggcgtcccctctgccccagtactgtttcctctccccagcccagcccccacagctgcctgccctggcctcactccctggcctcccccatcccagcctctgggtccctgagtcagtccctggggctgtctgccttctaggggagcctctggtgtggaccagaaagtaacctaatcccttccaggcccaccctggaaacaaagggatttgtccactagcctggtggtgagaaccatgtggcctcctgtctctggcagagaggactccaggatcaagggcaggtaaaaggaggagcctcctggggagcttcagaaggagggtcccaagtccctcctgccccacttctgtgcctgggtcactcacacccctgcctgactctagccccccttctccaggggtctccacaacatgtgaatcatgcccagcgtcttccattacacccttgataaagtcctctcctcaccaggacctctgtcattttacctcatggttttgaaataatttttggtcttcttagcagtttaaaaatattgttttgttttttttcctgagtttggagcattcctgttactaattacattttttttttagacaggtgtacactactacacccagctaatttgttttgttttgttttgttttggtagagataggatcttgctatggtacccaggctggtcttcaactcctgggctcaagcaatcctcctgcattggcctcccaaagtgctggaattacaggcatgaggcagcacgcccagccctaattacttctattacgccaaattccttgtgtggaattcctgtgctttgcacacaaattgccaggttggccccaaaggggaaaaaagtggatcccattttcccatcttctatgcctacgtggctgacaaatctcccgaatcccacaggagctgtcgctgatctttgtcctctattcgctgaaataaagttcaccatgga

SEQ ID NO: 1874 - DNA, 549 bp, Homo sapiens
atgccctctatctctctacgctgactccctgaagccataacttacggcacacccagcgcaggcccagtggacccaggggatctgcagggcaggaggtagagctgtttagaggcggaagtgaggagcacaggccctgctctgcatttgcctacctgagcaacgggaataaagccggactccgcctcccctggtgctgtgtggcttcgcgggccgaggcgctcagcactgagcccagggcctgttggtgaaaaacgcgtcgctccaggcgtcctaagcgccagtgatgtagctctgcgctcatgcacggaaaggcacctgagagcgcggacgaggaatgggagggccttgagccgtctcgccctgtctgtgaggtgctaatggacccagtgtgcaatgcatcagacatctcgggagacagagagaggaatcgcccaatccgtcaccctggagagctgtcaggaaagagagtgtggctctgcccctccccctgtgaatgacacaagggtagaccccagggtgtttgacctggaaagggcctctgagtcacct

SEQ ID NO: 1875 - DNA, 491 bp, Homo sapiens
gttttccgtgcagccgattggggttttgggcgctcggagcagcatctgagagggctcactctgatcatcagctgcacgttaagccacaaaccggcgtcgcttcggcgttccggaacccaggcctgggggccgcggggattgcctctgcgtgcaactccggaaagtttcaaggggtcccccgactgcacaggtccggaaatcggctttgatatggaactactccgctctagcctggaaaggagacccgcgcactcctctcgcagctaatttcggatcattaatttaatcggaaatgaggtaaccagtgtaggagacagagaaagcaaccggagcatcaaatggcagttctcgagaatcgacgaggaacttaaatctggactcagggtttcagtgcggtctccgactcccaccaccccgcccctccgcctgtctcgccgccaggtgtgacctccacgcgaaggaatcttcttcggatgggtgcaccttgccaa

SEQ ID NO: 1876 - DNA, 303 bp, Homo sapiens
gctttgctgaggaacatggaagggggaaaacaccgactgtgataaacaccagcaggatgactggagtccgctggaacctggaatggagttttctgacagcaaaggattacaggagcgtaacagaaattatggagatttccccgctaggcataaggatgcgatcactgtaggcacctgtgggcccaagcaggttacccaccaatatccctttaaacaccaaattatggactattaggccactgcttcaaggcttctacaaatgtgaaaccttgacaaattcccaaataaaagccataaaaccaa

SEQ ID NO: 1877 - DNA, 1156 bp, Homo sapiens
ttccaggtgaccagtggtcctcctttctgaaggctcttgctacaaaggaaagatgaggatattctatttcttgatccctctcagctactgggagctgctttgtgccttggaagcctcaagctgaaatggatgtcagcctcaagtttaactccaagagggttcaccttgtttctttgaacaaaatgtgctgcctgttgcttccctttgccaggagtggtgttcccttttccacaggtctggaccacagtgtctctagctcccgctcctggatacttggttactgtgtgtttcggtaaaaaagcatccacaacatgaatatccactaagctgtaacagggcctgctgcaactatagtatttcctgaaaaagtatcaactgccacaagggccacaaataaagtctgtgaacttgaaataaccatggagaatgaaatgttctgattcagatcatcggtgggatttcactgggaaatctcccactgggcaagagtagatgatggaggaggagaaacagtcactagaaaaaggtgatactttgtatcaagaaacaattaaaaattagatcacatcctgaaacattaagcatatgctcctttgtgaggcttgcctggctgaacttgaactggattgagtgaataatttcttaaaaacaatcaaaatcacagatttattctattttaaatacttatatttacttatatttcattcagaaattagttaacaaataatttttgagtatcctgggaactgttctaatcattaaacatgcaagtttgaagaaagtaaggatgaatctgcctgcgtggggctctcaatctagcgagaagcagataagaagacaaatgtcagggaagatcacacaaccttcaggatctaaaccttaaccttcctggctgatgctgaaagagagcttgtatgaaacacgttcttacaaaactatttggtggatcgtgacaaagacgaatgactgggtactataatttaaaatggaaaataagggatggagaagacttaatcctatctggaaggagccagtgcacagcaaagatggcagagagagaaaagagagggagtgacaatgaagtaaggctacagagagatgaccaagtgtcccagaggaggaattctctttcggaaagagatagacacctcttcct

SEQ ID NO: 1878 - DNA, 981 bp, Homo sapiens
gggtggtaggtgagtgggtattgcgggctagtatccgagcaaaagatggtggcgcaggccgagttaagagctttaatcctgtgaagacatcttagtgaagagtttagagtgctgagagttgaaagcttgcacgtgggaaacgtgcggccggactgccacatgtactgaggttgagtcgtgacggccacaggctccgagttttggcgtgaggaaccgctgatcggccacgggcgccgaacttgctggcctccggcatgtgcctgagcggcggcggaaaaaccaccttaattggggcggagggttagttttaacagcaaagggcctttactaaaatggcgaaggccttccgtcggcgttgttttaaaatgggaagcctcgaccctgtattgaaactgagctgttcgaaggcggcgttgtgtgcaattcggattaatgaaggggaagggttttgtgtggaaaaacgccttggagtgtgacatttctgcgagaatgcttaaataccgatttcccgcaggaacaatggcgctgtcttcagtggcacagtggagcagctctgaagatgcaaagatacacgaaaaaacttccagaacatctgggagaatatttaatggaaaatcgcttggttaaaacctgacacttttaacagtgaacagcgttctgagtgtggacgagtagccagtgaagataatgaatgtcgaatgtgactgactagcagcttcattttgaatgagggtcgctgtctgcccattgatagaggccagattgtcttggaagttccaaagttgcaacgatttctggctagtgccacgaggtttacttgactgttgtgtgaaaagctgataagaaaaccatccagaaaaaagctcttcgttttacaaacatgaaaataaaacatgtaattttggattatgttcctttttgttattacttttaaataggtcctgaaataacatggggagcattaaatggaaaatccactaa

SEQ ID NO: 1879 - DNA, 2949 bp, Homo sapiens
atgtttgtattttgcacttgcccggaggtgtttcacgggaagtgagcattttttaaaacaaaaatagaatttagaaaaaaaaaaggcagacacgatggatttctagtgttgtacgtgctgtagaaagcacttgaaaatgcgttttgccaggggccgcaaccagaagctacatgacttctggaatctgttccttacacagtaaattcctgggccagttggtaaacagcaaggagccacaagaaatcactcataggcaaaagccgagtgagcccaggccaagctccactttgtccactttgccctatttttggaattcagggggaaacatcttgggagcaggcccattgcacccctctgcctcctctcgatgccttacagttggtggggtttgacacatggaaaattgtgaaagttagaacacggaacaaaaatgaagcctcaacatagagttaatagaggcaaggggctacagagaatttagatcctaatcaagcacgtcttatgtactagcgcttccctggaaggccaggataactttatgactacaaagaaaacatgttttcctgcttggaagttgccagaacttgtctaatataaaagctgggatttcttgcccgtgggctgtcgcgtacggctacccaggccgcctcgtgaagcctcctcctgggagctcggcgccctcaggtgctccctgagatgccagcacctgaacgacctgctccagggaggctttagccccaagaaggttctggaaagctccaggaagtttagccggcacgcacaaaagccagagacaaatctccagcctgcctggaaatgctgtgggctcagggcaatgggctgaggtcttgtgtccaaaactgctcttgcatctccctggggagcccgggtgggcaggaacaacaaggtcctgtggccatgccctcgccccatgctcacccacactgcctgtgcctgctgggcccatctcagggctgcactggcccctagtggccaagcatgggctctacccctctgcgcctgcctggctgcctgtgcaggtgcccaccacactgtccctgagcagagcagagaccagcctgagccccgggctccgtggctaccatgctgagagtgagccctgtgcatgcacacacacttacgatgctgctggccccgagcagtggccggccacacgggctgctagtcatactgcccgctgctcctgggactcctgagcccctcactctctatagggtgaggatgcccagctctgcaagacacacagcaaacggagcctcagagtgcacagcgtggagatggggctccccccacaggctgcacccccatctagtcccggggaacgagaatgaagggcctacctgagcacacaagccccaggagggcatgggagctgcatttgggggcagtgactgggagggctgctgactccaggctcagattaaaagacagacggcaacactggggttgcagagctcaggagccagtcctggccccctgcctcctccctcatgaggttcccctgatccccaggacatcggcttccacatctgcacatctgggagacaaatgcaccatcagggagggcaaatcatacctgggaagggcctgactccagcagtttcagcagtggctgaaagatcatggctatttttgccatcattacaatggaatgtccactccctccagccacctccacagcaatcaacaccggtgtccagccactctacatggacgtgtggggaacagagcacaggcctcttggcttggctgtggtcaccgggagggagcagggagggacagctgccaagaggatgggggagggagcctgctactcaggaacgctggggcaagacatgagacaaagggctgccttcacccaccagtaggagcctgaccctgagcccaaagaaactgcccacctgtgtgctgaccccagggcctgaggacaggtccccaagtggacgtctcaaagagagtcccacattccagggcacatgggaactatggccttctggcagctggagggcagcaggaagggcacagctgtctgagacccgtgtggcttcccagaaagaggtgccacccctgaggaggcaccggtgctcacggactcctggttgccagtcttgccagggcaaaaaggcaagcgaaggaaaccctctcttcgtggggcactctgccttgcagtgtcaggtgagatcccggggggaaagctggcttgagctcctctggaatgtgcagggaggactccgtcaggcccggctctgcctccaagctgggcagcaggcgagccccagagctccaccagccccactggcagaggagggccctcacgaggcaggagcccatgattcatgccctgctggaatttgtcgagcatgccgagatttgcagctcctccgagattgggtcctgccctgatcaaaagaaaagaagatggatgaggacactataaataggccagagccacccagctggcctcggggatgcaggcggtatgtgttctgggctctcacgaagctaagaaactctaaatccaaggtgacatcgtggcacaccgccacctgcttcagggggacacaggggacaaggaggagctattggcagagcgctcggttcctgcaagttccaacttctgctaaaattggttaattggttcctttgcatgattcagggcacacaggcttctctgtccacaaaatttgctcgcctgcacacccagagaaatggacttggcttggtttttctgaacttttgcctctgcggaatcagcagtggacgtgtgagctggggcctctgtccctgtcatgtgaggaggtcaggcaggacaagcaggaagcactgggcaatgagtcaggaggcctggtggggagcttgggtgagtctgttttcctctctggacctcagtcttctcctctggttgatgtaataaaatcctacaaactg

SEQ ID NO: 1880 - DNA, 2044 bp, Homo sapiens
ttctgctccaaggacagtgggtttcccgctgggcacccactcttaagtgcagatcgggagactaagacaggaacacccgccgtgggcaggccaggctggaaggatagaggactgtggtcgaaccaaggcaagttcaactgtgacttatgccagtgtggtcacgaaggcagatgggttgaactgaaaagggggcaccggttcctggcatggaggcacccaaggtcttaggaggtggatggactgtcacatgggcaaagaaatgtcccagggcaggactgcaaaggccacagaagaataatttgggagagagacaacccatgagaagtcactcagaccagggtcagaaacagaacaggaacaacaatggaaagaggatgacaccattgatgggcacctaggtcaattcaatgtctttgctatagtgaatagtgctgcaatgaacatgcaactccatgtgcctttctttctctgcagccttgcaagtatctgttgttttttgactttataataataagcattctggcttgtgtgagatggtatctcgttgtggttttaatttgcatttctctgatgattagtgatgttgagcatttttttatgtttgttggccacttgtatgtcttcttttgagaagtgtctgttcatgtcttttgcccattttttattttttactttttcttcttttttcttctcctttctccttctccatctccttcattcttcttttgcccatttttaatgggttaattggtttttgcttattgaatctagttccttatagattctggatatattagatctttgtcatctgcatagtttgtgaatattttctcccattctgtaggttgtctctttactctgttgatggtttcttttgctgtgcagaagccctttagtttaattaggtctcagttgtcaaattttgtttttgctgtaattgcttttgaggatttagtcataaattctttctcaagaccaatgctgagaatggtgtctcctaggttttcttttagaactcttatagtttgaggtcttacatttaaattattaattcatcttgatttagtttttgtatatggtgaaaggtagggggtctagttttaatcttctgtatatggctagccagctatcccagcaccatttattgaatagggagtcctttccccattgctttttttctgtcagctttgtcaaagataagatggctgtacatgtgcagctttatttctgggctctttattctgttccattgttctatgtatgtgtttttgtaccagtaccatgctgtttggtttctgtagccttgcagtatagtctgaagtcaggtaatacgatgctttgttatttttgcttaggattgctttcactatttgggctcttttttagttccttgtgaattttagagtaagtttttttggttctgtgaaaaatgacattggtagtttgataggaataatgtttaatctatagattgctttggggagtatggccaccttaatgatattgattcttcccacccatgagcatggaatgtttttccagttgtttatatgtcatctttgatttcttttagccgtgttttgtagttctccttgaaaagatctttcaccttcttggttaaatgtattcctagatatttttctctgtgtgtgcctattgtaattgggattgtgttcttgattttctctcagcttgaacattattggtgtatagaaatgctactgacttttgtacactgattttgtatcctgaaactttactgaattcatttatcagtcccaggagccttttggcagaatctttagggttttctaagcatagaattaagttttattttcaacatttcggtgtcaaaagctgaagcgttccatctcagctggctgacctgaacaacattatactaatatttacacaatgaaaatgaacattaatagtcaaaaacacaatgtcaatataaaattgagtttagtctgatgctccttcttggaaagctgacatgaaccatctgcctttttgattatattaaaacctatttttaactata

SEQ ID NO: 1881 - DNA, 254 bp, Homo sapiens
aaggaactttgtaaatgttttatcttaaaagtttacccagagttggctgggattacaggtgtgagccaccgtgcctggctattttctttcttactctaggtttctaaaatcatgcatttgttttatgacaatgctttcctgttattcctgtgtccagacatttggcttttgaaattgctatttctctctcattaagagactttactgccttatataaagatggagggcttaagattttagattgaatttctgct

SEQ ID NO: 1882 - DNA, 2953 bp, Homo sapiens
atagttctctttagttttcccatgatttatcacaagcaagttcacagcaggttaaaataattgaatgcggtgatagcatacatactggcatgattttatgagccgtcattcataacatatttgtcccaaagcataatttccatgatagaactctgattcacatgtaatttttttgcagcgacgacacagttgaaataactccttcgtggaggctggctacattttcacaacgtctggtcccaagctagatcttcgggaaaagggatcaaggaaatgactattcctccaaataaaatgcaacaagaagaatgaaaaaacgtagaagagaaagcctcgtgaaactgagaagcatctgcaaccacaaactacaaaatgtagctgctaaacaaaatgaaagttggatcaaagtggtggcaaatatcaagagtgaatatactccacggcagagtactgcaaatgctgcacatctttcatggattctggtccacctcgtcctcacgcggggatgcagactgacaagcttccaccatgaagggttgtcatttgccatagcagggagaggaaaatggagcaaatcagtcaccagctcgtcatacagaagagtgtcccacgtcatatctgctgatatgttatggccaaagtacatgactatctccaaggagctgagaggtgaaattcggacatttgtctggacggagtagaaccaagagagtcgtaaacatcctgtggactacacaccgtttaacaagatgcaacagtattctggctttgcctttcctggagcccttaaacaggctgaagtgaaaagcaccatgacctgtcactacaagacgagaagcctcaggagaaggaaggagatcccttttcattggttttgccgagtttcccgagctccatcctcctacagttaaatcaacactctttatccttagactgctgataatctcaccaaccgcttcctggtaagatctgtaatgcgtgaggtcttccttcttagttgtttgcaaacatcagtgattagggacaattagggactggtgtgcctgtcattcttctcctttcagctgaggaggaaatcctcatgcaccgttatcgggagtgagacttcatctgtcagctgcagtctcaggaatccacgggttcattcagtcgcaactctaatctcactaactttatctgtgttcctcaaatgccttagactatttgcttcccactgatagggaaacctgacatctcattttctcagtgtccagacaaagattcgtacatagcaagaaactaagataggtgttacagaacatggagggaaccaggaaaaccaaatagaggacccccttcatggggcttccaacacgacaataggcaaaagagaagaaacatacatgtaagagacaagcaaaacccagaaccatcacttatgaaggatgtcctcatcaccctcttttgctgcctgtcaaaaccggtgagggctcatatgacaccttaattatgaattaatcttcgttcctcctacaccagcacttcccctcaccccagtcgaagccatctctttatatttccatagcttaaaatgctatttttggttctagatgctttgcctctagatttggatactgcatccatattgttgtatattttttcctttctatcttttccacaatgttttttttttttaacttttaagtttaggggtccaagtgcaggtttgttacataggtaaacttgtgtcatgggggcttgttgtacagattatttcatcaccaagatattaagcctagtacccattagttacgtctttcttctcccaccctccaccttccaaaaggccccagtatgtgttgtacctctctatgtgtccatgtgttctcatcatttagctcccacttataagtgagaacgtgcggtatctggctttctgtccctacgttagtttgctaaggatgatgggctccagcttcatccatgtccctgcaaaggacatggtcttgtccttttttatggctgcatagtattccatggtgtatatgtaccaattttgctttattcagtctaccatcgatgggcatttaggttgattcaatgtctttgctattgtgaatagtgctgcaatgaacatacacgtgcaggtgtctttatcatagaattatttatattcctttgggtatatatccagtaatgggattgctgggttgaatggtagttctgtctgtaggtatttgaaggatcaccacactgtcttccgcagtggctgaactaatttacactcccaccggcagggtcaaagcatttctttttctccacaacctcgccagtgcctgttgttttttgactttttaataatagccattctgactggcgttagatggtatcttgtggttttgatttgcatttctctaatgaccagtgatgttgagctttttctcatgtgattttcagccacatacatgtcttcctttgaaaagtgttcatgtcctttgcccacttctttatgtggttgtttgtttttttcttgtaaatttatttaagttcattatagatgctggatgttagacctttgtcagatgcatagtttgcaaaaattttctcccattctgtaggttgtctgtttactctgttgatagtttcttttgctattccacaatgttttgtgcaagataagtgcttagcaaatgcttgtaaaggaatgcctgcaccaggaaagtccaatagctatgaataaagaaagaaaggacaagttccaggggaggtgatttttttttcattttcatttttttagacagcttttaaaggaatggagtagcatgttcttctggagcaggagttacaaattggacctctaagggccacattcagcctatccacatggttgcagcactgacagagtgttttgaaattttaaactctgaatacttgtagataacatatgcatgccacaataaactgcatttccatc

SEQ ID NO: 1883 - DNA, 2755 bp, Homo sapiens
aatgcctcaggactggaggtcctcccactctgctgatgtgggagaccccccacgtggggactgccagtataccgcttcccttcgggctggccagtcctcaagtagagacactgaggtagggcaagcgcatctacggggaagagcgctgcctcgggcgttaatgggagagagagctgaggcagaagggggatcggaactcccgctccagaagcgtgaaggtgggggtgtatgagagcacccacccagaaccttgcaggaaaaagttgctttgcacatgggtgaccccgcaggccacatcatccacacatccatacgccgccccgtaggtaaggggtccgggcctccaggacaggagactcagctctgggaggacggccaccatctctggctcagtcacatttggtccccagattctggcaaccctgggtaaaagctcagtcacctgacctagtgacgaccacaagggcactgggaggcatcccaagacccagctcactccagggctggacctcaaccttgtacctgcaggaccacccaccaggagacagaagagagaaaactgtatatgaagacaaggatttctccagaagagaccaggagcaagtataaggactggaggaataaaatgggctacggaacacaggcagatgaagcaaatcacccacccctcaatgcctgctcagcaagcatccacgcctaggaaagggccccaaagtattcctctgaaggtctgggaaaggtatggtaattacaggcacacattatacaggatagctcaatgtcagcagaactcacataaacaggatgaacatggtctacaagagtctgacctaagctgtgctcccaggacagagcaggggcaattacgggtggagctcctgcctagaaggccagtgggtaggggcctccgatcctgggatatgatgcctcaatgtgggctctgatcaatttaaagatttcttatcatgggtgaaaaccctactaaattttttttttttttgagacagagtcgctgttgcccaggctggagtgcagtggcgtgatctcggctcactgcaacctcctcctgccaggttctagcaattctcctgcctcagcttcctgactagctgggattacaggcacacgctgccacgtccagttaatattttgtattttagtagagacggggtttcaccgtgttgcccaggctggtctcaaacttctgggctcaggcaatccaccctcctcggcctcccaaagtgctgggattacaggtgtgagctcatgcctgtaatctgccccttcatgctaaggtaaagctgctcctggctcccaggctctatgagtgctctgatctcatctctggaaccggcctgtaagcctggcaaacatcaagacctgaccccactgcttacctcaatgggagccgtaatgccttgacactttcgtcccaagccagagccttcccgccagcccatggcctgcagcatcttgttgccaatgttactgtggtcaatgccatctttggtgggttgctcgtaattcctgccagtggcaaacacacagttacttaaaacagccagggccccagcttacgaactggaaaatgtgcacatcacatacacagtgccggcatcaaactgcttcttgcgcttgggctctggaggttctggaatgccgtacttctcccgtctttctgcagctcggtctcggtatttcatctacatgggagaaaaaacactgctggaaatgttcacagacttcaacctgtaaccgtctaatgcacctattcaaaactatcccctcaagtatttttaaatctgaagaatgctttttttagactgctctgaaataccaaattcccttgttcccatcatcatacctagtcatatctgaaatgttaaatttgtaaatatgaattgtgtggaaccaggggcagaactatgtctccaacaagcagttttatttaattagccaccctctgtcaagctactcaaccagcccactgggcagtgggtacagcttgcgaagaggaaggcagagttgcccgttctcctcagcatttggacaggcatacctccaacatttggaaaggcatacctccaacatcaaggaggcttccagagacctgttcagcagtcgctggggaggtggaaccatagatagtagggcaggaagggtgtggggagaagaaaagcaaaagccttaactacaaacacttcagaaatatctcaggtgggagatttcaaacccacttgctcatttctaaaccacaggcctctatttgcatttaaatccctgcccacctggccgccaacctgccccaaccaccagcactaactgcttgcccattattgtgtcacaggcttctctcttgcctttgttcccagatctgcttgccatgccctgcccacccttcctttcatatcacctgcaataacctcacgtcctgctgtcccttgggattaatttgaagcgcacttctttgcccatgaaggcttccctggccaggccaaactagaccactctctccataacaaaatccagcgtatttaagcagcaagctctggcattgctgtgagagagtctcggcagtgtgcttctgccttgtgcacccttatgatgaagggacaatgtgaggctcacaaggcacacagaggctgggtctaggctacatgaactacaatggtcagatgacaagggtatgacaaatcctcctaccctgcccctgggatctggaactaaatgctacaaataaaagctaaaggcaatt

SEQ ID NO: 1884 - DNA, 1894 bp, Homo sapiens
atagaaagacaaccacaagataggagtttacaaagcccaggttctttctgatgagtgttgagattcatctacataatatctttattacttacagggaagggtgatgttattggggaagacgtgcaaatgccagtgaagacagagagatacagtaggcctgaaatggttagaaatagaagaatagaatgcacattcaaggccccgagagacgtggaaactggacactcgctggaggaggaagcaggctgggacgtgggagcgctgaaatgctttcagttgagccatgagcctgaaaaacacacgattcctttcccagagtagaaactatttttccctgattaaaatcgatgccgtgaaactgggctgaactctggctgccaggctttatgccacagggaattttgtgtcagagcgatctcaacctcttctgggaggtgatttctgaagtactgcaccaaaaatgatttcacttataacacaaatgcacagcatggaccacttaggagttaaggaacgaaccaggcacggtagcttacacttgtaatcccagcacttggggaggctgagacaggaggatcacttgaactctgaagacggaggtgggaggatctcttgaccccaggaggtcaaggctgcagtgagccaagattgtgccactgcactccagtctgggtgacagagtgagaccctgtctcaaaacaaaacaaacaaaggagttcagaaatgatctggcctttatattcctgcctgatcgtcagtgtattcaccaggacggaacactgactggaaatcaggtcctagctccactcctggctgggaaagagcatgaagtgttctaggaagaaaagtcctcctggaagacttggcaacagccaggagtcctgagtgaaccgctgtccttttgaatccctgagacgggctgcagggatgaggggctagaactgacaggaagacaggacagagagcagcacagcctcagaagtgcaggacagaggtgacccaggcaggcatgacgggctgtggcttcctgccctctgctctcacagcacccctgatcccactcactgtggtaccacgcagatgggttggggcctgtaaatgtcaggtgggaccagccagaggagctttgctgccagtactggcatgtcaggatgggggtctggtggtcagcacctcctctggccagtggtcttgtggggagaggcatccatgtggcctcctcctctgtcgggagggctgatgtgcagagaagtacggacttggagggcagctggatgagctggggcttgctcagggacacaggtctgtgtgttgtgccaaggctgaccccctcatcccacaccagaccctgcctctgactctgtgacctcagcacctgacttctgtctctcaggtcatctcccagtcagtaaaacatttgtgtgacgtgaggaggggcactgaagtgggtgatctttaaggccagatgtctctgtaaaagccttgactatcggaagcactgggctagggcagtgtagtacccagggggatgaggtgcatcagagcagcacctgctgaggccaagaacggaggtggctgctgccggcctccgggaggtccccttagggaagcatttcttcaggggtggcccagggacctccggcatcagggcctgcatggggattctgtgccagcccagccctgctaagtcccagccttgggaacctgaggagggtatctgcctatttttcttttaaacatgtttcttaggttattcactaaagtttgagaaccactgctttgtggctttgaaatgttcatttgaatttttctatgattactaagatttttgcccttaaggctctgtatataaacaacatactgtataaaataaactgggaatggcgtgaaaaca

SEQ ID NO: 1885 - DNA, 738 bp, Homo sapiens
acttggaagaagggctgtaacctttagcttcccccagtttagcccgttggccttgtctaggctggtctgtttctgactcttcttttcctcatctaatatagacctacttttcttttattggaagtaggaagaggaaaaatagacaaaggaagagaaaaatactagattaaggctcagatattgtaggcatgagacctggaaactggagactccttttgggacagagttgtagcagcaagcccaactatagaagaagggaactggggcctgttggtggcatggtgaccagagattttggtgttgttttggtgcaacaacagaccagcatttcttcctgatgagagacaattgaccatggagtggttctggccagtctatggagaatgtgcagcaaaggttttcctgtcatctgcttcatcttttgatgtcagagggcctaaaactccaccctgggattatgctaacactgccattttttgtacacaggacccatgaagaggcatgaagctcaattgcacatgtgcatgtttttccttttgtaaatattaatgactcctcctataatctgttgaatatgtacacttaaccactcaacttaccatacgtttctgttcccttttcccctcccttgaagtatctgtttttggcttctgaccagagactacacttcccagcctctgggaatggccaccctgcaggctgaaactcttcatgagaaataaagctcttctttctaaa

SEQ ID NO: 1886 - DNA, 521 bp, Homo sapiens
cttgtgcacattatttaaaaatcagttcatgctgggcatggtggctcatgcatgtaatctcagcactttgggagagaaggttgcagtgaactgagatcgcgccactacacaccagcctgggcgacagagcgagactctgtctcaaaaaataaaataaaatgaaataaaataaaataaaataaaataataaataaataaataaaataaatcatcagttcatgtggccatgttccctctccctttccttcacatattatttccaattgttcagtagagatactgcctattatcaccttgtaaccactttcccttcaagagactatctctggcatcttacctaccttttcttcgaattttaggaactctgtactccaattctctatattccggctttgttccatattcctcttcctgcttattagtctgccagctatcatttacaaaacaaccactttgtatcagacactaagaacataaagtaattccagtctctgccctcaagaagattacattacggtggc

SEQ ID NO: 1887 - DNA, 659 bp, Homo sapiens
tataaaaataaatttatttttagtccatcaaggtgtctgaagattttatgcctaggtatctccatatctaacttgataaggaaaataggataaacaatgctggtaatagcaggaaagtaagtatttgaataagatgtcaaactgatatttcatgtgaacctaactcattttatggtaactaataattatcttatttaaatcaataggtaaaacctgtttagaaattaaaaatgagttacgatttaaagaaaattcagatgactcattgtgagtgctagttctcttgtaggatgccactggaaatgttgaaatgaaaaatattcagccgttggtctttgaaatttcctgtgatgtgtttcaatctagatgcaaagaacatggaaaaatcaaagtgctcgagtggtttaaatatgttttgggtattcctgtttatagactataatacttttccaattaaaatcctcagttgtcacgcagaagaaggttaagctgtatttgattgccagttttactgaaaatgcttagtattttacagtatcaccaaatatattttgtttagccaaggtataggaaaaataaaataaattgtataggttgacttttttctaaaatgtctttattggattgaatgaatgtttatacctgaaaaaaaaaggttc

SEQ ID NO: 1888 - DNA, 1806 bp, Homo sapiens
acaagaactggcggcggcagcagcagcagcagcagcagcagcagcagcagcagcagcagcagcaactggatttgctttttcaccagaggatccagatttccctgtggcctcgcaaacaaaaaagaaggaagacggagcagcacagtcattcctttgtgaaaaaggcattcagagacggggtttcaccgtgttagccaggatggtctcgatctcctgacctcgcgatccgcccgcctcggcctcccaaagtgctgggattacaggcgtgagccaccgcgcccggcttcagctggtttttcaaaagtcatggcgtgtaactgtccgaacagtgaacttcggagatccaccggaggggcgaggccacagctcgaccgcgagcacctgagcatcctgcaccgcctgcgacggccgtcagggggcgcgatgccgcctcacagaacctcaagaggcgcccgggttccggcacagacggcctgcggctccagggggcggaaccgagccgtctcctcaggacctacgcaggaggcgccgtcatccctacagggacacctgagagggcccagcctcctcctcctcaggacctactcgggagacgccgctggctctctaggaacacctggggaccgtggccagggacgacccagcctccttctcctcagctcctcaggaacgactggggaagctgtggcttcatggtccccgaggctgcccgaggaaaggtatttcaggacagccaggagggggcgcacatccgccgcgaaactgtgagcaagagcgtctgtgctgaaccatggcgccaccagagggcgcgcgatcccgccccaaccaacttcccgctgaagtgccagaagcagcgaggagcttcaacttcctcagggcagcacgggggtcgtgttaatttggtgttcttcattgatgatgattattccccaccttctaagagacaaagaccaacgagccaccacagccaccagtcccagaacctgccaatgctggggaacggaaaatgagggagttcaactctggccctcacaatccagtggaggagacgaaactcatctgcctctgtccctctgggcacgcctcatgccaggtgcatctgtggacaggggccatgctcctgggcttccaaagttggagaaagctgccaggctcaggtctgaaggccagaattctacagtaagtcctactgagtcaaggtgggagcagggtcggtagcttccgaggctctgcgggagaatccgtttcctggccgtagaggtggcctgcactccgcagcttgtgctgcccgtctcgaatgactggagtttcctgcttctgtcactacacctcccaccctctccatcacctgctctgctcttacaaggatccgaagaaatggaatcatcgtatcgctgatctacgtaaacaaactgaagaattgtctgaaagaaaatatgacatgaacttatgaattcaacaggtgaagatttacaacttgataaatcaactttgtcagctcgagctgtaaaagccaaaggtccggtgatgatcccatacccttttttccagtctcatgttgaagatttttatgtagaaggccttcccaaaggaattttttttttttttttttttttttgagatggagttttcactcttatcgcccaggctggggtgcaatggcgcaaccttgctggtcactgcaacctctgcctcctgggttcaagaaattctcctgccttagcctcccaagtcactgggattacaggtgcccaccaccataccaggctaatttttgtatttttagtggagatgcggtttcaccat

SEQ ID NO: 1889 - DNA, 567 bp, Homo sapiens
cgaggtgggtggcctaggagttggagaccagcctgggcaacatggagaaaccccgtctctactaaaaatacaagaaattagccaggtgtggaggcacgtgcctatagctccagtatttgggggactgaggcaggaggatcacttgaacctgggaggtcaaggctgcagtgagccgagattacgccactgcactccagcctgggtgacaaagtgaggccttgtcttgattaaaaaaaaaaaaaaaaaaatccatacaccttcactctactttagaagcagtcatattgaaaaaaggagaatgatctctgaatgaaataccacatttcctcctttatcaatttaataagttttgaggaaaaaagatgccattatttaaatgtacagatgaattgtaagatgcaagcaaatttcagaactatcagaatgtgagaagttattcatcatagaattaagaaatatgagctctcaattctctttaaatacagtgctaagagattgtgacattgttttttctttttaatttttatttgtgtattgacattattttttaattatttagggtgtgct

SEQ ID NO: 1890 - DNA, 677 bp, Homo sapiens
atgttggaatttctgatgaatctgcagtcagcattttgcatgaactgtgtgtggattcattgcctacattggatgatgaagacttgagtgttgctactaaggtaaagtggtctcttgtaaaattaatcttctcactctgagtgtagttttgcatagtatttacttttcaaatttagcagtggtttacctatcattgttttatggtggtaatggaaagctggtcagagaaaaacatacacatggctagttgattcaaaaaatgtgttaaactttggtaactaataaagattggtaagtactgtgacagggtgggagctgaaaaaaaatgaactggaaaataagtagtcacgggaaaatcacattaggaaatgctttctccaatagaggaaatatgaaatttggttaaagtttatttggataaatactaatactttgacttttaaatcatacgagtgtgactttcttaatatttattcctgtataaaccttcagtggatcaaattgtttgcagtaatcatggaatcctcctggtaatttttagtggcagaaatgttcagcacataacatatagcttttgttcttggaaacttatcattttggtgtcatatagtttttaggagagattgtttctctacttatattattggttctgtagtgagactaaaaaagtattaaaa

SEQ ID NO: 1891 - DNA, 686 bp, Homo sapiens
ttgcagcatcacagaaaatgatgctctctcctgccaagtcccattttttgggaggaggaaatggattaggtcctggaggttgtcataaatgcatcaagtgactttctcagcatcatctgaaacatgcagccatccagcccagaacacaacaagaatagagttgatgagccctcttctcctcaacaaacacctgtgaaaaatgggccaattcacagctgcaatggttgggagaatttcctgtctgggagtctggaaactgccaagagtggaaagctgcagccagccagcgaggcctctgttgtcactggcccaaacaacaacaaaaacaaccgcaacaacaacaacaacaacaaaacatgccacgtgtgcactggcatatacaaacacgcccacagaaccaaaccaagcggacaaggcttcaaggagagcttctgggcggctcattcccgcggcgaggcatatcccttggcatggtgccactgcagcccagctcccagcccccccgccatctgtcatcagcgctctgcctactgtggcatttccctctttgctcggcacctctccctattgccgccatatgaaaaaggaggtgtttgcttccccttccaccatgattgtaagtttcctgaggcctcccgagccatgctgaactgtgagttaataaaacctctttcctttataaatta

SEQ ID NO: 1892 - DNA, 1018 bp, Homo sapiens
gagagagggtgcgcagacggccagccgggccgcgccagggacatactggagacaggaagtggctgagagggggagagagttggagagagacggccgcggaggacacggggacgggaaagtctgagagacggggagagcctgacccggcgggacacaggcagaaagaaacacgcgagccagacagacgcagaagaaacgtgcctggtactggataggaacttcatggaatggagctaatgggccgtagggcaggtttgagtcgtgccaccctggagcagaaggtggagggtagggataagggggtggagcacctgattccaatcttgccacagggaagaagagtctgtgaagaaggtggagagaaactaggagaaaagcacaggatgtagaggtctattcggcataatcttctccctcattttcatcttcaccatcaacagagagagcagcatacttgcttgcagaactgaacttctgtaacacaacgagagtgacaggataatgaaggccctgaattatcacatcaaaacccaagacacaggatactgatcctttggcaatgggggatgacagtcagatgacacccacttgcttgctcatcagcattgtccattggagaggagctagggaagagggtcagaggcacatgcgatcttactatagtctcataccacctctacaccttgcagaagggatgagaacaaaggaagacagaaaccaggaaaaagctaaacttctttcgctatttcagtaaagaccaatgtcttatttccaaacactttgtattccaaatggaaagaagtccaacggcaaaaagtttagaatactaagaatttttaattcttagtaagaatacttagaattctaagaatttttcttagaatgaaaaattgggagcagccttcaacacttacggaagctggattttcctcaggtttctttggctcaggtgcagatctggagtcttgatcctttttgccatctttcctgcagagacgtaagcataaaaccatgtctt

SEQ ID NO: 1893 - DNA, 504 bp, Homo sapiens
agtgcgacaaggcaggccacgccccctcgctccgcctccgcagcttcgggtagacacacacaaacaaccagcttgctgcagcctggcacaaagagggcgcactgcgcaggcgctgccagcgagctcttttgggaagaatcggtcccgcgaacaatgaaattgggtttccgccccaccctctttactcctccccagcacgcccctgcgcttcgccgggctagggagtggtggtactgaaatgtcccggcggagtttgttgatgggggtggggaagggagggggcagggggagggcggcaggaagaacgggggctgggaagaggggatgactttggcaaggccacggttgcctcctccgctgctgaccttggggaagtatccgttttattttcagcccaacataacagcgttatcattttaaaacaaagatttctaagtacgctgtaaggatttcttccctagcaatcgtgaagaaaatcagtctacatttaaattttatctactg

SEQ ID NO: 1894 - DNA, 215 bp, Homo sapiens
agatgatgctggtgcttctggtccacagaccacacttgagagtctggcttagatatcacaaaacagaatgctgaggaaccttgtgagcctgaaggctggaacgcagtcgacaatcgtagtgctccctgcagcctcgacctcccaggctcaagcaatcctcctgcctcaggctcccaaacaaatgtacttttaaaagcggaaatcaagatgtgaag

SEQ ID NO: 1895 - DNA, 1028 bp, Homo sapiens
gagggagtgggcttattttcttctgctcttctaccatgtgaggacccagctttcaatcctctttgtccttccctctcttctgccatgtgaggacagagcattcatttcttctggaggatgcagcaagaaggcatcatcttggaagcagagaatagccctcatcagacaccaaacttgctggagccttgatcttggactttacattctccagaacagtgagcaataaatttttagtgtttataaactacccagtctcaggcattttgttatagcagctcagactaagacagactaagacaatatacaatgccttagtttaatactttaatactttcatgaataacaatagtaaataaatgaatacaattatttaaattatgagattgttcattgtctcattgtctagtccttacctgtatctgtctctctccacattctgaaatcgaccttgtgatttttgcataattgtgttatacataactgtatacccagatgtccctcaatttcatatatatgtttacaaaatagacattttatcttgctcttctctttcctttttatttgatacttttcttatctattattggtttagctattcctagtggcctaaagatgtaattttattgcaaacatctgaacaactcaatatattcttcacactccctgcttactttaaagctttagtatttacacagttggggatatatctatatagaaatacttatcagtgaagtaaaccttttttccctgatgtttcatcttaatggtaaaatcatcctcctgttgccattacactcttcaacttatgtataagaattctgttaactctaagcagcatgtttaaagtaggttagttcaaagttgtgagatggttgcacattttcagtaggtctaaaaattaagttccacattgaattgttttaaagcactatggcaaacattaaagtgtttaattcattattgaaacactttcattacagcaacaacagtttaacatcctgcagtggtaattctaaatgaaaaattaa

SEQ ID NO: 1896 - DNA, 2355 bp, Homo sapiens
gcagataatttctttattgaaactatcaggaagttttactatgaaattttacatacatgatggaaagtggaagacatataccaattatattccaggaaaaaatactttaatagtattgttatatagtgtattggctaattccagtggatcctcatctctcactgctgacattatctccaatatttgactaaaacaaaacaaaaacaaaaatggttaaatctccaagtatacatttagttctaaagctatataatatttttccacacaaaggaaaatattggcacacctttaatataataaagcttaacagttattaagtttttcagcaatatcaatagaaaaacttactgccagtaactggaaacagatttatggactgtcttgcatataactagagctaagaaccaggttcaagtaaattattaaagcagccatctgtattatgttcaccaattatagcattaactgagtggaaatgaagagtccttttcaattgtgagtcatagcatgttcattagtgggtcatgatgagcattttaaacattgacaagtacattgtactcaataagggtaagtactgttccattttttgttaggttttattatgtatgtgtgtcctaagtcacaacgtaatttgtactgtgggacagcagccacagttggaaatctactgctagagaactagtccttgagagacagcaaatgaaggtattaggttgctgcaaaagtaatatttacttggaaaaatgtgtggttattgagggcgagggctttctgtacctctacccttgcgagagaaataagcccaggtgtccatccttcagtttctttctttctctgtctctctcttccttcccttccctcccttcctttcctttctttttctttcctttcttttttttttcttttttctttcttttttgagacggcgtcttactctgttgctcaggctggagtgcagtggcacgatctcggctcactgcaacctctgccgcctgggttcaagtgattctcctgcctcagcctcctgagtagctgggattacaggcacctgccatcacacccagctaatttttgtatttttagtagagacggggtttcactatgttggctggccgtggtcttgaactcctgaccttgtgatccaccccacctgggcctcccaaagtgctgggattacaggtgtgagccaccgcgcctggccgcatctttcagtttctgtgcttacagtaatgatgatccgtagtgtctccatacttattatatataagtggaagatttttaatacatgaattagaaagttccaaagtccaaattgaacatttaaatattctttgcctaagctttttgttcccttagtatcttaaatgttaacacctaaaggaattaaggatggagatctaagattaatgggaatttaaaaaattgttttgtaatgtgacacaaaagccttgcttgatgtttatactaagcaaacactacactaaaattttatctgacagtcaagatacactaaaagcaaatctattaacatttaaattaagacagtgaaaatccatttttcttaggaaactactgaatgtccctctgtatgcacttctcagaattggaactcttgattaatgctgctgatgacacagttttgaaggtcacagcagctttgctaagattatattgcatagcaaattcattttattgaaatcgcttataagaaatctattgggctgggcccagtggctcatgcctgtaatcacagcactttgggaggctgaggtgtgagccactgtgcccagccaggcaaaggtttttaaagtcttgcaagatctacatgattcctaccctatctcctttccagcccttccccatactgatacaagttatagctttaaaaaaaataattgccactctcctgcttaaaatcctttgggtagtgataaaatctaagcaaaatgctggcatataagagccctcacaatctgggctcactctaccttcccagacttgacttctgcttacactgtgcatcctactttctgccacacttgttcctctggattagccaggcccttctgcagtctgcctttgcttaaggtgtttgtttgtctttctctggcctaactcccagtcatgggtaaacaactgaaatgtcaccttggtataactctctcctgtttcccctcaaagcagacagttgatgtgccctatggtcctggtcatagattcctacttgtataacagcactactatcttggactctgtctgcttatgtgctccaggagggcaggggtcctcgcctgactcactgaatgccttatctaaagtgccaggcacagtgtacctattcatctggtggat

SEQ ID NO: 1897 - DNA, 3210 bp, Homo sapiens
tgaaaactttcagatgcttcttcattgttttagtcatttaccactttaatgaaattatctggcaactttattgtggtgggtggggatcaatgacggtgtaatgaggcaattagcaaattctgatagttccatctactccatgtgaaagtctcttgatgttttatatggtactcttattaataatcccagagagcaggggttggcaaactatggcccatgggctaaaatggtttttacattttaaaagggttgaaaactttaaaactggaaggatacatgacagagactggatggcctacaatgcctaacatattatctagccctttacagaaaacaactgaccaatccttatgagaccagacttgcaaaaattacagtaacagagtgaaaaaccttcttgaagtgttaggaggaacttgagtcataatttgatgttgaatcagagagaacaactgtttgggcttatttgcctcagagtatttgcccagcctctggtaactatcattctattctctacctccatgagagcaactttcttagctcccacatgtgaatgagaacatgcaatatttgtctttctgtgcctggcttatttcagttaacatcgtgacctccagttccatccatgttgctgcaaatgggattcagaatgtgttgctggacttcaagataggaagaatctttgccttgatggctgatgacagtaaccaccccatctaccatcatctattaaggatttactgtgtggtcactttacagtcatccaagtaaattttcataatcacctgattacatgggtaccgcttttcagaaaaagaaacagatttctggagggattcagaatccatggctggaagaggtagtaaggccattgggagggcatgcctctcctcagcccacccccaccctgtgtgggtctccattctgaaatttccattcagatgacccggtcctaggcagggaccaaaattccttgtcagctgaggaagtcctgaagaaacatcctgaagatgatgactgcactgccatcgtgggcagatgcagcttccatctacctgagggctgaaggggaaaacctttcacacacgtgaggaaggcgcagctctgtggaaaggtcactagaatggcagcggcagcaaatagggctccaatgcacgtttgcagttaactgggtccaaggagagcatggccctccacagcaagtttgctctatagaataaagtcctgagcttgtttttatcacagttagacagagaatggtctcttgtttctcagttatccagggaagaacagtgtatattctctgtagatgagtgttgtctaatgtagtgattaatctctgctagtgttaggaaagctccactactgtgtgtgtgtgtgcgtgcatgcgcgtgcgcatgtgcacatactgcagtcttgactttccaattacaaaatgcctaagtcaggtcacattgtcttcttccagccagtttctaaggcaggcaatggaaacaggagccgatgccaaatggtctagaggcagaagggctgcatgctttgcagggccagccccaaggctgccttccagagctgcactttctctggggacagtaaactctcaccgcagctgccagccccctgtgcttggccatgcccctcacatggacttggaatcagtgtctctcttgctgatgagcacctccaggagcctcagtttcgcctttatgtgcttatattcactgtattcttcagccataggagtgcggtcttccttctggacatttctaatgcaaataaaggaaaaaggggtctgaggatcattttctgtctttgctagatactattcatcgggcaaattatcattgtttagaaactttgcagtttatcaacttgtagaatcagtgttgccgagtggcccttggtctcaagactggggctggatttagacaagtaatgaaaatgtttcacccagaaggcaacatgcaactgagtttttatatagttaatctggcatcctgtatgataagaaggctaagaaatgcagaaattctctctgctaagtatgaattcacattgagctctcatacaccaaaatcttttattcatacttaatgttttctcattcttatatatttcatctcgtgaaattttaaatttttaattagcaactggtccacaacttagtttttttttttttttttttttccaaaaacagatagttaatactcctacttatcataaaactgtgttagaattcagcagctggattacataatactattataataagcctttattattgagtaactttacatacataatatttatatgcacaagtatttgagagcttataggtcaagccctgtgctaagtactttgtacccatgatctgatagaacccttataacaccttgatgagatgcagccattttctacacactacacatgatgaaaccagcacaggaaatcagataacttgcctgctcttggccaccacgcggtgcgctgctgctttgtgttttatgggaaattgcacatggcaaacattcaaccataggcttcctgcctttattattaaagggcaaatatgggtaaggaggatagcatggggcttgatttgttcaatgacctaaaaataaactgatcttattcataccctgccttgttctaggaaaggattctagtggcttctcagcagagggcagggcaaggaacaggtgctcaggaattggagcatctggcacgcaggcccccactgcactctgaggggcttcactctcctcagacacgaagtcatggaaccagagcttatctcctaagtccctcatagttctaaacttttttgacaattaagttaacgtcctccattgacattttcttaaaacctgggtggtttgcgtaattctacatgtataagatatctgtgcataatgtgacttagaataatataaaaaaggataagccaaaaaataggcttagatgaaagactggaaagatacacgtcaaaacattaattctgacttgtctttggttattattgttttgggaattactacttaaatttgcttacctatattttctaaatactgtgcaatgggtgggaaatgaaaagcaagtgtttaggtataaaaatatatgagacatatccaaatcagagatcctaaaagtaaattcatacaataattgttaaactaaactgaaatacaatatattttaaatgacaaagtt

SEQ ID NO: 1898 - DNA, 371 bp, Homo sapiens
ccgatggccttctgccacttagttaatgtgcacctggcagcttaggtggccgcggagaaagcaactttggctgcaccaaggtccggcacaagtctggagaagcttcagccagttccagctttggtatcaggatgacgctggcctcataaaatgagttagggaggattccctctctttctattgattggaatagtttcagaaggaatggtaccagctactccttgtacctctggtagaattcggctgtcagtctgtctggtcctggactttttttggttgatggctggagtcagctggcaaatacagaagcaggaaacattacactgaagctcagaaaataatatccccaaatgaaggcatcagaaataaaa

SEQ ID NO: 1899 - DNA, 1108 bp, Homo sapiens
agtgaatgacctgttgcagtgctttcattgaagtgttcttcgttccctcagcaatatgattgtgatgactgaaaaagggaaactgtgccactatttgtaccatcattttcaccaaaatctaaaaatgctttttatgacgtatggagacattcttcatgtttgtttcagtggacactccttgcagatgtaaaaaactgagaaaactcacttttggaaagtgacctaaagagtgtcattgaagtgaattttaagtaggcacgatgattgttttcatggttgctgttggatcatatctcaggagctggaatgacagacattattgaacaaagaaatcaggatagtggaacttaaagggcttcatctcagtgctttcataagtatgaagtgcatatatttataattttcactaatcacagggtaaatataaaattgattcattaaaaatgtttcataagaattcaaaggacatagaattttgtgaaatgtagtatttttacttaagtgccttttctctgcttctaccccacagccaattttttataaaccagttgataacataagtagtttttgggggatgatacattacttatacattttctatgtagtaaacatgtatgtgtatgtgtgtgggtgtgtgtctaattactttgttggacagattcctgtggtttggaactgctggggccaagtttatacaaaaatctacatttttgagtaaactccccatgactctagtaagtttccacagtatttgagtattctttatttcctaaagctgtacaaacatcagataatcaatatttgtaaggatcgataatataatttataatgaaattgctttatcagctattaatgttaactacatcatcttcatatagccttataactcatttgtgctattccattttcctctgttccttttattttcacttcccttgtaatgttagtctctttgtactgatttctgaagagttcatttatgattaaacatgttaacattttgtctagaattgcaaatatgttttttctcattcattttactatggtgttttattttttggttatacagaagttgtatattgaaatataatcttgttctgttttatga

SEQ ID NO: 1900 - DNA, 522 bp, Homo sapiens
cttaagataaccctgtgaaggctgagattgatatttgaaattcacaactgatcttggagcctggtacagcagtcatggatttgttcatgtgtggatgtgatggaactgaagtcgctaggttcatgctacctggaacatgagactgacaaatagaggagcactgagtcaaatgaatctcggagaaatggagctggaagaaaactggaagtttcattcttgttgcccaggctggagtgcaatggtgtgatcttggctcaccgcaaccttgacctcctaggttcaagtgattctcctgtctcagtctcctgagtagctagtattacaggcatgcaccactatgcccggctaattttgtatttttagttgagatggggtttctccatgttggtcaggctggtctcgaactcccgacctcaggtgatccacctgcttcagcctcccaaagtgctgggattacaggtgtgagcagccgtgccctgctgaaacttatttgtttgagcaataaaagccacatatttcctc

SEQ ID NO: 1901 - DNA, 2946 bp, Homo sapiens
ggggcggaagacaagacaaaaatgactccagttcgctagacgcgcagaggggcggatagcgcgcggaccccgccttccccaaccgagtgtgggttccagtcgctggggaggacctggtggccccctgaccttggacgagccatattggacgccccggcgccgtcccgtcttccacgctgccaactccaccgctcccgccccgaactgcggcctaggagccaccgcagcgcacccagcccgcgagtacagccgcatgggaataatcccaacatttgcctgatttattttcttccctctccttacgcttgtacttgtttttctcctctcgctgttttcccttcacactaattcgcaacctggcagtttgcaaagaggaaactccctttcggaatggaaagccgcttttgcttcttgttgttgggggtggaaaacattccagcgagaatgagttcaaaaagaagggaaaccgcgtcactggagagaaagtaacattaagagatcgatgaggacggagtgggtaggggggacagagagaggaacgtctgcaacaggcatctaaaaacaagcgtggaggagcaaagattcccaatccccgggttactaccgcgcgcgttctgcgcgagccattgcaatgccagcatttactgtaagcagaatttgaaggcttttgaaatctttttttggtaagacttacctttctcttcggcataatgactatgtcggtgaagcaaaaagtaaagcaacggactggaactgctggcgccgccgctggatgctgcctctgcctctgcagctgctcacgcgcagggcacgacgtagcccggcctcttcgacctgcacctccgcggctccctctgggggccctctgctcgcctccctgctgctccaatgaggagccccgccagccggccgcgaggccccattggctgaggcaacgttctaaattccacgagggcacgcccacctccgcgcgcggtacgcgctgttgtagtttccacttcaccgaaaaaaatctgcctggcgactgagcatgcccagttcaactagtagcctccaggccacacaatcctgaagtttcattgtttcgctgctctctctttgagattgtaagaataagaacagtgtgtgtcttcataggaaggaaaaagagtaagaatgaatacgtaaactttataatgtaaatatatacacagcaggtaccttattcatttcctacccataaaggcttttaatgaatgttacatggtgggaatctgtaaagcgtgggaaggtactctgtactggaagagcgtggcaacttctaaaggcctcagtttccccccctagatatatagtgacaacagtccctaaaatcacttagctctaattttctgaaatctgtgattataaatcactcactaattcagctaacttcaaactagatgtgaagacgaataggacatgtttgttacggaaattaggaaaagaaagaacaaggcaaaaactgattattttatatttgagacatatatttgaatgacacccgtcatgttacactttatgcgtaatatttctcaaagttctgcaaggcataaaatgagcattgcaaaaatatttctgaattcattttatgagaccagatttactctgataccaaaaccagtgaaagacttcaaaagagagttacagaccaatatcactcataaacatagacacaaaagtcgtgaacaaaattttagtaaatgaaactcaacaacatttaaagggacaatacatcatgacctgtggggcttatcttgggaatgcaaagctgcttttttaatatctgagaatcaatcaatgtaattggcaggattaatagaataaagggggaaaaacaatcctttcagcagatgcaggaaaagcgctagtgaatgggtaagcaaattgtgatgagcacatgcagtggaatactattcagcaataaaaaacaataaaaaattttcctacatggatgaatatcaaaaacaaagtgctgtacgaaagaagtcaaatacaaaagaccacactgaatgattgcattcatatgaaattatagaaaaagcaaaattgggcaaagttagtttcagaatcatcttagcaggcaaagctcacatcataggaaaatgtgttgaagccttacattacaaatatggccaaatccactttggtaacacagaggctgcaaatatgtattaaaaatatcatgtattaaatatgtattaaaaaagcaatgaagtttaatatttcactttttctttagtaattttcagaatacattaattgatctagtactctccagaggtggttgattactttcttttttggaacatctttatgaactcatggatttttacatatttggtgtgcatcagtgtattgctatcattattattacctttttaatgctcctattaccacatctttagccaatgcataccctttcaaattagtgcttgtgtccttttgacatgatcttaatcatttttgatagattccctgttcttgggcattcagtgaatgacaatagtatactgaaacgaattaagataaaaaccaattgcttagagctagataaaaatttacaagttaataattttatcattaaaataatatttataatgaagatgtctttcaagatattaatttgccaaatacttgatagttaaataaagaaaaagtcagtgaaaacatttttagtaagatatgtgtgagaaggatactgagtagcacttgcaatctggactggatggctatttttcttcatggagatggaaaggtgccacaacaaaggtagtgctaaggtgaatatttctcctctgtgatgaaaaataactcacaaaattggcttctttgttaattttttttcaaaaccaaacactcagatcatcaacagcaaacaaaattgtgaatgtttttactgcacacaataaaaatgctacgatgaaa

SEQ ID NO: 1902 - DNA, 1536 bp, Homo sapiens
tcgtccctgttggaggcaagggtctgcccccggctcttacttaaggagcgggacgggggacgagagcgtgcgcggcgtcacacgcacgcttagccaccccccaagaagccgccgccgcgctcaagctccgcgcgctcaggaccaggtagcgtgtagctgtcgtgaagctccctttgctccggttgggactggctgcggatacctgtccgttatccccggcaccaatgagagggacgaacaggaccacctgcaccgcccaccaccctcgctaacaacgctttaaggcctaacgcaggaggcagctggtgcgaatttacaaatcgggtttttcacccccgcgtggctgcaatgtccgcccagttcgagccccacattctcccgctggctccgcctgggggtcgggccaactcttgctgctaaggaagcctcaccagtccccttcccgtttgctacctaaatgtcctcggcgggaaactgctgagaacaatttggggaagcctgaacttgttcctagttccgcgctttattacttgtgatcatgactggtcagaactccgcccggagcctccatttgttcatctgaaaaatggggttgagaagctcaagtaccagaatgtgaaaacgctttctaaaggcgaaggcatggtatcttgtgagatagtaattccttcaaactcacgcataggctattcctattcctaactttgcgatctgctttcactaggcaatccctttccctttgtatccttataattttcacctatagattttacccccagggttttttaatgccctctgaacattatttccatttcagttaagcttgtctggccaaatttggttgtcctccagagtctgacctctttttgcttggcgcttgtttcaccaggttgaagtggtcctttaggtctcagtttttcccgtatggggtgccttacttaaaccaaggtgcctcggggccagtgctagtttcctagatactggaggaaagcaagcaaggaaggagtagagaatccagtcacttgacttcattatcctcttcaaaccgaaattttgaaggacaaggaaaagtttcaaggctgcagcctttcacagtcctctgagggacaaaactcaaatatagttcttgccttgaaggtggtcacaaacaaaaagggtaaatgatcctaaggtttaaatatagacctaaaagagagatatatacaatggaaatttaatcttgtaattctttgcaggcagcagtaatttataggttaaagtcctggttgtagtttaattataaaatatgttcttttattagtatttatcactatggtgacttctttagccaaagagtatctaaactgaactctcagagctaacagaagtaactatgttgcagtgagagcaacagtcctgggtctctacctcttgttttctatgtgaccttggcaattcaaccaacatctttgaggctgtttttttggtaaggaatggaaagaacatatggcaacagggatttgtaaagtaccgtataaatatatatatttaaattaa

SEQ ID NO: 1903 - DNA, 502 bp, Homo sapiens
tggcagatctccaaccgctcggggtcccgtgatttccattaatgaattcgcacactggcgttaccactcaacacaccgacgaagcaagacgatagacaacaattagctaaatctacattattggacatgatggctaagtaaaaaacatcacaccagaatcaaggattttggtatctgcatgagtcctggaatcaatcccccagagatactgatgggatcttaacaatgacagtaattgatggtgtgtgaagaaaaaagggaagatcaggagactttaacctgtggtattcccatgtttagaagcaaaatggggaacaaaaaggaagcgaataacaatcagaaaaataggaggataacaatagtgtaatatcatggatgccaaaggagagtttcaaaaagaagaaggcaaccaatagtgtcaaatgtttcagacaattgtaaaaattcaaaaataaaaatatttaaaactttcaaaataaaatatcaaaatatcaaaataaaa

SEQ ID NO: 1904 - DNA, 970 bp, Homo sapiens
ggggccatcagcctcgctatcacctccacccccaagtgcttggctccccaagggacagctctaaaatccccagaatctcaggctggtgggtccagctgagcatcctagttttcactttctcctcccaaaaaggaaagaaccttggtcactaaattctacgccttctggaaatcactctgctaatgacttcctgaatgatcgactgagaccaacagctggcccagccctgcatggaggagtaagaaaccctcatctgtcagagttaaggggcctgaatgggtacaggtcacattcttggagctcaaggtgacaggccagagcccaggtccccaggacagtgcagcaccttgtccaggcgggcctcccgtttctggctccgggctgagcttcctggagaagaggaaggttcatctgaattgcagaagctggaagcagagagcccagttaggagctactacaactatccaggcaagaaagacagtggcttggatggggatgtggtattgaaagtggagactagcagaggtacttggaaatgtacatcttatagctaccaagacttgctgctggtgtgaatgttcaggtaaaagagagagaaatcaagaatggctctaggctgggtgcagtgactcatgcctgtaatctcagcactttgagaaccgaggcggatggatcacttgagctcaagagttcgagaccaaccagtctgggcaacacagcaagactctgtctctccacccctcaaaaaaaagaaaaaaggaaaggcatgactctgagggtaaattctaggaaggcatgtggggtgggaaatggggccagcggtgtgattaaagaatgtacatggtagtagagggatgcagatctagataatattgaaaggccaggacttggacttctgggaatgggaaacatgatagaattatctgtaattttccagaatcaatgactagttgtttttttaaaaaaagaa

SEQ ID NO: 1905 - DNA, 2107 bp, Homo sapiens
aataaattccacactcctgatcgcatgagcccagtaattcaaggctgtggtgagctatgatcaagccactgcactccagcctgggcagcagagcaagacctgtctcaaaaaatacatacatacataaattccaccctttttgatagcatgttatgaggctcaccaaggtctatcctctggcagtatccctggcctgttctccccatctcccctgccctctgctcaccagttccctaaatgtatcttgatctcactagccctacagactgtgcacagagctgtttctacctccagtgacatgcttccgcccaggcttctccccctcccgcctcaatcttcccctcaccaacttaaggtcttaggggcccttctaggaggcagtccccaacttccagagccagggtataggctacttctatgtgtcccatggtactgccacagaagagtctcagctctctccaggattcagttctaaggtcagtgcctaagataaaaatggagtgtaattaaaattcctcttagaaatctaaggaaggtgccctattgaagaccaacatcttgaggtcccatgtagtcatttcttgcccatgtgggaacacattactgtttggttgagtaccaggtgaagtgattggcctgcagttagggctgtgttgtgcaaaaatcacttgttttggggtgttagaaccacatttaggcgagaagatcacttttggggagcttgggaactgaggcaggccgcaggtgcagcagaggcatgagcttgcccgggcccgccctcttgtctatgctcatggagtgaaggaggggccagcggaatggcccaaacaactgatttgtttttctttttttaaatctttttcagacaaataccattgtgtttaagcgaaatgtgtgtataatgccaaatcactgtaccccacaaccctgcacacctctacactggactgtaatttcttgttcctagtttgtcttgctagactgtaagctccgtgagagcagggaccgtgtctgcttgttgagtgggctttcccctgtgcctgccagcatgcctggcatctagcaggtcttctgtaaagatgggatgagtttgtaaaccctccagcctcaggagtggctccatcctctgaggctctggggccctctggcaggctagtcatttttctgccatgtacgtacaatgctttattttcatgttgtattttcctttctagccagtaagcaagctcctaatgagcaagtttctttgtggtgttatctctgtatcctttcatcaggccagcccagagtaagtagtgcttcgaaagtgtttggtaaatgaatgaattatggtaacccagcccagttctggcatcactgtctgcaggttagtctaattccagatgaaagccccagattcgaaaaagggaagattattcagaagtgcatatggttgtataagaaaaaaaaatctcattaaatagacctgagtaaacttcaaattttgatgatctggccatgtcggagctgaagcttaccagctctctaaagcatttgctagggaatcatgcagatggtccaaaatattttttagaaaagcattcatctgtcccgggatagaagtagaggaagctggtaggcaggcgctagaccctaaagaaggactgctgagccagttcttaagcctgtggtcctgtcggtgaggaaagtgagagcagtccagagcaggtgaaaagagcagagctcattcctccagtggctcttttgcctaaagcagcattcctcaaacttctcactcgaagcattaagttacggtgagatgctaacacacgctttagacttaagtcaaaatttactgtgaagccacagcaaaccatggcttcacagatgaattagttgctacacaaataagttcgatacataagtacagtaattgcttttaaaccttataataagcagtaaattagaagttaaaccatgtttttcttttacgaactgaaagaagagaatgcttttgatactgagaatcgcacactgtgtccaggaagattgttcttgcataaccagacccacaataaatatctacaacttttcttacatgtttataaaataaatcttagaagaaaaa

SEQ ID NO: 1906 - DNA, 687 bp, Homo sapiens
aggggtgcctgaggagaaaggggtgctggttcttccttatatcccctgcctgcctcagctgggctctgacccagccagcagactggagtcctcttctgcatggtaaggaaactgaggcttagaggagttatgaaattgcccaaggtttcacagctgaaatgtataaggacctggacttgcaaatttggcacaaagttcttctaataagaggccataaaataaccaaatgattttttatgtgcctatagaaccaaaagaactatttcagaatgtcagctgaaaagcacgatattccagatagtcttagcaaacggcacaccagaagattatatcccaagcctggctcagaaggtcctatgcccatggagcctcaatcattgctagcacaacagtctgagatcaaactgcaaggtggcagcaaggctgggggaggggcgcccgccattgccgaggcttgacttagaaaccttggcatagtgccttcctggaaatcctggattgcatctaaaaccatgtggcagagggagaaacaacagacaggacatcctgagaagactcaggctgggacgaaagctctgctctccagggacaaagcagcaggggaccagccatgctcagaaatactccactggccagtgcacatttttttgagcaatttcacttgcttcctcaccacctgtcccccta

SEQ ID NO: 1907 - DNA, 456 bp, Homo sapiens
atcatggcaacaggacttttagaagcacgtcctctgaaagccattttctgcctgtggttggaaagggactgtgagtctttcctcaggaagtcagtagccctacctggtgaggtgatcaagagtttgctagcacaagagatgaagcaacaatggccatgagggattcaaggattatgcgtctctgcaccctacaatacaccaactggcagttccatcatttgaaagaaaatcttcaaggtaaagacatttacaatgacacaaaaacctttcaaaggcatcatggtcctaaagggctttccccaagggacagcacagtgtgttccaggccctgacaagaggtttaagacctgtgacacagactgaagctctcctggcatactctgaagctctcctggcaccctcccctttatgcttcacaggtgtttctcctaataaatttcttgtatgtctcatccc

SEQ ID NO: 1908 - DNA, 823 bp, Homo sapiens
gcaggtctgggcaccgtaacaattttgcgctttgcttccccagggctgacgcgccactatgtagcgggtttcgggcgggccacgcgtgcgggacaggaacccaaccccagccgaccttgagctccaggagttcgtctcttacgtctgcggaagtgcagctgcctcagttcttagcgcaggttgacaactacaggcacaagccattgaagctggaatgtcctgttgctggtatttcaattgacttaagccaactatcccttcagttacaataggaaagtgcctctaataaggccaaatatgcgtactaacttgtagcaaccacgtgtccgtgcagtgccacaggagctagagcagtgacaatgctggtggcaacagggcagtgtagcaggtgcttcatgttcaccttttcaaccttttcatttaattgtcacaactcggaggtggattctgttagggacaggctgccccaggaccactccgcccccgctaactcaatgcagctgacccttaccctgaatactctgcagctgcattcctgaaccgttatctaggcgctatagcaaggtcaccagacttgctacaccgaagccctctgggtggcacgggggaggtcatgagaaacgtggattacacccccttgtaaattcctattttcacaagataatatattgtaagccggtcatgagattatatgtggtaaagttaattgactaacaaccccagggtctctctcccccatataaacccctcattttgtaagctcagggctgccacctccgactggtggagaagcctggcaggttaataaacttacttggcctga

SEQ ID NO: 1909 - DNA, 133 bp, Homo sapiens
tagcaagcctccagcgtgcttgggtctgcggtgaccctatgcattccttcagtgcttgctagaacagttttgaaacggtttgaggccttgccctgctccatccagagcaaggttatagaaatttcagacaatg

SEQ ID NO: 1910 - DNA, 638 bp, Homo sapiens
ctcgccctgccgccgccggtgctccgtcgccgccgcgccgccatggaattcgaacgctgacgtcatcaacccgctccaaggaatcgcgggcccagtgtcactaggcgggaacacccagcgcgcgtgcgccctggcaggaagatggctgtgagggacaggggagtggcgccctgcaatatttgcatgtcgctatgtgttctgggaaatcaccataaacgtgaaatgtctttggatttgggaatcttataagttctgtatgagaccactttttcccatagggcggagggaagctcatcagtggggccacgagctgagtgcgtcctgtcactccactcccatgtcccttgggaaggtctgagactagggccagaggcggccctaacagggctctccctgagcttcggggaggtgagttcccagagaacggggctccgcgcgaggtcagactgggcaggagatgccgtggaccccgcccttcggggaggggcccggcggatgcctcctttgccggagcttggaacagactcacggccagcgaagtgagttcaatggctgaggtgaggtaccccgcaggggacctcataacccaattcagactactctcctccgcccatttttggaaaaaaaaaaaaaaaaaa

SEQ ID NO: 1911 - DNA, 3950 bp, Homo sapiens
gtggccagggagccgcaggcaagggactaaggggaggggggctcagtgccagctgcttaaaaatgcccctgtggcagcgaggggcaccagaggctgggtctaattagttgagaagcagtgacacccccaaccactccccaaacaggctggctcccgtctccaggccccaaggagccacacctggaccagaccccaggaaagccaaagatggagactatggtacactcttcacagccaagggcaggggacagaggagaggcggtgcccaggcaggatgcaactatctccaagagatagttagaggatggcagcctatcttgagttctggctgctctgcccaggaggtccctttgaatggccagagatggtctccaatgctgttggcctcctgcagaagaaagagcccaaggctgggaatggaaacccttggttctattcctggctgtgccctaactcttcatatgaccttcaacgcgaccttgaacatgcagcttcctctggcctcagtgtgtccagcgagaggctagacccggccaggcctggtggctcactcctataatcccagcactttgggaggccaaggcaggcggatcatgaggcaagggcgctagctggtgggagccaccccgccatgctgatgtcagagaagcaagaactctggagaagcagcctcctgggaccagaggagggccagcagcaggcagcccggagacagaactaatgtgtctgggggtgagaggacgggtgtgactgctgaaacttcctttcttggtgattccacatcactcctttctgatccctgagcctgtgccacgccctgtgtgatgtgccggggacaccaggctcacccacgcctctccaagcctcccaacagaagacagaggtcccccacagccagagacatttcctgaagacatggggaacacagaggcagaaacagcccatccacccaggagctgtcccccacactgccgggagccggcacccagagccgccaggtaaaactgaggccacctggttcaacatcacctttcacagaaggggaagcagccacagaaagaagggcctcgttaagaagtggaacctgggacccccaagcggtgtctctcatcctgactggggatccagagtaggagggagcctttggtggggtaagtggaatggggcggggtggggggtggccatagacccctcttctcagtaaggccctcatgtgaaggaggcaggggttgggacaagtgctaagtatgcaagactcaagggaagagctgctggagccaggagaagcacctccctcccggcccctctgcccctcctcatagcccagctgcactgactcctcctccaggaagccttctcagcttccccaggggtgggaacctttttgtcctccaggtgtgcttggctgtcctttcttgggctctctctctctctctctcctcatcccacttgagtctgccccctattcaccttgtgaggggaattttccttctactcaatctgaccgaggtcctccaggtcaaggacagcgaggctctcagtcccacttccccttggcacatagaagaggcagtgcgctgaagggacaggtgaaatgattagaccctgcccccaaaccaaggcctggccaattggacagggcatgagacattcagcgtagaggttaaaacgagggccctgggttaggaaccccagctcagttctcagctctgtacccttggaaaattcccttcccatggagctttgtggatgcacaaggacttgcacaaagaaaacattcaatatccaggactataaaattccacaaatgattgtgcttattacattcattatcacgatgattattccagacacaaaggaacagaacgaggcaccaacagcaaggggcaagcagattcaagggccacagaggagatggaggcaaacaccttcccctggtcagaggctgtgcctcagcccttctccctgcatcagtttctccttcagaagcatgggactacctcccatctagttctcgtttctaaacctaggggagatgctatctttgctgcaataatcttagcctacatcttggaatggaaatggccttggtggaaatggtcttcaactcctctggtccaagctcaggccctgtgaccctggaacaatccccttcctggtcctccatgtaggagcaataacattcccttgccagcagcaccagccattctgatgattaaatggtatcggactctgttttccaaactcagtcattcagatgccccctattttatttcttccatgtctgcaaatgattataatatttttaaatgtaggatgagtcctttttattacacatagaaatagctactgtaaatagcaaactctaacactgtgcctaattaggaaataaaggtaaccataaatacagtaaaaatgaaacaatgttattatggtttaacctgatagtgtggcttgcaaggccctgggcctgaagcctgggcaataagtgagagttagaaaggtgtcaaagacatgatagcagcaaactgaggctttgtaccccacggtaaataggactgaaagcaaattcacagggagcaactgatccattccacaacagaatgctccctgtcaattcgctttccattctgttgtgtcctgtctcccagcagagactacaaactccccaaaaccacttacccaccagctgcacgtgagaagccaaaggtagtttatgtgaaagggctttggaaataatcacgcaccaagtgaaggcagaggacacaccttgtcagcttagttctcagcagcaaatcatctcttttccaggataaccctccctgattcttattgaaatctctttgctgaccacactaagctcttctctctcaggggcagtgggagccgtggagagtggaatagaccagctgtctgtgacctgcgagggagtccaatgtcggaatcactccccagccaaatgcacggttttaaaaaatctatttatttatttatgtagagaccaggctatgagactggctaatttttcgtatttttggatagagacaggatttcatcgtgttgcccaggctggtcttgaactcctgggctcaagcgatccacctgcctcggcttcccaaagtgctcaggattacaggcgtgagccacttcccagctacttgggaggctggggcatgagaattgctttaacccggaaggtggagtttgcagtgagccgagatcgtgtcactgcactccagcctgggcgacagagggagactctgtctcaaaaaaaaaaaaaagtcaaggagggtttcccagagtggccacttgattagagacctagcacaggaggaagagatgggcagggagagtgacggggagcagcacagtccctgggagcccgaagtgggtgggcacagggctccctaggagaatggaaggacatctatgagctgtagcccaagaggaagaggtcactggggctagatgcggcagaccctcgcaggctttgggaagggcttcagaattcagcctgagggcaatggggagcccttttgggatattaaacttgagtaagatatgagcatatttgcatcttgaaaaatcattatgggaagatggctgggaagagaggaggagtggcagaagaaagataggttggagacaattgattgctcgatgatataaaatgttaagtaccatgaatgatgctgttaggctggaatgcgccaagcataaaggtggggcatggcatcaaaaggtaggtcaacatattaaataattccatgtattgaaatatccagaaaatatatagacagatctatagagatagaaactggtctgcccaggactaggggttgtctaaggataaggagcttcttttttggatggtgaaataacctaaaatatattgtgccattgtttgcacaactttgtgaatatattaaaaacctgttaattgtactcac

SEQ ID NO: 1912 - DNA, 8708 bp, Homo sapiens
gtaaaggactggggccccgcaactggcctctcctgccctcttaagcgcagcgccattttagcaacgcagaagcccggcgccgggaagcctcagctcgcctgaaggcaggtcccctctgacgcctccgggagcccaggtttcccagagtccttgggacgcagcgacgagttgtgctgctatcttagctgtccttataggctggccattccaggtggtggtatttagataaaaccactcaaactctgcagtttggtcttggggtttggaggaaagcttttatttttcttcctgctccggttcagaaggtctgaagctcatacctaaccaggcataacacagaatctgcaaaacaaaaacccctaaaaaagcagacccagagcagtgtaaacacttctgggtgtgtccctgactggctgcccaaggtctctgtgtcttcggagacaaagccattcgcttagttggtctactttaaaaggccacttgaactcgctttccatggcgatttgccttgtgagcactttcaggagagcctggaagctgaaaaacggtagaaaaatttccgtgcgggccgtggggggctggcggcaactggggggccgcagatcagagtgggccactggcagccaacggcccccggggctcaggcggggagcagctctgtggtgtgggattgaggcgttttccaagagtgggttttcacgtttctaagatttcccaagcagacagcccgtgctgctccgatttctcgaacaaaaaagcaaaacgtgtggctgtcttgggagcaagtcgcaggactgcaagcagttgggggagaaagtccgccattttgccacttctcaaccgtccctgcaaggctggggctcagttgcgtaatggaaagtaaagccctgaactatcacactttaatcttccttcaaaaggtggtaaactatacctactgtccctcaagagaacacaagaagtgctttaagaggtattttaaaagttccgggggttttgtgaggtgtttgatgacccgtttaaaatatgatttccatgtttcttttgtctaaagtttgcagctcaaatctttccacacgctagtaatttaagtatttctgcatgtgtagtttgcattcaagttccataagctgttaagaaaaatctagaaaagtaaaactagaacctatttttaaccgaagaactactttttgcctccctcacaaaggcggcggaaggtgatcgaattccggtgatgcgagttgttctccgtctataaatacgcctcgcccgagctgtgcggtaggcattgaggcagccagcgcaggggcttctgctgagggggcaggcggagcttgaggaaaccgcagataagtttttttctctttgaaagatagagattaatacaactacttaaaaaatatagtcaataggttactaagatattgcttagcgttaagtttttaacgtaattttaatagcttaagattttaagagaaaatatgaagacttagaagagtagcatgaggaaggaaaagataaaaggtttctaaaacatgacggaggttgagatgaagcttcttcatggagtaaaaaatgtatttaaaagaaaattgagagaaaggactacagagccccgaattaataccaatagaagggcaatgcttttagattaaaatgaaggtgacttaaacagcttaaagtttagtttaaaagttgtaggtgattaaaataatttgaaggcgatcttttaaaaagagattaaaccgaaggtgattaaaagaccttgaaatccatgacgcagggagaattgcgtcatttaaagcctagttaacgcatttactaaacgcagacgaaaatggaaagattaattgggagtggtaggatgaaacaatttggagaagatagaagtttgaagtggaaaactggaagacagaagtacgggaaggcgaagaaaagaatagagaagatagggaaattagaagataaaaacatacttttagaagaaaaaagataaatttaaacctgaaaagtaggaagcagaagaaaaaagacaagctaggaaacaaaaagctaagggcaaaatgtacaaacttagaagaaaattggaagatagaaacaagatagaaaatgaaaatattgtcaagagtttcagatagaaaatgaaaaacaagctaagacaagtattggagaagtatagaagatagaaaaatataaagccaaaaattggataaaatagcactgaaaaaatgaggaaattattggtaaccaatttattttaaaagcccatcaatttaatttctggtggtgcagaagttagaaggtaaagcttgagaagatgagggtgtttacgtagaccagaaccaatttagaagaatacttgaagctagaaggggaagttggttaaaaatcacatcaaaaagctactaaaaggactggtgtaatttaaaaaaaactaaggcagaaggcttttggaagagttagaagaatttggaaggccttaaatatagtagcttagtttgaaaaatgtgaaggactttcgtaacggaagtaattcaagatcaagagtaattaccaacttaatgtttttgcattggactttgagttaagattattttttaaatcctgaggactagcattaattgacagctgacccaggtgctacacagaagtggattcagtgaatctaggaagacagcagcagacaggattccaggaaccagtgtttgatgaagctaggactgaggagcaagcgagcaagcagcagttcgtggtgaagataggaaaagagtccaggagccagtgcgatttggtgaaggaagctaggaagaaggaaggagcgctaacgatttggtggtgaagctaggaaaaaggattccaggaaggagcgagtgcaatttggtgatgaaggtagcaggcggcttggcttggcaaccacacggaggaggcgagcaggcgttgtgcgtagaggatcctagaccagcatgccagtgtgccaaggccacagggaaagcgagtggttggtaaaaatccgtgaggtcggcaatatgttgtttttctggaacttacttatggtaaccttttatttattttctaatataatgggggagtttcgtactgaggtgtaaagggatttatatggggacgtaggccgatttccgggtgttgtaggtttctctttttcaggcttatactcatgaatcttgtctgaagcttttgagggcagactgccaagtcctggagaaatagtagatggcaagtttgtgggttttttttttttacacgaatttgaggaaaaccaaatgaatttgatagccaaattgagacaatttcagcaaatctgtaagcagtttgtatgtttagttggggtaatgaagtatttcagttttgtgaatagatgacctgtttttacttcctcaccctgaattcgttttgtaaatgtagagtttggatgtgtaactgaggcgggggggagttttcagtatttttttttgtgggggtgggggcaaaatatgttttcagttctttttcccttaggtctgtctagaatcctaaaggcaaatgactcaaggtgtaacagaaaacaagaaaatccaatatcaggataatcagaccaccacaggtttacagtttatagaaactagagcagttctcacgttgaggtctgtggaagagatgtccattggagaaatggctggtagttactcttttttccccccacccccttaatcagactttaaaagtgcttaaccccttaaacttgttattttttacttgaagcattttgggatggtcttaacagggaagagagagggtgggggagaaaatgtttttttctaagattttccacagatgctatagtactattgacaaactgggttagagaaggagtgtaccgctgtgctgttggcacgaacaccttcagggactggagctgcttttatccttggaagagtattcccagttgaagctgaaaagtacagcacagtgcagctttggttcatattcagtcatctcaggagaacttcagaagagcttgagtaggccaaatgttgaagttaagttttccaataatgtgacttcttaaaagttttattaaaggggaggggcaaatattggcaattagttggcagtggcctgttacggttgggattggtggggtgggtttaggtaattgtttagtttatgattgcagataaactcatgccagagaacttaaagtcttagaatggaaaaagtaaagaaatatcaacttccaagttggcaagtaactcccaatgatttagtttttttccccccagtttgaattgggaagctgggggaagttaaatatgagccactgggtgtaccagtgcattaatttgggcaaggaaagtgtcataatttgatactgtatctgttttccttcaaagtatagagcttttggggaaggaaagtattgaactgggggttggtctggcctactgggctgacattaactacaattatgggaaatgcaaaagttgtttggatatggtagtgtgtggttctcttttggaatttttttcaggtgatttaataataatttaaaactactatagaaactgcagagcaaaggaagtggcttaatgatcctgaagggatttcttctgatggtagcttttgtattatcaagtaagattctattttcagttgtgtgtaagcaagtttttttttagtgtaggagaaatacttttccattgtttaactgcaaaacaagatgttaaggtatgcttcaaaaattttgtaaattgtttattttaaacttatctgtttgtaaattgtaactgattaagaattgtgatagttcagcttgaatgtctcttagagggtgggcttttgttgatgagggaggggaaactttttttttttctatagacttttttcagataacatcttctgagtcataaccagcctggcagtatgatggcctagatgcagagaaaacagctccttggtgaattgataagtaaaggcagaaaagattatatgtcatacctccattggggaataagcataaccctgagattcttactactgatgagaacattatctgcatatgccaaaaaattttaagcaaatgaaagctaccaatttaaagttacggaatctaccattttaaagttaattgcttgtcaagctataaccacaaaaataatgaattgatgagaaatacaatgaagaggcaatgtccatctcaaaatactgcttttacaaaagcagaataaaagcgaaaagaaatgaaaatgttacactacattaatcctggaataaaagaagccgaaataaatgagagatgagttgggatcaagtggattgaggaggctgtgctgtgtgccaatgtttcgtttgcctcagacaggtatctcttcgttatcagaagagttgcttcatttcatctgggagcagaaaacagcaggcagctgttaacagataagtttaacttgcatctgcagtattgcatgttagggataagtgcttatttttaagagctgtggagttcttaaatatcaaccatggcactttctcctgaccccttccctaggggatttcaggattgagaaatttttccatcgagcctttttaaaattgtaggacttgttcctgtgggcttcagtgatgggatagtacacttcactcagaggcatttgcatctttaaataatttcttaaaagcctctaaagtgatcagtgccttgatgccaactaaggaaatttgtttagcattgaatctctgaaggctctatgaaaggaatagcatgatgtgctgttagaatcagatgttactgctaaaatttacatgttgtgatgtaaattgtgtagaaaaccattaaatcattcaaaataataaactatttttattagagaatgtatacttttagaaagctgtctccttatttaaataaaatagtgtttgtctgtagttcagtgttggggcaatcttgggggggattcttctctaatctttcagaaactttgtctgcgaacactctttaatggaccagatcaggatttgagcggaagaacgaatgtaactttaaggcaggaaagacaaattttattcttcataaagtgatgagcatataataattccaggcacatggcaatagaggccctctaaataaggaataaataacctcttagacaggtgggagattatgatcagagtaaaaggtaattacacattttatttccagaaagtcaggggtctataaattgacagtgattagagtaatactttttcacatttccaaagtttgcatgttaactttaaatgcttacaatcttagagtggtaggcaatgttttacactattgaccttatatagggaagggagggggtgcctgtggggttttaaagaattttcctttgcagaggcatttcatccttcatgaagccattcaggattttgaattgcatatgagtgcttggctcttccttctgttctagtgagtgtatgagaccttgcagtgagtttatcagcatactcaaaatttttttcctggaatttggagggatgggaggagggggtggggcttacttgttgtagctttttttttttttacagacttcacagagaatgcagttgtcttgacttcaggtctgtctgttctgttggcaagtaaatgcagtactgttctgatcccgctgctattagaatgcattgtgaaacgactggagtatgattaaaagttgtgttccccaatgcttggagtagtgattgttgaaggaaaaaatccagctgagtgataaaggctgagtgttgaggaaatttctgcagttttaagcagtcgtatttgtgattgaagctgagtacattttgctggtgtatttttaggtaaaatgctttttgttcatttctggtggtgggaggggactgaagcctttagtcttttccagatgcaaccttaaaatcagtgacaagaaacattccaaacaagcaacagtcttcaagaaattaaactggcaagtggaaatgtttaaacagttcagtgatctttagtgcattgtttatgtgtgggtttctctctcccctcccttggtcttaattcttacatgcaggaacactcagcagacacacgtatgcgaagggccagagaagccagacccagtaagaaaaaatagcctatttactttaaataaaccaaacattccattttaaatgtggggattgggaaccactagttctttcagatggtattcttcagactatagaaggagcttccagttgaattcaccagtggacaaaatgaggaaaacaggtgaacaagctttttctgtatttacatacaaagtcagatcagttatgggacaatagtattgaatagatttcagctttatgctggagtaactggcatgtgagcaaactgtgttggcgtgggggtggaggggtgaggtgggcgctaagcctttttttaagatttttcaggtacccctcactaaaggcaccgaaggcttaaagtaggacaaccatggagccttcctgtggcaggagagacaacaaagcgctattatcctaaggtcaagagaagtgtcagcctcacctgatttttattagtaatgaggacttgcctcaactccctctttctggagtgaagcatccgaaggaatgcttgaagtacccctgggcttctcttaacatttaagcaagctgtttttatagcagctcttaataataaagcccaaatctcaagcggtgcttgaaggggagggaaagggggaaagcgggcaaccacttttccctagcttttccagaagcctgttaaaagcaaggtctccccacaagcaacttctctgccacatcgccaccccgtgccttttgatctagcacagacccttcacccctcacctcgatgcagccagtagcttggatccttgtgggcatgatccataatcggtttcaaggtaacgatggtgtcgaggtctttggtgggttgaactatgttagaaaaggccattaatttgcctgcaaattgttaacagaagggtattaaaaccacagctaagtagctctattataatacttatccagtgactaaaaccaacttaaaccagtaagtggagaaataacatgttcaagaactgtaatgctgggtgggaacatgtaacttgtagactggagaagataggcatttgagtggctgagagggcttttgggtgggaatgcaaaaattctctgctaagactttttcaggtgaacataacagacttggccaagctagcatcttagcggaagctgatctccaatgctcttcagtagggtcatgaaggtttttcttttcctgagaaaacaacacgtattgttttctcaggttttgctttttggcctttttctagcttaaaaaaaaaaaaagcaaaagatgctggtggttggcactcctggtttccaggacggggttcaaatccctgcggcgtctttgctttgactactaatctgtcttcaggactctttctgtatttctccttttctctgcaggtgctagttcttggagttttggggaggtgggaggtaacagcacaatatctttgaactatatacatccttgatgtataatttgtcaggagcttgacttgattgtatattcatatttacacgagaacctaatataactgccttgtctttttcaggtaatagcctgcagctggtgttttgagaagccctactgctgaaaacttaacaattttgtgtaataaaaatggagaagctctaaa

SEQ ID NO: 1913 - DNA, 646 bp, Homo sapiens
gttgaaaataaataaataacaaagaataaatatccctttctcttcttccctctgcctgtatccatataggggaaagaaaaaactgctctgagattcagtgagattatgaccttcacaaaatcatgaactttctgctgcctttttaaccagaaatctaggcaggagggtctcaccattttgcatatcctacctgttccttacaggctctaggcttttgagccttcctatcatttgaccagccaagttgcttctcagcaccttttttttcccctttgagtcagggtctgggtccagtggcccaattatagctcactgcagcctcagtatcccaggctcaagcaatcctcccacctcagcctcccaagtatctgggactacaggcatgagccaccatgcctagccttcaggcaccttccattcagaccacattttctgtggcaaactgacaacgccaatgtttgcagtttgcagtttaactacagctgtattttttgccaaacatttacacctaactactcttttccactagagtatataacaatttacagaagcatttaatgttttctgaatccccaagctcatcagcagagaagctccaaaacatgaaggtgtacatccctattttaggccttcatagaaagaaacc

SEQ ID NO: 1914 - DNA, 6253 bp, Homo sapiens
atatgttctgaaattaaacttgaacttttttctgtgaattttgaagatttggtatcttataattatttggtgagcatttggcatgaattatttagcttctcccctgtttatgatttatttctcttgtcatcgatttccaataggaaaatgttatggttctaaatgtctcctgtagacttcagtaattgaaaaatgtcagtcaagatggggggaatctgtaatatataatagagtttatcttttagttatgttcatttccactttttttaatgtgttttttttttagtaaatgtcaaaagtgttactcagtgcaacatattatgcaatattataatcaactaacctcttcattgataatgacttcatattgagaggttttttaaatctagaaatattcttgttttaaattccaggttaaaatgtaaaggtatttttatttttttaattttaattcttctcaaagctactagtacattataaaacaacaatttcacatttagaatttttatatgtatataaattaggattattttttaatattagccttaactttctttaacttttatgaaaaacaactagtcccaagggtatttttactatttaatatacattattcctgtgattcaaaatcttagcagtagaacctgttgagctacttaactttctgtcttgggactatccaggtgcagttataactggtttcaaagttgtgaccttttccttgcttgtttcaaaatcattccttaaaaaatgttcagtatttttcttttgtcaaaaaataaaaacaggatttgtgggttgttctgttttttaaaattagtttgagaaacttcctttgccacttgttttctgtgcaaatgttgtaagagctcaaattccctgggggtagggaggacttttataaggtttttttggttgaagggtataaaaggcacttaaaaggtatacagttacttttatttcgatatcccagtcattttgacattatgataagctttccccactttataggttatctgaaaatttggtggggggcgggtattttatttatacttaatataacaaaattattttcctatgtgtagtcaatagcacatacaaaaaattatctcctgtttgtagtcagtagcacagtcagtattcaccaaaatactgagttatttttcaagtaaaggtataagtatgaatgagaaacagtttgtgggttgggtattgtcagtccttctttttcagataactttctaaatggtcattcaatctgtaatcttaaacttttttaatgttataaattcttcaaatcagtatttgtattaaatgcagtgaccagactatgtcactgatacaatgtcatgattagatgtgcagaagactatgttacatggatgataaatgaacttttaacatatagaaattaatatcagattaaactaaaacattaagcaaagttaatacatgcttgcatacatatatatatttatttattaatgatatgtggagaatctttgtgcttcatagtcactagacctaaagtagaagcagttgtcaagaatgtccaactgctattcatctttgtggccaaagtaaatttcagattttttttttgtaatggttttctttagtctctttattaacccatcatcatgacaagtctgtcaagtgacacatgtgaaaagcagatgtcctttcttattcctggtgcttcctaaggaggcagtgcaatgcaggagaaggaacattattagagataaaggaaaaaaccagaagtgctttctcctctcacattccactcaacacttctctcaccaaatgtgtgtggggatttctctccaccaacaaccagcagttctttactgcagattctccagtggataccagccaggtgtcctctaattcagttcaattctgacattatctactgggagatagtgtcagatcccgcaagtggagggctcagtcctacaagactaccccttacttcagatgtcagtcacaagcagttagcggtttgtgattctgaccaactggctagaggtccccctcctcaagtgtgattaatttgctagagcagctcacagaattcagggaaacactttatttacatttacccatttattataaaggatattatgaaggatacacatgaactgccagaaagacaaggagcataggcaagatactgagaagggtcacggagcttctgtgccttctccaggtgcaccaccctctgggaatagtcagttcatgtgttcagctgtctcgaagctcattcgaaccctgtccttctgagtttctgtggaggcttcattacgttaaggttcagaaatcaataccccaaaatatggggctttgacatgctgaattaaagaagcagcctcaaggcctcttggccttctccagctctcctcacccaaatcctgtctctcccaaagcacaagatgaggctgttcaccaaagttcccttatttacctagaaactggaccttaaagaggaacacagttgcctgcgattccatccctgtaattttattaaccagagattaaaacttatatcacagaggaagagactaaaaattaaacaccacacctggagcccagatgacctgtcccaatctattatctgttctccagtcccatttagttcccaaagggaatcatttacaaaccattgtctgatcttccggcccatttatttacagctccccctctttccccaatgaaaatgatacttaagtgtcagccatctatcggctctttgagttttcacattttgtatgactcctgtgcacacacatgcatgtaataactgttatacttgttaactttttttcattataggggtatccaccatgattatatatgatggggaggaaagggattactccatttctgcccctgcagtctgtaggcatgattgattacatcattggtcgccggtgattaactcagtctccaagccctgtcgtgtccctggaggttggagggtggcactgaaagctccaaccatctcatcatgctttgatctttccgatgaccagaccccaccctgaagctatctacgggtccccagcaacattcatttcgttatcatacaaatgacattcttacaatttcagagattccaagggctttaggaaatggagatgaagagcaaatatatatttcacaatatcacaaacatacccttgggaattagacctctgatctaatctaggctccctcacttgccatttttgtgaccttgaacaagttgttcatcttttctggatagttctctgttaaaaaaattaaaataaaaaaatggtggctatcaggttgttaggaggactagataagagaactatgtgaaggaccctgcacagtgctagcaacaaagttgtttagtaagtgctatttcaatttattttgcttccaagctcatgtgagctccctcagtgtgtaccaccaaatcacatgatgtgtatcccagtcaaatcttaaaggtcatccaccttgaatctttaagttaattaacgtgtgtttttaaaactgcattataagaacgttagggtttttgttttgatcctatggaagttaaattttttacacaagcattcaactgtttagcttcaaactgaacagataaatagtctgtattatttcattatgtattaaaaaatgattaagcctgcctcaggcagttcaggcaaagcaggtaaaagattatcaaggagtaacattagaaaacactaatcagagtgcctaaaaagctttatgcggtccaggttgtacagggatgttggaacagtaaaacaaacaaaacattacaaggtatgaagcgttcgagataggtagaatagagcaggttatattagagaagtctcttctaaaattgtgttggctagcctgggatttgaacttataccgtgtatgtatgtccatgtgtaacaggttgaacatgcaagaagcagtgttcataaaaggtggcaaacttgttttacttgtttctcagtcttttcagatcagtacttataaaacactgatatttacagtaaatatcttatattaaatattagctaaccctattaaattgtgtgtccttgtgctgcagtcatttaatgacctcattctttggtaagttggcatgtgatttgagatagctctaagtgctaatggattgtttgaaggagttaaaggcaaaaccaggaagagaaaactatttttaggaaaaagcgatcatacaacaggccttaaatagaagaaatgagatatctctatctttactatgtaacctttaattccttacacattttgacttcatattttttgtatgtaaatgagaatgttatagtcttgtaaattccttttcctctgtgactacattcagttatttattttattgtgtgtttgtgcatgtcggtagagcacagtatttagtagaatgagttattggttaaaccacctggattcatttgtaaaatggggccacctgtctcttaaattgtaatgaggatttgattagataatctagataaatcacttagcacaagagtctccagcccccggactcttgactggtactggtctgtggcctgttaggcactgggctgcacagcaggaggtgagcagggagcaagctagcactagggcccaagctccgcctcctgtcggatcagtggcagcattagatactcataggagcacagaccctgttgtgaactgtgcgtgtgagggatctaggtttcgtgctccttacaagaatctaattaatgcccgatgagttgaggtggaacagtttcttcccaaaaccgtctcaggaaacctgtccctggtgccaaaatttgggggacctctgacgtagcacactatctggcacataccaagcactcagaaaatatcccatttctcaaaactcagttccagtgtcaagtcttaatagtatattgatcttggaactccaaggtagttggtcctctctttgtgccataaatgtgccttgtactcagtagtgctaaattgctatcaactagtgctaaatgtactactaattcatctgtgtgtccacttcccttcttagattgtgagccccttgaggacagagatgggtttactcatatttataaattcattggcatgataaatatttgctgaaagaataaaattgtattcttatgttttaagcagggtcccctccacctctgagtggaagatggtctgggagcaaaggtgacaggtcttctaaaaaatctggccacattctcaacccaccacacccccgcttttttaaacagctatttaattgccattgtaatcctaaggattggatcaatttttcacttccctttttcacacttttttccttttactaagaaaataaagtaataaagtgactgccaaatggagaaaactgtccactaaatatgaattaataagtgctattatcagaaattgtgtaaaagcaacataatggcactataaaaaggtattatcttagaatcaaaaaccttgggtttatattatagccctgctactttctagtcatatgacagtgatcaagctatattacctctttggcttgacaaaataggggtcatctctatttctggcttgttatgattgatgtgaaatattcatacaaactaccactgtgcctggtaagtagaagacactcaaatatgtcttggagttacagttaatactgtatcgtttaaatttgagaaaaaccaactttaaaaaatcacatagatacagttgtttactgctagaaattttatttaaattagttgatactcttggttaggtaatgaaaaacaatggttttatctccattatgctgtgatagggaagagtaacacagttcaaatggcaaaggcatacctgacaattaaaatgcatagttaaaggctaatacttcctgaacacaagaagacaagtctctacttgatactactctccacagttaaatcattgatactttgtgccatacagtgaaaacagaaccatctaggtgttcacggattgtatttttccttatgaaaggtagaaggttagagaaaattattcccaatacaattaatacaaataaaattggttattaggtgccttttaattaggcagtaagggcatatgaagcttcattacctatgagaattttgtcaaaattatttcccagttaccatgttttaaaacagcctctcagaattccccacttctaatttctcctttctattctaccaattttactccatacctttttgctaaataaacattttcttcc

SEQ ID NO: 1915 - DNA, 503 bp, Homo sapiens
gacgcaggccctgggctacagcaaccttaccagcccctccagcttagaggtggcagtggctctctgcggctgcgatttctttctcggagcgtcctccccatcccgttcggcctctgcctccaccgtcgtctctgtaacccgttccctgtgggagagtctctgttgcggtgttcaggggtttcggttttctggctgaacagtgattaacgcgagggaaggcgctgacggcaaggtggcaggaagaacattccaacacagaccacaacacctatggacctggaaaacattgtgctcagtgaaagaagccagacacagaaggacaatgttgtatgaggtcttattctgttgcccaggctggactgcagtggtgcaatcctagctcactgcagcttcgacctcccgtgctcaagtgattttcccacctcagcctcccgagtagctgggactacaggtgcgtgccaccacgcctggctgatttttcttgtatttttttgtagagatgg

SEQ ID NO: 1916 - DNA, 761 bp, Homo sapiens
cccggccgggggcagcctcgccgccgctcagctcgggaatccctgccccccaccagcacctcagtgggggatactgcaagttcaagaattggggccaggatcaggtggtgacagagccacctgggtttccggagactctcaagccaaccccaagtcatgacaaatgccagtcgccttggacagaggcaagggcctggacgcagagaccagaggcctgaactggcagactgtcctcacaggctgtgtgacgctggctggtcgtcccatctctctggggccccacaggactggggaccaggtcgtggaatgacagtggaccacagtggtccggggaccccgctcgttggtggcaggcacaggcccgtgtgatggggacaatgagctttggtggtttaaggcgtgaatgaatgaaggagcaagcagtaagccccgacagcaaggccaccacagccctcgccccacagggacgcctgagcaaggacccaagcaggggacaagcaggctcaccccgcccttgcggggctgaccacgaggccccgtccggtggaacacgccatgacgcttcaggaggctcatgtagctggcgccgtatgggacagcgggggagagagaaaatgcacagcccagggaatgtggagacaggcccagcgccaggcatgggggccggaaggagcagccggggagcagggggcagggcctggagtcccgccttgcagatctgaacctgccccagccccaggactctgagtgcagcaagaggg

SEQ ID NO: 1917 - DNA, 542 bp, Homo sapiens
ccaaagctttcattatccccggacaagtgcaggcccacttcaggccctgaggagtgctagctcattcttttactttgggcaaagagggcggctgtcactttcttgttcatgctgaggattcggctcactcaagatatctgatgcccttgtgacagcgtctggctgtcagagctcatagaccatctgctgggactgccctaggcccctcctttagggcacagaacgtggcaataatgtgtcccatttggcagcctgtgtgacatttcttcttgtatcttatcaggtgactcaaataatgatcatgcctgttgacacttggagctctcaaagggaattctgagcagcaaaggaaaggtgacacagaactcaagggcactggcgctgagcgctgcccatgcagctggcaattaagccattgccgaaaacaacaataaaacagattttgggcaagtagggaatggtggattgaatccagtgtggcaaaaaaggaaatgcaaagtgaggaatgtagtttccagataaataaattatataattgtgat

SEQ ID NO: 1918 - DNA, 1011 bp, Homo sapiens
ggcgcatcctcagggcctgggcctggcctccttgcctgtgagatggcactgtgacggtgcccacctcgtggggtgtgtgagggccgagtgaaatcgtgcatttgcgatgtctaggacacactggatttgtacatctggggctcaggagaggaccagatcagagctggaaatcatgccaggaagagtatgaagcagggagagaaggtgtggaggcctccctgaggaaacgaggggtcgagcaggtgaagagggggctgagagctaaggagtgcacagagacaatgacagaaagacgggaggtctggtttcaggaagggtgtgatggacagaagagatgcagcagaggtcaaggaaggaccaagatgcatcaggaggaaatgcccatgaccttcatcgcagcagcgtatgtgcgttggtcttctccagggatgccgaaagtagacatacagggagtcgcagtacggataccaccagtgccagcctgacctcacaagagacgtcttgtgtgactggccctgccgtcacagctgggccagtaaagtaccttccaggaggctccagttgctacctgactcacaaccttctaatcccatgatcttttagttctagtttccttatcttggtctgagcaaatggctcattttaaagatgacttgcagacaaatgtagagatcatcccaggggaaagtgccccaagaaaggagagtccaagaccacctgcccctcccagttctgcggctggagtgggtgggtgcagcaaccacagccccagtgtacaggagtcaccactgtctcctcccgcattggcccagcttggaagtgcacagcaaccaagcatgaggactgagttaagcttttcggagaaaaaagacactatgatcatctggcagatcacgatcactgtttggtgccagaggtaaggagtttgcttgttgtgtttgcttggaggcgacagttggcaatgacagcctgggagaagcaccggcagttaacagcactctgcaccactca

SEQ ID NO: 1919 - DNA, 1822 bp, Homo sapiens
gttcctgagagcacaagcacccccaaatgtgaagtgcactcggacacacacacacacacacacgcacgcacacacaagcactcatgttctaaagagagaggtctgagtccgaagttgctgctgctgggagcttgagctgagatggactggtcttcatgggcgcccaaggcgctgggtgcagctttccccgagacccccagatggaaaggagggaaggaggaaccccacacactcgccttttgcgagaagatcggcgcgcaccccagagtgccccaagcctttggaatctgcctgctgagcggagcgcgcgagcgtggtggacaggtcccgaacttggccagcgggctttcttggcaacttgctttgcgcagttctccatggaaccctggacccactgtgctcccggcgccttgcctttttttttctttttctttctctcactgtctctttttaaatttatgaactcgaaatgaagcggaaagcagatatgcgcgtcagcatactttggcggaccttttaaaaatggaactgtcggctgcggctggaaggcgcaggcaggcgccctggagagaattcacagggaggcacaggacagaacgctcccaggaacgaggaagcacccccagaaaggagcgctctatgggctccaggcagccgaggaaacgcgaacgtgagccccgtgactgcactcccacgtgcaccaacgctgccagtgtgagcagaagcggagcccgcagagcgccaggctgcgccgggagatgcatcacgatgaaaaactgcgccagagcatggcgggaactttccgagagggcgtgttgtttccaggcggttccaccttctaatatgaaacagtcttggttgattttccttgatactactttatgctcggcctggttgttggcaagtagctgcccgcgtctgtacgcgcccttgattagtttccactgcatgtgttttaacacagtcctcctttttccacgtttatttgggccaaccctgtctgcaaagatccagtttaatacagatttgagtctacgtgctatagcctggaaatgtactaaagacactacaacatattgctgaaagaatagaatctttattctgaatgcaaagcggacacctagtaaaaaattctggaataataaaacaagcaaggcttatgtgctcagttttggggacgctccaatttaaaggcttagtcattgtcacggtgtaaggtttacccattgcccccatcacacagatgtgggattgttgagagctgagtgtcctatgacctcttctgctgcccaagaacttggggtgggtggtaactggagaaatcaaagtgatcagctgcaaagaacgcttccattgctggagcttggttgtgcgggattctccacggaggtcttaaggcagagacaaaaacaaggactttgggaggctcctgtgagcagccaaaagggtttagagtcaggcagcctcaggttacaaatccagtcctgcaggctaggagttgtgtaagcttaaaaaagtgactgcacttccaggaacatcatttccctacctgctcctccttctgacgggttttctgaggacaatggaatccacactctgtgtcgaacacttttctaattagcgatgtgcagacactgtttattttacaggaataaaaatgccagaagaacccaagtcatattcatttaaagcagggtgacaagtacaccaaaatctgaaaaatcatcactaaagaacttatccatgtaaccaaaaaccattgaaataaaagtaaactatggaaacaaaatttaaaagtaataaaatttaaaagtccaaaaaa

SEQ ID NO: 1920 - DNA, 346 bp, Homo sapiens
tatgggtccctgctggagaagctgtagcatcggtaggttccgctggccgctcaccatggcagccggctccatcaccaccagccagcgagagggcaagacaagagggctgacgagggacgctaccatcacagagaaacagggtttcattgtgttagccaggatggtctcgatctcctgacctcgtgatccaccgcgcccggccaagtctgaacttttgcatggcctgttgccctggtgataaactgatgccttgtttcctaaaaggaataaagccatgagttgcctttgttcagctcatgggcattcacccatgcacagaggaaaaataaaatctacgactcgggta

SEQ ID NO: 1921 - DNA, 916 bp, Homo sapiens
ttttttttttttttagtagagatggggtttcaccacgttggccaggctggtctcgaactcctgacctcaggtgatccgcccgcctcggcctcccaaagtgctggaattacaggcatgagccaccgtgcccggccttttacagataattttaagtcaaactttgcatagttttccaagttgagttaaaattctctatgaaaataatttatctatcatttaccaaatgtaatactgaaaatatgtgaaagatactgattcacagattcaacaaacccaaagaatcccaagcatcataaatacgaagaaatactcaactagattcatctcagtgaagttgtcaaaaatagagatcataaaattagcatagaaagcagcaaaaattagatactttctcgtccatgtggtaatgtattagaacttaattcctttttatggctgaataatactccattgtatgtatatactacattttgtttatccattcatctgttttttggacacttggattgtttccatttttggctatgtgaataatgccactctgaaaattcatatacaagtatctgctttcagtttcttttgaaaacctgcttatttttgacatatcttttgtttataagcacaaatctatttagaataaagccagtggatattttatttccacaatcctttcataaatactgtaagctcttactctgagccatcaatagttaccaagagcactatataataatcagaagcagcagccagcagttatctactgacaaactcgttttttattttattttattttttgagacggaatcttgccctgtcttccaggctggagtgcaatggcatgatcttggctcaccgcaacctctgcctcccgggctcaaattattctcctgcctcagccttccgagtggctgggatt

SEQ ID NO: 1922 - DNA, 821 bp, Homo sapiens
atggttcagggaagaggctgcatttcacagagactctgtcccaggaggctggagtgcagtggcgtgatctcggcttattgtaacctccacctcccaggttcaagcaattctcgtgcctcagcctcctgagtacctgggactaggggtacgcaccaccacgcccagctaatttttgtatttttagtagagatggggtttcaccatgatggccaggctgatttcgaactcctggccttaagtgagcctcctgcctcgttctcccaaagtgctgggattacaggcgtgagccaccatgcccagccggcattttcatctggactctgccatggggctcagcaaatcagatgtgacctggtgacaggtgccaagaaggtctggcgaccacaggtttcttgtcggtttctgcctgggacccccgcacctccctaccagtattcccaacccaacgaaagaccggccaagtacaaaccaagggcagccctgaagcccaggaccatgaggcctggaaggccccaggacaggtgatttgtggccctggtgtctcaggtcaggagcagggcagagccaccttcctccctccctgtgcggggctgcatgagctcagggacctttggacctgagaaaggtcaggctcacttcctccccgtgcctgcggttggccgcagggggaatattctcctgacccgagtcccgaagccctgggcgtggagtttccctggactgggagaaagtaaacaccgagggacttgccaagaggaaatggagaagcccaggtgttctgggcggagctgagtgtcccgcagggggttccgcagctcctc

SEQ ID NO: 1923 - DNA, 1298 bp, Homo sapiens
ggcggagaagcaaaggagagggaagctggaagcacctttggcccgggacagaaatctggagagcttggctacctccatcctcctcaggccggagcaggcttcctgagagagtccaggtcgtaggagttttacgacttagaaaagcgggctgcagattccttcctgggtgtttggttcaagccttggctccagcctcactctcagtcttcccgggagttcgtgggatttggaccttagattattagtattattttgagggcctcctgtgtgtaagcactggttgtgcgcagatggctgtgcagagggccatgaggtagaggctggggaaatgagggcttggaggtgcttgaggtatggtctttacctacgtgaaatgttggaggttgagatgaaaactcttgctttgaattcttcatggaggactacatcatttcaatcctgaatctggctcaattctattattcacttattactgtattaaaaacgtttaattggccaggcacagtggttcacgcctgtaatcccagcactttgggaggccaaggcaggcggatcacttgaggtcaggagttcgacaccagcctggccaacatggcaaaaccccgcctctactaaaaatacaaaaattagccaggcgtggtggcacgcacctgtaatcacagctacttaggaggctgaggtggcagaattgtttgaacccaggaggtggaggttgcagtgagccgagatcacaccactgcactcaagccttggcatcagagtgagactctgtctcagtaaaaaaaaaataaataaataaaaatgtttaattaaccatgatatttgctttggtaaaacctttgaggtttaatgagaattttaaaattcattatacttttcttatggcatataaaagttttaattttttttattgtctcaactaacatcataaatgtcttaatgttaaaatccatgggatattctatttaaaattttagctttatcacctttgtgctatcagagaatgtgctttgaactggtaaaatgagttaaagtattggaaaacacttatgtcagcagaggctcttaaaaatcattttcatccttcctcttctagtgatgatttttttttaacccatgttttcaccagtctaccaatccaatggcataaatgctcctacataggcaacttaagtgtttcttaagttgatgcaaggtattttgcatgaggctgaattcttgttgtcggagcagaggatttttgttccaactactgaattggcaaaatgttaaatataaaaacacctcaaaaagtcaaa

SEQ ID NO: 1924 - DNA, 573 bp, Homo sapiens
ccctcggctgcggggtagcgggcagccctgcgctgccggccgcctagcctgcaccccccgccctgggagggaagcctcgctccagccgcgtcgtttccgcgccgaagtgcgatccggggccccgcgctggagtcccctgctctcaggctggtggcagttgctggagtaccagggcaccaagtggaggatgtggtagacagcctctaagatgcgccccctgccaatgatctctgcctccagggaggagctagaaggcagagagaaagccactcaggacttcccatcccagaagataaaggtgaggaaagcagcagcagcagccacaggccagtattccagagcagctttgggttcctgtcaagacctgctttgagaaggaggtggctgtggggctggagggctgggcctgttcctgagctggctgctggcagcacagcaatgaggcaacattgagaactgcgacacgaggcccagtcctgctactaaaccaactgtgtggacttgcatagtcacttcacccctcgggcctccatttctccactttggaaagcagtgttgggacgatgttaaggg

SEQ ID NO: 1925 - DNA, 568 bp, Homo sapiens
agccctgtcttctccacctagggagagagaccccatgagctcgtcaagctccttctgtgactgatcagagatcccaccgtgagtccagctcctggtcccatgctctggatatatcggtccctggcagcgtggtatctcacagaatctctgaccaatggagagctaatcaaagacaagtttaataggtgaagaaaatacttggattgggaggatggctgaaaagtcccattgaacaaggccctcaaatggagttcctgtggagtggtcacctttttgatgacttcaactgggaacatcagtacggaaccatcgctgggtgttcattccatcaccccttcctatgtccctgctcaggacaccctgcgtctgtctatatgcattgctaccagtttagacagtgagttacatttagtccatttgtgcattgttctttattgtatccatggtatctagcacaattcttgttcttattagagcttggtaaatgtcattgattaatccagggcagattatctctctcattttcgtgaatcctctgcataaacaatttgattaaaaatttatgaca

SEQ ID NO: 1926 - DNA, 501 bp, Homo sapiens
ttgttgagcatgttacagtcatcattttctgcatgtctaaccatcctagtagactgagcccttggtgtgcagggactagtgcctagcagactatacatatttaaatattaataaatgagattcaaataatttaagagaaactaatagatgtcaactaggaaaacgattaaaggatattaactttagtgatactataccaggcacacacaaaatatcatgtatctattgaaaaatggacgcttatctacaaaattacaccatcagtgaggaaatatatgactgaagaataccattaaagaacaaacagaacttactggaggagttttctgagacagctctctattcaacctgtcagtaaaactctgtattagtgtgtttcctcctgccactattacactgccatagagaccctaggataaaaatacaagaaaaatcaattagttccatatgtttccaaaagttttaaatacaactacaaatataaccatgtgctctactaca

SEQ ID NO: 1927 - DNA, 1274 bp, Homo sapiens
ctcatgtgacgcggtaacagctgcggcctgagtcactgggcccggcgcggggtgggccgagccccccgcccggccagggccacgtggcccctacccggaagaaggcgcccacccccgcaaagggaaagccgcaagggcaagacctcggggcgcctggggcccccctctggcgctatacctccgtgccaactcggggtaggagagcggggcggagcgcagcctgggtcactctggttcagagaagcggacgagggatcctagtctgagaaaaggggaggaagcccttccccgaagccacgctacccagtcaatcaagacacgtccgcgtcgggtcccgccctctgggggaggattgacaaggtctgtgcttccagcctcccagacagctcctgcatccgtctgtgatagcgagggcttgggggaagacacgaaggcaggagaggcttacatcctctggatttccccgtcttatcccagaagacaaagccaggtgagggctggaagcgggctagggggatcaagctgcctccctcccttgtgtgccaggggtggtccccagaaggagctgatctgaacaggccggagagtaggaccggccgtcacacccccacacctccagcctcggccccactccttgggctcttaaggtcctgcctcaagaaccacttcctgagtcttagtgtatgtgtgtacacaaagaatgaaagaagtctctagagctaaaggaaggagatccgggctgggctgagaagcatcttccaggatcacggccttcccgcgggacacaccaagcccattccggatcttgctcttcctgaccatggctggcaggctgtggaggaggagcggagagcagaagaaaggagtattcatcaggttccttattgtgctgccactagatgccaggcatgtgctaggcttgggggctgcaaggagaggaagacagcggccctgccctctgctagcaggcagaaccgagttctggccacactgtgaagaaaggcagaagcctgcggtggcagctggttaagctcagagggagggaaagggagaggagaatggatttcacggagcagaaggatgtgctcaaggtgaccttggagaataaaggggagagctccagggacagagaagcagtcgactgtggaaaaaaaaggagcattttgtaaagtacatggcaggttggggttggctggctcaaagggcttgggacggatgtggtgagatgggctgaaggtggtctgaagatcaagattgagagactagatacataa

SEQ ID NO: 1928 - DNA, 423 bp, Homo sapiens
gttctaatacttttgagctactgaatctgatccaggacagcttacctttggacactgactagaaacctgtattccttaagtgcctaagatccctggtgccaagacacttggggacctctgatccacaggacctaacggcacccacagcacatggtaagtgctttgcttattgagtgaattcacagagtaaggtcagtcagtccattatttattcaaggatttttggaaagttgaaaaaagcatggcttgactaatgacagaataaaatttaataggactcatatacagttctggtaaaataagataaagttttcagccactactaagagatttttattttttttaataataaaaaaagaagattacacagacatcccccattattatgtgtttgtttctctcttgaaagtctgccttctggca

SEQ ID NO: 1929 - DNA, 300 bp, Homo sapiens
accacaaggcgcactcgttattagaggccagagagggacagatgcttggtgggaattgtagtgcgaagccaagaggctcccccctcccccccttcccccctgccccaagtgcttagaccgaaggcggcgctgcgccaccgggggacgccctgggctcatttctctgacagtccttctactagcttcattttccttgtcaacaaaatggggataatcacatctaccttggaattgttatgaggatcacatggagaaacacaagtgaaatgctctgtagatataaagcatgtatcaacgatg

SEQ ID NO: 1930 - DNA, 1467 bp, Homo sapiens
tgcctcagcctcctgagtagctgggattacaggcatgtaccaccatgcctaattttttttttttttttttaggagggatggggttttgccatcttggccaggctggtctcaaactcctggcctcaagtgatccacctgcctcagcctcccagagtgctaggattataggcatgagccactgtgcccggccacgggctggactctttagccagccccaaatcccagccacatgactttggctgggtcactcctttgaggcacgaagaccacgtcacttggttgcatgcttgggtgcccagtgggacaggtatgagaagacccactcaagagtggtgagaaagaaggctggctaggaacccaggtggggcaggttgtctgcacgttatggctattatgagcagtgctgctatggacatttacatgtacgcacgtctttctgtgagtatatgttttcagttttcttgccttttttttttttttttttttttttttaagacagagtctcagtctgttgcccaggctggagtgcagtggcacgatcttggcttactgcaacctccacctcctggattcaagtggttctcctacctcagcctcccaaatagctgagactccaggcatccaccaccacacctccctaattttttgtatttttagtacagacagggttttgccatgttggctacgctggtctcaaactcctgagctcaagtgacccgcctacctcagcctttcaaagtgctgggattacaggtgtgagccactgcacgcagccatgttttcagttttcttgagggagattcctaggagtagaattgctgggctgtgtggtaacttccaggcctccttaaagctttagcctggactgggtagagcatggtttccactgcattctcttagtcacagtgagttgcaggttcaccccagcgtcagtggcgggcgggaagtggggatgacacaaggacctgagtgtccaagggggcttcatggagccctcatgtgaagtccccagcatggaccctgacacatcgtaggtcctcaacaaatgtcactccctgttgtcactctgtttagtactaagaataatgatataaaactgggacagtaaggaaaacacaaactgttgggacctatatctgaatctattagtctgcctaatagaaaagccaccatcaggattttggagattacaagctcactttagattagccatactggagtcagccctggaggctcccagagatcagaacaatcccagcgcttgacaggatggctgggaaacaatacatatgaatgccggaaaatgcagaactaatctaggaaaaagtgtaagaagaaaataaacatcatctgtcattctatctatcagagataactgctgtcaatattttggtttccttccaatattttttctattcactctgtgcataagtatgtatattttaataaaagtataattaagatcac

SEQ ID NO: 1931 - DNA, 695 bp, Homo sapiens
tgggaataatgtcaccaatagcataagaattaatgtctactatgatgctgaaataaataaactggtaaaactactctgctgtctaaatccccaagttacaaatttacagagctgccggcttccccttgaaggaataggagtagacctgctgaactatcacatgagagaagaggcccaaaagcttgcacactacagtcaagctggcccttaaagagatggacctagaagatgctgagccagatgtactcaattacttctccaaaattcatcaattaggaatacaacatgtttaagaccacagaacatctgcataggctgtaaatttcgttgaatgatggatgcaaagatggaagacagatggatagaggaaaagacagaatcagatactggatgagttagtactgctgcctgtgcttcagagctgtcttattaccacaaggccggcaagcatcaatgtccccacatccccctctgcctccccctgaaatgtaccgatttatatgaaaattaagattacaaattaaagcctggctatcctggagttttccagttcatcagccatccaataaaaatgatgtcaagcctgtatgcataattcccggaagattactttcgtccttacagctaagccctgtccctgatatgaaagatctctatccacttttattgaaataaagaactaacatcataatccc

SEQ ID NO: 1932 - DNA, 609 bp, Homo sapiens
gggttccgcttgactctgcattctcctacttccctgcctgcttactctctgccatcatagttttttgcttcaaccttcaaatgtagccattctttttctaaagcgctttcatcgtagcttcaggtggtgtatatgcaggctgtgatggaggagaagctacccctcagcacaggattttggtagaataagaataaaaatgacaagtcccttcctgaaaagctcttcattgtctcttgaaaacggtctgtgaaagtgccaaaccaccagctctccagatgtggctgaatatcaaggaaaatatcttacgtgcaaggaataaaaatgccagatgaaggcatcctcacatggtggaagggacagaaggcaaaaaagggaggaacactgtgtcctcacatggcagaagagcagaagagaatgaactcattccctcaagccctgctagaagggcactactctcatccactaggactccaacctcacagcttcatcacctcttaaaagccccacctcttcatactatcagttgattattaaattccaacatctgaatgttggaggacacatccagaccgtagcatccctcaaaaaaagaataaagatgttccatag

SEQ ID NO: 1933 - DNA, 513 bp, Homo sapiens
ttttagtacaagtggtttatttctcttccaggtgaggccgcatgtatataagcaaaggtttgcccacctggttccttcaggaactccccgaggaatctgtttagtttccatgcattaaaaacaaccctctagttgccaataatgaaactttaagaagcaacactttgacgtcgcagagttcctctctgcatgtgacgcggatataccaaagtgagtttatggcatacagtatgcatgggttaatgtaggtgagacagggagtcccggctgccctgtggccccattctgttgtggaggcttcgctgggagctgagaacaccctgctgtccatgttttgatgacaggtggttcttccaaaacagaagcaccgagtcaccgcacgcccctgcttcagtgtgcgaggccgtggggctctggtgttgtgaactccaggctggcatttaaaaggtgctgacttttaggctgggcgtggtggctcatgcctgtaaccccagcactttgggaggccaaggc

SEQ ID NO: 1934 - DNA, 812 bp, Homo sapiens
gaccccagaggaagacgtgcattgggtccgctggccccaggccagtgtctctcagccatgtgctcaacacctggtgagctgaagctcaggcccttcctggcatcctggtctcctgcactgagctgtggtctgcagcggcatctggcatccaggccagcctccttggtgggccgtgaactgaatggtggcgctggcctgtgcccagtatatctgggttcggtggctgagagagcttttgttgccctgtgtccgtgacgggccagtgttctgcatgcatcccatcacatggatccatggaggatgttgagcccagaggaagacttgcactgggcccaatggccccaggtcagcgtccatcagccaggtgtccagcccctggtgcactgaagatcgggcccttcctggtgccctggtctcctgcattgagctgtggtgagcacatccggatcctgctggatgcgtgtgcggggaagggggtgccctgggttgggtcaatgagaaccttatattgtcctgaagagaggtgataacttaaaaatcatgctcaataataggattacgctgaggcccagtctaggtgagaggtttggaagaggatgctgggattccgaggtccccaggagggcccctgtatttttggctggagacctggaggccctgaagggcatcttgtgggtgcccaaccctgtctctgcgctcctccttgaggcagcccaggctccctgtgcaggcttggtgtcagccctccagttccctgggtttgaggcacatgggaagctcctttctgagccccgttctcctcttgtgtcttt

SEQ ID NO: 1935 - DNA, 2597 bp, Homo sapiens
acgcatgcgcaaggcttgaatggcgtcggggttggagggttggaaggtcgggaagtgaaggactcgcaggcatatttaacaacgcaaagttgctaggagttggtaccagcgtttgggaggtagaggtggcgctcatgcatatttgagacaacatctggatggttggggagaacggtgatgccacactcaatcagaaactatgctactgctgaagaggtatattgagccctgcctggttaacctccagtgaggttattagagaattgggagaggctcaaatcagcatcctgcacctagttatcaaaccattgtgaagtcttgattcctggatggccagaaaacttgtcattggtcaagagcaacattaagatctgcctgttactcatactgatgcttcctgcccagcaagttcatcagagggcgaggatgaattacggttgccatgaatgtccttgtgaggcagttgggaagccttggctggattgtgaaggatatttgaaaagtattttagagtccaccagatcatccatgtgagtgaccatgcagcaaaagaaggagggtcctctcagtgattaaggtaacatagtgattaaggtaagtagggaaagagaggcttactttgccctgattcttgtcagggaggctcttagagatgccatttccagagcataagtgacaggccagcattttcaaagcttgcaacttattctataatatatccttcttaaaacaattcatgtagattatatgctcacccagtctgggatcactcctgcagaagatcagaagaactgaaatataggtgacataagctcctgcttttgtaaatgttttgttgaaacacagttgtgttcatccattattgtcgatggcagctttcatgctacagcagagttgagtagttgggagagaaaccaaatggaccatagagtttgaaatattactgtctggcccttcacagaaagtttgccaattcctggcataggttaaataaatgtactatatccacaaatcctcctctccccattttcctttcaatgggacttgcatttacagttgatcctagaatgtatggaatctcatagtaatcagcttgcttctgaatttcttcccactcaaattaagctcactcagaaagcacattcacaaattgggctacatatacagaaggagctatgttttatatgcctcactgtagtcaactcatttatcctatatgtatggttcccccattttttccttcttttcaggggtaacttttaaacttgagccattcatgagtatccaaaaagttacaacttatgttctctaattaagacttcatccttattttagtatacttcccctctctggcttttttgcatatttctgcagatgtcttgacctttctggggagtaagcccccttagaagattaattttctgtagttctctattgaggaaatacatgacatttagctttttaataatttgatgccattcattgagtacctactgtgtgctttatgtaccctgtctcgttgaatttttacaaaaaactgaaagagttagttttgtgttattactacctccatctcaaagatgagtcttggaaagcttaagtaactttaggtcacattgtaatcagtggcagaactgggacttaagaacataattcatgactgcattttcttttctttctttctctttctttctctctctctcttttttttttttttttaaagagatagcatctcactcactatgttgcccagactggtcttgaactcttgggctcaagcaattcttccacctccgcctcccaaagtgttaggattataggcatgagccctcatgcctgccccttgcattttctatttaagtgatcttgaagtttttttttttcttttttaaatctcggaatttggcctttagtaagcatagaatagcaaagtgtaatacctgagctgggggaaaaagtccttgaattctttaggaaagacttaattggtgggtacaaagtgaaatgctcactggaatcaggaatcagaaaccagttctgatcacctatccctacatatccttcttcactctgccctggcatatcatggttgatgtacatagcaatgatcatcccttctgtaatcccacttgacagtttagaagtggattgataatactcttctggcttaaaacccttcttctctgggcaggtgtggtggctcctacattatcccagcaccttgggaggccgagatgggaggattgtgtgagcccaggagtttgagaccagcctgggtaacatagcaagaccctgtctccacaaaaaaataaaaaattaactgggcacggtggtgctcacgcctgtaatcccagcacctggggaggccgaggcgggtggatcacgaggtcaagagatcgagaccatcctggccaacatggtgaaaccccgtctgtactaaaaatacaaaaattagccaggcgtgatagcaggcgcctgtagttccagctatgggaggctgaggcaggagaatcagatgaacctgggagacggaggttgcagtgagctgagatcacgccactgcactccagcctggtgacagagtgacactccgtctc

SEQ ID NO: 1936 - DNA, 2049 bp, Homo sapiens
ggctgctgcgaggaagacccggtcagctgtcccttcccccatcggtcctcttaggggaagtggagatgtgggcctcggagctgcgtggcccgggctgtgcggattccctaaacgccgcacttgcgcacagccccttacgtaaccgtcagtgccggggattccctggagggggtcattctattcaaccattatacacaccccgggctcctgccgccgcgccgccgccgcctcacaaaatggcggcgcccatagaggagaccgcggccgcctccccggccccattttgtgggaggcgagagatctgtcaacatggaaaacctctgctgaggatgcatccgagtttggaaaccccacttaagggatggagcctgggggatcacattaaacggaaaatgccaacgacttctaccacctctacgcgtttttagtttttcattttctcgaaggaagcgccagaagcctgtggagtaattgtaactagagggagaacggaaagctgaggtgactgctccggggacttggcgcggcgccttggtggctttggttgctcttccacgctcccggcagctgaccagaatctcttggagggtctcctgggccacctcggccgcgccagtcgtgcagtgagacttctgtagttttaaaatgccacagtccacggcccggtcggcaccgctcgcctgaatcgtgggctttgggaaccttggaggctgctgctccaggaactcgcggtcggccgggagccggggagcttcgttgctgggagcgggcggtattcgcggactccggcggccctggcgggtcgcggccgggatccgagccggggatgacgatgctgatggagctgatggggcaagagtgggaacggaggcacgtacactgaaatttaagtcatccaagttgggacttaagatagcaggttaatattgtctcaggcgagacttagaacgtcttttctggtatcccagtctgcagtgggcaaatctattgtctttatttctcatttaagggcagaatggagggatgacatatttttacttttcaagaggcggttgccacttttaagtcactgttgtgtgtgtgtgtgtacatacacaaacatacgatagtgtgttttcagagcaagtatcaaaggctaaagacttggagtgatactagtgtttaaaagcctttttaaaaaaattaagatgtgatgagaaactggagaattgacttttaaaaatttcttttctgtagaagaggctatcttcaaaatggagtcctaaagtatatctgatggatagaatttaaattcttaacactgtatataccctgtggtcaaaagcatcaacgtaaaacttgatgtttatcagattacttatgtttcaattttcctgtggttagaaaaattaagacagaagtaagctattaacggtatttgcttgtaagagtaacgttaaaggtttaaggaaaggtttgttgaaatcgatatgcatcacacgaatcatttattttcaatgttgttttccagttgcagcaatcatttgtgtttacatgactttgaaaaagggtttagtttatgttgattttgaccctcttatttaatctctagtgcagaagtgcagctttctgcaggctgcgcctcaatcgctaagttccactctccatcctctgccgcgctactcctggcatgtggatcaccaagatacaatttctggtcctgtctgttcttattgatgtcctttacagttaataaatttgattgccactaatcagtctgtatctcttgcaaaaacaccacatttagcatccaagtagagtcagagtatgttttttatgagattgtactaaagtaaccttctattacatttcttattaccatattgcatttcctatagtgggcagcatagagcaggtggatcctgacaaagtaatgttagagatgtgctgacagctttacaatagatattctccaactaatttgacaagatataaaataaaatgtagttcgtagttttcaagcattaatggaaagtgttcctattaaaaaattaccaataacagtggaaa

SEQ ID NO: 1937 - DNA, 2209 bp, Homo sapiens
ctgactctgtctgggcattcttcctgggctagagatgctctgcctcccagcagaagacaagagccctagaaagactgtcattcatttactggagagagaaatggttcatctacacacacactcagagcctggctagctacaaagccgtggtccgtggtaggatgtacgtcttagtggaataagtaaccttgagcagacaatggatccagcagtaacaagcctgccctgatgccggcgtaaattccgaaggagctggagaacgattcttcccttcactttatctaaatcctctgaaggatgagtgggaggatggtttcttctcccttcctgaagcttgttttgttggtgccttatgctaagagaactcagcagatacaaatttattattttcttttagacagcattttccctgcagttagaagaaaacagcagctcacattgaaaaatatctaattcccaaaatacgtgtttccaatagggagtttatagaatttgcttcttaccaaagcaaaatcttgaatacatgaaatctaaaatcttgccaatttaatgaatgcctaataatttttaaatagcatatatcattttaatacattaaacagttggaagattgttgagggataatttgtcaattttttattaaaaagaaaattcataaaaattaaatattctacatttattttatattattatcttggcaattttattttttatgacaaaattctgagtctgttatattatccaaatcctaaaaagatttaattgattacagaaaaatttattgggaaaaattgctttgcccctcttttttctctaagcaattcctgagttttaaaaatactccttaaaggaactaatttatttttcatggcccatcaccaatatccaagagagtatccaatttttaaattctgaaccctgtcttgtgtgactttcaaactaaatgaaatgaagaggcctcaggcagtctgtgtttacacagggtggcaaaattaaccttaagttacttggatcactgcactggggacacttcagagcctctactcaggctacttttgagcatactatgtatgtcgctgtgcagaagcctacctctttcactctagataaaacaagactttctgagcacttactctgagcaaagcacggtgccgcaagtacaaaggtggataagactcagtccttgatttgatggtctttgttggaataggttttcaaactgtaatgtcactgtgtctcccaggggccaaaagtttgctttcattgatgggtttcaaagtagggatgagtttacttataagtacacattgtgtcattagtatgcttgactctccatggtgcaaaatttctttctaatgctgatcaattgcaaacatgatagaacaatgaaatacttccaggacattctaaatcactctcctccttgtgagaaaatagggtagagagcctagcctggtacaggcagccatccatgtctgatgtgggtcatctctgagaatgacactcctcaaagggccagagggtgctctttcttcatttcccttacacatgggtgttattcaatacttatctagagccatgtgtcacttaacaactggaatatgttccaagaaatctgtcattaggctattttgttattgtgtgatcacagagtgtacttacacaaacctagggtggtatagttcactgtaccaccaaggccatatagtgtagcctaggctacaatatacctaggctatatagtatagcctgtagctcctaggctacaaacctggacagcatgttactgcactgagtactgtagcaattgttacacagtggtaactatttgtgtatctaaacatatctaaacatagaaaagatacagtaaaaatacagcagtataatcttatgggaccaccgttgtatatgtggtccatcgttgatggaaacattgttatgtggcacatgactgtatatgcttcgtatatagtgaacattcagcaaaggttttcatcaatgaatggataaattggcaacttttatgggcttaattgggctaaaatatatacggagtcactatttgacttaacacctagacattattttactgatatttttcaataattctgtttttgtaaagccttccttccatttgggtgcaatttccacttggggaaaatctcattccccatcctcttgtaattaaaaagcatggtttgtttgtttt

SEQ ID NO: 1938 - DNA, 5570 bp, Homo sapiens
aggcatgagcccttgggcccagccggctgtttaatgttcttaaatagcacaagggacttctatgaactttcctagatgaaatatttattaactactaggtaaaacacttgtttgatactgcaaagggttatttctgaaacttaaacctcatgattggccaaccaagaactttttctccacagcatgctttaataatgaaatgcggattaagagtccaatattataaaacatttccacaaaagaaagaatccatctgattctcaactctgaatgcacatttgaattccctcggggagcttttaaaagtctaatgccccagtgtaccccccccagttaattaattaaataattctctggggatgagaactgactgacagcaacacttaagcttcgagactgcagtgtgcagccgaggcccactcctccagcgtcaccacctcgtctttatctgccactgtgtctcctcattgcccacagctttagcaacagcaaaagtagaattcaaaccttggtaaacaaggcttaaattattactgttcatgaccttaattaattgaaaatgattactggtgaccacagcactccatgctcttccttatggaaaaagggttgcctagaagatttaggcaatactgggagttcttatttgaagtcacagaaaggagaaacttttctcaagccgtttttattacacttagtgtattaagacaagtacaaaataaccttgtaattaagatactgtatcagtcaaaaaagaagtcactattgtatgaagagatttacaaatgactaaaatatacaggctgtgacagaattaacagtttgaaagagggttgcttttttcttttagaaatgctaaattttcttaacaagacaaaaatacagtgctctaaatatgcattaccatgaaaacgttaaagaaaagcagtcttaacacttaactactattaacagcctttgccaacacatgcctgcctactccctttcctaactttaaagaactgtttcctctaaggaatactagtgcagcataacccttaaataatttcatttatttttaaagttacaacctacagagaaattaacatcttgtcaatctaataacagtggcaaccattcttcacatgcacttctcttagaataaatccccttggctggcaggataaggcttatgctgtagaaccttctcccccacagccacaaatccccttctataagtccctcctaccctcatccccccgcatccccactggcattcacctttcccaccccaaaaagtgcagctcatggtagccttctagaaaatggttttaatgggtatcccagcatacacgcttttttaaaagccccctctgaacaccagaggtggtgaaaatgaattgtgttcttggatttttttttttttaagcctccactgggtcaaaaatatgtgctcttaatacttgagtttttgctttgtgtgtgggttttctttctttttcatttagatatcgtgggataaagtggagaggacatctccattttcccatacaaactgagggtgagaagagaaagagaagcaagctgttgcccccactttggcctggcttcccagccatcttcccagctctggttctttcataggaactagttattgcttccacaatgccgttatacggaatgttccacaaaggctgtgaacctagtcacagtctacccacaacaagaactctgctctgaaaaaccagcccaagagctcttacccagaagaacaatctttagccctcaaggtcactgaaacttcattagagcagtttagagtagacgtgtaagatttggcatatattaaatgattattggcacaatgttctccagttccatgtataaatgttgatatgcacatcggccagggcccaggatgaatcagccaatctgcaccatttttatgtcagcaataattccatctcttccctttgagcactgtagggagagctgcttcatccggttctccaaggcctggccctcaggggaggtgctgctttggctcttactgctgccaccactgccactgctactgctgaggccccggttgttgttggctttgtcacttgttttattctctgccccttctgccctgtctcctatagaaatacaaggattatcaaaagtgagtattgacaattctgccctgtctcctatagaaatacaaagattatcaaaagtgagtattgacaattctaagtcacttgagctcaaaccagtcagctaactcagccctgtagaagtcccactgttacctaccgtgcctatcagagaggttctcagtacataatcatttactgcttttattccttgtgatgttttatatattccttagctatagagatgaaatttgccatattcactttattgctgagaaacaaacctctctactatgtgcttgccaaggagactgttctgatgtgagacataggacctaagctctactttatagaagctgagtggagccaggagcccccccagaacagcacttggaaacaacctcagtgatcaatactgacagcacaaccacagagacctggtaatgcagcatgggggccctgagacctggcagaggtatggaatggcacaacagtcaggctacagaggcagtgtggcatctgggacggggtgagaaggctgctactcacctcgttctacttcacattcaggggaggaggccccgctgcattcacttcgagggcccaacactgggaacatcatcccaaactctgacagggacacagggctgggcagatccaggctgccaggcctcacaaccgcagggaactggtcaggcatctcagacgggcttgttggtcctgaactaaagctggacacggactgggtttccgagtcatcttcagacacaaagttgctacagctgtcatcttcaaaggcctccgaggccactaagttgagagagaacaccagtcacatgggttctgtcacctcctcaaacaccacaagtgcttgctgctggcaggcagctagacacagcatgggggactaaagagtctctacctctgtgagtgcctaatgaaggaatgtgacttcccaagcctgaatgaccagcctctaaagcagctggaagggaagcagctggcagcaggatcccatggatattaagcgcccttccaataaccttataaccctgccaagaaatcagtgtcaccagacaccacctaaaaatggaagattaattcagccacaaattaggacctttactccacctcagtcccccaaatacatcctcatgtgcacaggaagaggttctagtcctctgtaacatatcccaaacaaagccagctggactcaggcttctttcttagggcaatagaagcaagagctgctagaagaaacaggccagcatggaacatctgttgggacctttgttatctccagaatcctgactttgaggaacacttagtaccttcttaatgaacacagtgttccataaaacatgggaacccaccagaaatagccctcaggcctgcccaactctgagacctttcactgatggccagagaaagtgaggaccttgggaaacaaatcacacagtctgatatctccccacatacccagtggagcccctgacttaccagaaatggcatcaggctcaggtttgctccctggcagatcctccacagatgtgctgctgccctcagcaccaacaccgcatccccgaggccccatggcactggagcgccgccgctcgtggatctcatctgagatcatctccaggttcttcagggccatcttgtactcgccttttgccagggtcagtttggcctgcaggtcatccacagtctttttcagttgctgatcaagagaacaggagactaagtgaagactaccctgctagccttaagatgctttctgaatgacaggttcaagtacattttctgcccatcattctacttcaaggaattttccaagacatgactgaagacctaattaccattgtaactgctattcattcaccagacaaaatcagccaccaccatccccagatcccatccaggtgacaacctctaatatccaaaaactctcactggtggaacaaaccccatcagggaagcaaaaatgggcatcagacacaccaaagtcccacagtctagacatctggttcccagtacagtggttctcaaagttgagcttgcatcaaaatccccttgggtgttaagactcagctcactagactccaacctcagagtttctaattcagtcggtctagagtgggacctggtctatcaggtctccaggtgatgctgatgctgctggtcctaagagcatgctgtgagaaccactggcctagtacaacagagaaggtgactgaatggcagttacagaggttcagagaccactgaagacccaaccgagacaattttgaggtctgaaaactcagtaaagcctgtctctccactttccccttatagcaagtggcccatgtgatactctgctaccccagaaaagtgaagctttgagtgcagaaaaatctcatcagtgacgaagcccaaagctacacatacctcgagctgcacatagtactttgccttgagttcaaaataaggcctgcagaagacaggaaggaaagccatcagagtaatataatacagtgaccacagtcaactccacaagatgaacaagaggcatcagctaccactggccaggtcgtccttccaatatttagtaaactcttaacaaggccgtgacatgtcagtgatgctcctagctctggagactgacagacaccagatggaacgactgggctcacccagggctatattaacaggaggcccatctcaagacacggggaacccacacacacatatcttggggactctgcaacttagctcatgttcctcctctgtgggaaggctgttcagagcctcacaggttatacccagcagtaagggtggcctggatctgctctcctaatgaagttggctccccagggatgaagagcagctgaggctggagaaggggctgcttaaacctcctcctctactgaagtcaactggggaagagagagaagcaccactcctccctcacagcacagcaaggccaccactaggagggggtctcaggttggtcctcccaaaccttgtccaaagactggagttattagttggctgactcagccacataatgggcccaagaaatgccagcgtcctagcagttcccttggttctgggtcagctgaaagagcttggctcttttttaggaactttggtgcctgaacattaagagtagatcactgctttattcttgagctgttcaccctccatgaagctctcaagtcctgcatcctgaggatccagatggatgacaaggacacaggactgccattgagaaatgaagatgaactgtgtcacagatgcagtggattactgactgcccttgtaatagtccattttgcatctgttggtaattcattgaggcactcttggttttctatgagtttgtattttttgaattcaagaattgtaacatcactgttagatccctccttatttaatgagagaaataaaatatttgacacgagaaaa

SEQ ID NO: 1939 - DNA, 488 bp, Homo sapiens
acatgagccactgcgtccggcctaaaaatcctatatttgcaatctatgtgaccacaactgatttaaacccagatgaagataaggtatcaaaataaacctcaggcagactgagctgtgccacaattttaacactaactgatgaaggcaggatgcttctcctgctcagctgagcatcctgtctcccaaactcaaaaaactaaaatcctggaatcttagaactggaagtgacccttgtctttgtgactgtccttgagctctgctacccatgagttttgcctccaaaattgtcccttttatatgaagtaggactctgcgcagccagaattttttgtgttacctctttgtaatcagatagggcacaactggctgagattgttgtcagtatgtgggtgtggctggaaaaaaataccctctgtgaccaatagttctttcttcactgtacacagctttcatactgtttctcatgaataaaacatattcacatgaca

(The sequence listing continues in the following parts.)
